United States Patent Application Publication US 2008/0050393 A1 - sequence listing, part 11

SEQ ID NO: 45608 - DNA, 4617 bp, Homo sapiens
catctgtggactgctaccgagcgggcgagggagcgcgcgcggccgccacaaagctcgggcgccgcggggctgcatgcggcgtacctggcccggcgcggcgactgctctccgggctggcgggggccggccgcgagccccgggggccccgaggccgcagcttgcctgcgcgctctgagccttcgcaactcgcgagcaaagtttggtggaggcaacgccaagcctgagtcctttcttcctctcgttccccaaatccgagggcagcccgcgggcgtcatgcccgcgctcctccgcagcctggggtacgcgctgaagcccgggaggcttggcgccggcgaagacccaaggaccactcttctgcgtttggagttgctccccgcaaccccgggctcgtcgctttctccatcccgacccacgcggggcgcggggacaacacaggtcgcggaggagcgttgccattcaagtgactgcagcagcagcggcagcgcctcggttcctgagcccaccgcaggctgaaggcattgcgcgtagtccatgcccgtagaggaagtgtgcagatgggattaacgtccacatggagatatggaagaggaccggggattggtaccgtaaccatggtcagctggggtcgtttcatctgcctggtcgtggtcaccatggcaaccttgtccctggcccggccctccttcagtttagttgaggataccacattagagccagaagagccaccaaccaaataccaaatctctcaaccagaagtgtacgtggctgcgccaggggagtcgctagaggtgcgctgcctgttgaaagatgccgccgtgatcagttggactaaggatggggtgcacttggggcccaacaataggacagtgcttattggggagtacttgcagataaagggcgccacgcctagagactccggcctctatgcttgtactgccagtaggactgtagacagtgaaacttggtacttcatggtgaatgtcacagatgccatctcatccggagatgatgaggatgacaccgatggtgcggaagattttgtcagtgagaacagtaacaacaagagagcaccatactggaccaacacagaaaagatggaaaagcggctccatgctgtgcctgcggccaacactgtcaagtttcgctgcccagccggggggaacccaatgccaaccatgcggtggctgaaaaacgggaaggagtttaagcaggagcatcgcattggaggctacaaggtacgaaaccagcactggagcctcattatggaaagtgtggtcccatctgacaagggaaattatacctgtgtggtggagaatgaatacgggtccatcaatcacacgtaccacctggatgttgtggagcgatcgcctcaccggcccatcctccaagccggactgccggcaaatgcctccacagtggtcggaggagacgtagagtttgtctgcaaggtttacagtgatgcccagccccacatccagtggatcaagcacgtggaaaagaacggcagtaaatacgggcccgacgggctgccctacctcaaggttctcaagcactcaaggccgccggtgttaacaccacggacaaagagattgaggttctctatattcggaatgtaacttttgaggacgctggggaatatatatgtaaggtctccaattatatagggcaggccaaccagtctgcctggctcactgtcctgccaaaacagcaagcgcctggaagagaaaaggagattacagcttccccagactacctggagatagccatttactgcataggggtcttcttaatcgcctgtatggtggtaacagtcatcctgtgccgaatgaagaacacgaccaagaagccagacttcagcagccagccggctgtgcacaagctgaccaaacgtatccccctgcggagacaggtaacagtttcggctgagtccagctcctccatgaactccaacaccccgctggtgaggataacaacacgcctctcttcaacggcagacacccccatgctggcaggggtctccgagtatgaacttccagaggacccaaaatgggagtttccaagagataagctgacactgggcaagcccctgggagaaggttgctttgggcaagtggtcatggcggaagcagtgggaattgacaaagacaagcccaaggaggcggtcaccgtggccgtgaagatgttgaaagatgatgccacagagaaagacctttctgatctggtgtcagagatggagatgatgaagatgattgggaaacacaagaatatcataaatcttcttggagcctgcacacaggatgggcctctctatgtcatagttgagtatgcctctaaaggcaacctccgagaatacctccgagcccggaggccacccgggatggagtactcctatgacattaaccgtgttcctgaggagcagatgaccttcaaggacttggtgtcatgcacctaccagctggccagaggcatggagtacttggcttcccaaaaatgtattcatcgagatttagcagccagaaatgttttggtaacagaaaacaatgtgatgaaaatagcagactttggactcgccagagatatcaacaatatagactattacaaaaagaccaccaatgggcggcttccagtcaagtggatggctccagaagccctgtttgatagagtatacactcatcagagtgatgtctggtccttcggggtgttaatgtgggagatcttcactttagggggctcgccctacccagggattcccgtggaggaactttttaagctgctgaaggaaggacacagaatggataagccagccaactgcaccaacgaactgtacatgatgatgagggactgttggcatgcagtgccctcccagagaccaacgttcaagcagttggtagaagacttggatcgaattctcactctcacaaccaatgaggaatacttggacctcagccaacctctcgaacagtattcacctagttaccctgacacaagaagttcttgttcttcaggagatgattctgttttttctccagaccccatgccttacgaaccatgccttcctcagtatccacacataaacggcagtgttaaaacatgaatgactgtgtctgcctgtccccaaacaggacagcactgggaacctagctacactgagcagggagaccatgcctcccagagcttgttgtctccacttgtatatatggatcagaggagtaaataattggaaaagtaatcagcatatgtgtaaagatttatacagttgaaaacttgtaatcttccccaggaggagaagaaggtttctggagcagtggactgccacaagccaccatgtaacccctctcacctgccgtgcgtactggctgtggaccagtaggactcaaggtggacgtgcgttctgccttccttgttaattttgtaataattggagaagatttatgtcagcacacacttacagagcacaaatgcagtatataggtgctggatgtatgtaaatatattcaaattatgtataaatatatattatatatttacaaggagttattttttgtattgattttaaatggatgtcccaatgcacctagaaaattggtctctctttttttaatagctatttgctaaatgctgttcttacacataatttcttaattttcaccgagcagaggtggaaaaatacttttgctttcagggaaaatggtataacgttaatttattaataaattggtaatatacaaaacaattaatcatttatagttttttttgtaatttaagtggcatttctatgcaggcagcacagcagactagttaatctattgcttggacttaactagttatcagatcctttgaaaagagaatatttacaatatatgactaatttggggaaaatgaagttttgatttatttgtgtttaaatgctgctgtcagacgattgttcttagacctcctaaatgccccatattaaaagaactcattcataggaaggtgtttcattttggtgtgcaaccctgtcattacgtcaacgcaacgtctaactggacttcccaagataaatggtaccagcgtcctcttaaaagatgccttaatccattccttgaggacagaccttagttgaaatgatagcagaatgtgcttctctctggcagctggccttctgcttctgagttgcacattaatcagattagcctgtattctcttcagtgaattttgataatggcttccagactctttggcgttggagacgcctgttaggatcttcaagtcccatcatagaaaattgaaacacagagttgttctgctgatagttttggggatacgtccatctttttaagggattgctttcatctaattctggcaggacctcaccaaaagatccagcctcatacctacatcagacaaaatatcgccgttgttccttctgtactaaagtattgtgttttgctttggaaacacccactcactttgcaatagccgtgcaagatgaatgcagattacactgatcttatgtgttacaaaattggagaaagtatttaataaaacctgttaatttttatactgacaataaaaatgtttctacagatattaatgttaacaagacaaaataaatgtcacgcaacttattttttt

SEQ ID NO: 45609 - DNA, 393 bp, Homo sapiens
ctgaagagcattggagatcagcttccgctaagatgctagcttggccaagtctgttatgttcacctgaaaaagtcttagcagagaatttttgcattcccacccaaaagccctctcagccactcaaatgcctatcttctccagtctctcctgccacaggaaggctccatggttgtcctactttaagccttcggtgcctttagtgaggggtacctgaaaaatcttaaaaaaaggcttagcgcccacctcacccctccacccccacgccaacacagtttgctcacatgccagttactccagcataaagctgaaatctattcaatactattgtcccataactgatctgactttgtatgtaaatacagaaaaagcttgtcacctgttgcgacgcggccg

SEQ ID NO: 45610 - DNA, 804 bp, Homo sapiens
  misc_feature (1)...(804): n = a,t,c or g
agagagatgaagacacacgtttagtattttattatgaatcattatttcaaagtcccatactgcatattcatataaggcaacacggcacaatttcaggcttcatcacaaaggatgaaaaagactgtttctaactccctcctaatttgcagacatgcttgaacacttaatggaaggtgaagtttattttgtggcccctcagttctctttcaagtcctctagtaggaaagtctccatggtgtgatcttctgactgggtagaacccgcaattctctgctgtttttagtctttgttccagatgactaattacatgacttggctgcatttgtgaggggccgacaccaacacaattaaaccagtgcaccattcagggccatagggtaggaggcaccagggttcaagaaggaacttgcgtgttgtaggatctgagttggggcggctctattccgactatccatcgatctcctcttcctcatcctcaaaagcttcctccccgtcattggcggtggcatcctggtactgctggtactcggataccaggtcgttcatgttgctctccgcctcggtgaactccatttcatccatgccctcacccgtgaaccagtgcaggaaggccttgcgccggaacatggctgagaactgctcggagatgcgcttgaacagctcctggatggccgtgctgttgccgatgaaggtggaggccatcttcaagtcccggggcgggatgtcgcacacggccaccttcacgttgttgggaatccactccacgaagtagctgctgttcttnctctgaatggccagcatctg

SEQ ID NO: 45611 - DNA, 1710 bp, Homo sapiens
gccagcccggcccgcccgcgcccgtccgcagccgcccgccagacgcgcccagtatgagggagatcgtgcacatccaggccggccagtgcggcaaccagatcggggccaagttctgggaagtcatcagtgatgagcatggcatcgaccccagcggcaactacgtgggcgactcggacttgcagctggagcggatcagcgtctactacaacgaggcctcttctcacaagtacgtgcctcgagccattctggtggacctgggaacccggaaccatgggacagtgtccgctcaggggccttttgggcagcttttccggcctgacaacttcatctttggccagacgggtgcagggaacaactgggcgaaagggcacttacacggagggggcggagctggtggattcggtcctggatgtggtgcggaaggagtgtgaaaactgcgactgcctgcagggctttccagctgacccactcgctggggggcggcacgggctccggcatgggcacgttgctcatcagcaaggtgcgtgaggagtatcccgaccgcatcatgaacaccttcagcgtcgtgccctcacccaaggtgtcagacacggtggtggagccctacaacgccacgctgtccatccaccagctggtggagaacacggatgagacctactgcatcgacaacgaggcgctctacgacatctgcttccgcaccctcaagctggccacgcccacctacggggacctcaaccacctggtatcggccaccatgagcggagtcaccacctccttgcgcttcccgggccagctcaacgctgacctgcgcaagtgggccgttcaacatggtgcccttcccgcgcctgcacttcttcatgcccggcttcgcccccctcaccaggcggggcagccagcagtaccgggccctgaccgtgcccgagctcacccagcagatgttcgatgccaagaacatgatggccgcctgcgacccgcgccacggccgctacctgacggtggccaccgtgttccggggccgcatgtccatgaaggaggtggacgagcagatgctggccatccagagcaagaacagcagctacttcgtggagtggatccccaacaacgtgaaggtggccgtgtgtgacatcccgccccgcggcctcaagatgtcctccaccttcatcgggaacagcacggccatccaggagctgttcaagcgcatctccgagcagttcacggccatgttccggcgcaaggccttcctgcactggtacacgggcgagggcatggacgagatggagttcaccgaggccgagagcaacatgaacgacctggtgtccgagtaccagcagtaccaggacgccacggccgaggaagagggcgagatgtacgaagacgacgaggaggagtcggaggcccagggccccaagtgaaactgctcgcagctggagtgagaggcaggtggcggccggggccgaagccagcagtgtctaaacccccggagccatcttgctgccgacaccctgctttcccctcgccctagggctcccttgccgccctcctgcagtatttatggcctcgtcctccccacctaggccacgtgtgagctgctcctgtctctgtcttattgcagctccaggcctgacgttttacggttttgttttttactggtttgtgtttatattttcggggatacttaataaatctattgctgtcagatacccttaaaaa

SEQ ID NO: 45612 - DNA, 408 bp, Homo sapiens
gtgcaccgcgttctcgcacgcgtcatggcggtcctcggagtacagctggtggtgaccctgctcactgccaccctcatgcacaggctggcgccacactgctccttcgcgcgctggctgctctgtaacggcagtttgttccgatacaagcacccgtctgaggaggagcttcgggccctggcggggaagccgaggcccagaggcaggaaagagcggtgggccaatggccttagtgaggagaagccactgtctgtgccccgagatgccccgttccagctggagaccttgccccctcacgaccgtggatgccctggtcctgcgcttcttcctggagtaccagtggtttgtggactttgctgtgtactcgggcggcgtgtacctcttcacagaggcctactactacatgctggg

SEQ ID NO: 45613 - DNA, 807 bp, Homo sapiens
  misc_feature (1)...(807): n = a,t,c or g
catgatcagtaagtttgacaagcttccagtaaagatcgtacagaagaatgatccatttgtggtggactgctcagaataagcttgggcgtgtgcaggagtttgacagtggcctgctgcactggcggattggtgggggggacaccactgagcatatccagacccacttcgagagcaagacagagctgctgccttcccggcctcacgcaccctgcccaccagcccctcggaagcatgtgacaacagcagagggtacaccagggacaacagaccaggaggggcccccacctgatggacctccagaaaaacggatcacagccactatggatgacatgttgtctactcggtctagcaccttgaccgaggatggagctaagagttcagaggccatcaaggagagcagcaagtttccattttggcattagcccagcacagagccaccggaacattcaagatcctagaggacgaaccccacagtaaggatgagaccccactgtgtacccttctggactggcaggattctcttgccaagcgctgcggtctgtgtgtccaataccattcgaagcctgtcatttgtgccaggcaatgactttgagatgtccaaacacccagggctgctgctcatcctgggcaagctgatcctgctgcaccacaagcacccagaacggaagcaggcaccactaacttntgaaaaggnggagatcatcaagactttatccaaggaggaagagaccaagaaataaaacctcccactttgtctgtacatactggcctctgtgattacatagatcagccattaaaataaaacaa

SEQ ID NO: 45614 - DNA, 648 bp, Homo sapiens
acgggttttagaaaaacaagaattacagcagccaacctatgttgccctgagttacataaatagattcatgacagatgctgcccgccgagagcaggagtccctaaagaagaagattcagccgaagctctcgctgactctgtccagctcagtgtctcgagggaatgtgtccactcccccacgccacagcagtggaagccttactccccccgtgaccccacccatcaccccctcctcttcattccgcaggcagcactccgacaggcagcgagtatgacgaggaggaggtggactatgaggagtcggacagcgatgagtcctggaccacagagagtgccatcagctccgaagccatcctcagctccatgtgcatgaatggaggggaagagaagccttttgcctgcccagttcctggatgtaaaaagagatacaagaatgtgaatggcataaagtatcacgctaagaatggtcacagaacacagattcgtgtccgcaaaccattcaagtgtcgctgtgggaagagttacaagacagctcagggcctgcggcaccacacaatcaatttccatcccccggtgtcggctgagattatcaggaagatgcagcaataacatgctggtcataactgtgccaagaaatcctcaccagcag

SEQ ID NO: 45615 - DNA, 784 bp, Homo sapiens
ttgaaaacctcactgtgggagattcaggcatcctccctaagccagctggccgctgtgctaaagcctgttcagagttaataataatcattagctgaatggtgctggggcctttcagcttcagatctctaagcacttgcaggctgagtcagtcagccctcaccttccccctccttcctgggctgcagagtgtaacagaatgggaaggcactgtgggaaggaagtcaggaatcttgctgctagccacgccttgcagtgacttctcgtctgggagtgggcactgagtcctctcagtaaactaataagacttgcacctgacaaaggtcaagatatgtagggaaccacagtgtatgctaggctgagacctatggtggtggccaggggtggctgttgagcctgaacttcccagtactcctgcccttccttctgtttaccctggcttggcctaacagggggcacccctggtcttgatgcctcaagcccagcatttctgggtcccctctgcaagctcagagagcagggaggcttctggtagtgctcttgatgctcctgtgtctggttggcacaaagatcctgtgtaacatgaaatgaaaggtgcatcagcttgggggctgggaaacctgcgagtatgggtttactccgtccctatcactggtgtggctgtgggcaaaccacttattgcctgacctacctcacagggatgttgtgagggtttgatgagagaatgaatgttaataggaattggaaaattcaaagcattaaacacatgtaaacaggtggtattatt

SEQ ID NO: 45616 - DNA, 341 bp, Homo sapiens
aaaatttgtcttcttgacagggcctgaaaacgaagggaggtgtcgtggagaaatggtgatttttctggttacatcacttgattcaagcactccctggagctttcaaagccttttttatctgctcagagttgacacccaactcagagtcagaactcaccagaagatgaggaacacccccgaaatcaatgtttcctttctccatgggatttttttcaatcttggtacagctgcatatctcccaaactcggatgctcttgtgaaatgacagccacatcagtgtggttactccccacaaataacactagggggaaatgaccttttttatttaaaaaaaaaaaaaa

SEQ ID NO: 45617 - DNA, 1022 bp, Homo sapiens
attgacaattaagtgcttcttgcagcaggtggtcaaagaaaagcatgactaatacgacctattagagtaatctacatctggaccattccttaagtttttcctcaccgacagtaccatcatgccttgagtgttcttttctcccaagtgctattccttaaacacgagagtttaccagttgcctaataatgcaataaaaaatgctttgagatagctaactgcccataaaacaaactcaaattgcttataaagtttcttcccatgttcccatttgatgaaaagtcttacatcacatataactgggaagcaggggtccctcctcaattttcagacattttgaaaggatgacagttctgtttgttagatgagtaaacctctatattcataagttctaaaatccttcattatgagggattcaaagtatttataaaaacactgccctctaaaaatttcctcagatctgaagtatggtcttggtcctgaatatacagtgttatcctatgtttaaaagggtgatccagacatgagacgcaactagttggtgcataagaaggccccacttggctatttcatatctacctacaattgaccaaaaaaaattttttaggccagccaattattatttagcttcgctctttctagtgcaagaaactgcaggctggatcagtagttcaacagctaaacagtcataaaatagtcattgtgcatgttaaatttctttcaatgctttcaaagataaattccaatttctatttacttattcattgtgacagtattactaaacaggtaaggatgggaatattttgttatactgtgtatagtgaatgtattgtactgtgtctgtgaaaactgtgctttaaactatattttcatatgttttgttggggacagagcacattaagtctgaaagcaacagaggtttgttttagaactgaaggcaatttaatcaaaattcctgtcaagaaaagctgcttataaatgtaaatgaaatcacatttaaaataaactgcctctgacccaaaaat

SEQ ID NO: 45618 - DNA, 708 bp, Homo sapiens
ggtcgactttttttttttttttgcagattaaggcttgttttattttaatggctgatctatgtaatcacagaggccagtatgtacagacaaagtgggaggttttatttcttggtctcttcctccttggataaagtcttgatgatctcctccttcttggcctggaggcgctcttcacggcgcttgcgtgcttccttggtcttagacctgcgggcctcagcctggtcagccagggagcttcttgcgggccttgtctgccttcagcttgtggatgtgttccatgagaatccgcttgtttttgaacacattccccttcaccttcaggtacaaggctgtgatacatgtggcgatcgatcttcttagattcacgggtatcttctgagcagccggcgcaaaatcctcattctcctcatccatgtgaccttctctggcattcggggcattggctgtacccttccgcttacctatgcccatgtgccctgcccttccggcgggccaaggtgtttttccggcatcgagcccgggaatggaccgtcacaggcttgcggatgatcagcccatctttgatgagcttccggatctgctgacgggagttggcattggcgatttcattggtctcattggggtctaaccagaccttcttcttgccacagcggaggacactagaggcgagcctcttctgaagcctgagcatactcatggctgcggccg

SEQ ID NO: 45619 - DNA, 846 bp, Homo sapiens
taaaaatccacaccctgtcctacgatgtggaggaggaggaggagttccaggagctggagagcacctactcaagcgacacagagagtgaggacaatttcctcatgatgcccccgcggaccacctgggcctcagtgtcttctccatgctctgctgcttctggcctctgggaatcgcagccttctacttgtcccatgagaccaacaaagccgtggccaagggggacttgcaccaggccagcaccagctcccggcgggccctattcctggcagtgctgtccatcaccattgggactggcgtcttatgtgggcgatgccgtggccctcatcgcctacctctccaagaacaaccacctgtgagcttcctgcgaatggagggggagcacccggggccaggtctgtgtggacgtggaggaagcaggcataccgcatgatgctgtacagtacaaatgattgccaaatgatgccacgaagccctgggatttcctacccatggatttattttgtttttatcctttaatttcatgttcacagcactgtgtagagcaccagacagacgggcactgctaatccttccaaaggaaagctccaaagatcccagcccgcaaggctgtctctggatggattctggtggatgaatggcaacgcggctctctgcagcctgccagtgcccagagtgccaccgcattagcaatatacaaacagtccaaaaaagtgtttattttttatcggaatacggtgcaataggcagaggacaagggacacatcactcttctgtctgtgggccctgctggagtcctttgtgccccccggagtccacacgccttccctgcaagacgagaatggggct

SEQ ID NO: 45620 - DNA, 3321 bp, Homo sapiens
gcccacctgtcctgcagcactggatgctttgtgagttggggattgttgcgtcccatatctggacccagaagggacttccctgctcggctggctctcggtttctctgctttcctccggagaaataacagcgtcttccgcgccgcgcatggagcctcccggccgccgcgagtgtccctttccttcctggcgctttcctgggttgcttctggcggccatggtgttgctgctgtactccttctccgatgcctgtgaggagccaccaacatttgaagctatggagctcattggtaaaccaaaaccctactatgagattggtgaacgagtagattataagtgtaaaaaaggatacttctatatacctcctcttgccacccatactatttgtgatcggaatcatacatggctacctgtctcagatgacgcctgttatagagaaacatgtccatatatacgggatcctttaaatggccaagcagtccctgcaaatgggacttacgagtttggttatcagatgcactttatttgtaatgagggttattacttaattggtgaagaaattctatattgtgaacttaaaggatcagtagcaatttggagcggtaagcccccaatatgtgaaaaggttttgtgtacaccacctccaaaaataaaaaatggaaaacacacctttagtgaagtagaagtatttgagtatcttgatgcagtaacttatagttgtgatcctgcacctggaccagatccattttcacttattggagagagcacgatttattgtggtgacaattcagtgtggagtcgtgctgctccagagtgtaaagtggtcaaatgtcgatttccagtagtcgaaaatggaaaacagatatcaggatttggaaaaaaattttactacaaagcaacagttatgtttgaatgcgataagggtttttacctcgatggcagcgacacaattgtctgtgacagtaacagtacttgggatcccccagttccaaagtgtcttaaagtgtcgacttcttccactacaaaatctccagcgtccagtgcctcaggtcctaggcctacttacaagcctccagtctcaaattatccaggatatcctaaacctgaggaaggaatacttgacagtttggatgtttgggtcattgctgtgattgttattgccatagttgttggagttgcagtaatttgtgttgtcccgtacagatatcttcaaaggaggaagaagaaaggcacatacctaactgatgagacccacagagaagtaaaatttacttctctctgagaaggagagatgagagaaaggtttgcttttatcattaaaaggaaagcagatggtggagctgaatatgccacttaccagactaaatcaaccactccagcagagcagagaggctgaatagattccacaacctggtttgccagttcatcttttgactctattaaaatcttcaatagttgttattctgtagtttcactctcatgagtgcaactgtggcttagctaatattgcaatgtggcttgaatgtaggtagcatcctttgatgcttctttgaaacttgtatgaatttgggtatgaacagattgcctgctttcccttaaataacacttagatttattggaccagtcagcacagcatgcctggttgtattaaagcagggatatgctgtattttataaaattggcaaaattagagaaatatagttcacaatgaaattatattttctttgtaaagaaagtggcttgaaatcttttttgttcaaagattaatgccaactcttaagattattctttcaccaactatagaatgtattttatatatcgttcattgtaaaaagcccttaaaaatatgtgtatactactttggctcttgtgcataaaaacaagaacactgaaaattgggaatatgcacaaacttggcttctttaaccaagaatattattggaaaattctctaaaagttaatagggtaaattctctattttttgtaatgtgttcggtgatttcagaaagctagaaagtgtatgtgtgggcatttggttttcactttttaaaacatccctaactgatcgaatatatcagtaatttcagaatcagatgcatcctttcataagaagtgagaggactctgacagccataacaggagtgccacttcatggtgcgaagtgaacactgtagtcttgttgttttcccaaagagaactccgtatgttctcttagggttgagtaacccactctgaattctggttacatgtgtttttctctccctccttaaataaagagaggggttaaacatgccctctaaaagtaggtggttttgaagagaataaattcatcagataacctcaagtcacatgagaatcttagtccatttacattgccttggctagtaaaagccatctatgtatatgtcttacctcatctcctaaaaggcagagtacaaagtaagccatgtatctcaggaaggtaacttcattttgtctatttgctgttgattgtaccaagggatggaagaagtaaatatagctcaggtagcactttatactcaggcagatctcagccctctactgagtcccttagccaagcagtttctttcaaagaagccagcaggcgaaaagcagggactgccactgcatttcatatcacactgttaaaagttgtgttttgaaattttatgtttagttgcacaaattgggccaaagaaacattgccttgaggaagatatgattggaaaatcaagagtgtagaagaataaatactgttttactgtccaaagacatgtttatagtgctctgtaaatgttcctttcctttgtagtctctggcaagatgctttaggaagataaaagtttgaggagaacaaacaggaattctgaattaagcacagagttgaagtttatacccgtttcacatgcttttcaagaatgtcgcaattactaagaagcagataatggtgttttttagaaacctaattgaagtatattcaaccaaatactttaatgtataaaataaatattatacaatatacttgtatagcagtttctgcttcacatttgattttttcaaatttaatatttatattagagatctatatatgtataaatatgtattttgtcaaatttgttacttaaatatatagagaccagttttctctggaagtttgtttaaatgacagaagcgtatatgaattcaagaaaatttaagctgcaaaaatgtatttgctataaaatgagaagtctcactgatagaggttctttattgctcattttttaaaaaatggactcttgaaatctgttaaaataaaattgtacatttggaaaaaaaaaaaaa

SEQ ID NO: 45621 - DNA, 172 bp, Homo sapiens
  misc_feature (1)...(172): n = a,t,c or g
ttngaagtntatggtccnnnnnnnnnnnnnnnnnnnnnnnnnnnnnnnnnnnnnnnnnnnngagatctctcgaggatccgaattcgcggccgcgtcgacattatgaagggccttgagcatctggattctgcctaataaaaaacatttattttcattgtaaaaaaaaaaaaaa

SEQ ID NO: 45622 - DNA, 381 bp, Homo sapiens
ttttttacaatgaaaataaatgttttttattaggcagaatccagatgctcaaggcccttcataatatcccccagtttagtagttggacttagggaacaaaggaacctttaatagaaattggacagcaagaaagcgagcttagtgatacttgtgggccagggcattagccacaccagccaccactttctgataggcagcctgcactggtggggtgaattctttgccaaagtgatgggccagcacacagaccagcacgttgcccaggagcctgaagttctcaggatccgtcgacgcggccgcgaattccagatctatgaatcgtagatactgaaaaaccccgcaagttcacttcaactgtgcatcgtgcaccatctcaatttc

SEQ ID NO: 45623 - DNA, 334 bp, Homo sapiens
  misc_feature (1)...(334): n = a,t,c or g
tctttctctgccctggttaactgctagtggactttgggatcagttgctttctggagcttcctggcacctccaggctgggccaggtgcccttgaggttgtccaggtgagccaggccatcactaaaggcaccgagcactttcttgccatgagccttcaccttagggttgcccataacagcatcaggagtggacagatccccagaggactcatagaacctctgggtccagtcgacgcggtcgcgaattccagatttatgaatngtanatnttgantanccnnngttgttctntttcnattgtncnttgnnctccntntnnattnntntcntttatac

SEQ ID NO: 45624 - DNA, 388 bp, Homo sapiens
ccactatatcagataagcttgacattacagccaagatggtgctgtcccagagacaacgagatgaactaaatcgagctatagcagattatcttcgttcaaatggctatgaagaggcatattcagtttttaaaaaggaagctgaattagatgtgaatgaagaattagataaaaagtatgctggtcttttggaaaaaaaaatggacatctgttattagattacaaaagaaggttatggaattagaatcaaagctaaatgaagcaaaagaagaatttacgtcaggtggacctcttggtcagaaacgagacccaaaagaatggattccccgtccgccagaaaaatatgcattgagtggtcacaggagtccagtcactcgagtcattttccatc

SEQ ID NO: 45625 - DNA, 336 bp, Homo sapiens
acaaattaaaaacacctaagtgactaccacttatttctaaatcctcactatttttttgttgctgttgttcagaagttgttagtgatttgctatcatatattataagatttttaggtgtcttttaatgatactgtctaagaataatgacgtattgtgaaatttgttaagggtattctgtgattatcttttaagcactacagggcttcacttacagtaccatgcactatgagtagctaaagcattcatttggcacctagagagaaaattacagatacagctaattttgctttcattatcatttttaacatcaatagaaataagcatataactttcact

SEQ ID NO: 45626 - DNA, 446 bp, Homo sapiens
atggactgggaagaagagcaggtcagcagcccaaatattctacgacttatttatcaaggaccgatttctacatggaaatgtcacattaggagcattaaaacttccttttggcaaaacaacagtgatgcatttggtggccagagagacattaccagagccaaactctcaaggtcagaggaatcgtgagaagactggagagagtaattgttgtgtaatcctgtaaacactgtctgcctagtgtgatgtgatatagtctttgtctttcatgctgctgggacagaaaagacccgacattgcttcagaaaccgttcagaacagtctgcctgtaaacacatggaactgaattaccacatgaacactgcatcttttctcatgaaagtaaaaagaaccaagaacatttttcactctgattttttatttcttggattttttggtgagctgggtta

SEQ ID NO: 45627 - DNA, 499 bp, Homo sapiens
gctatgacatgattacgaatttaatacgactcactatagggaatttggccctcgaggccaagaattcggcacgagcatggtgcacctgactcctgaggagaagtctgccgttactgccctgtggggcaaggtgaacgtggatgaagttggtggtgaggccctgggcaggctgctggtggtctacccttggacccagaggttctttgagtcctttggggatctgtccactcctgatgctgttatgggcaaccctaaggtgaaggctcatggcaagaaagtgctcggtgcctttagtgatggcctggctcacctggacaacctcaagggcacctttgccacactgagtgagctgcactgtgacaagctgcacgtggatcctgagaacttcagggtgagtctatgggacccttgatgttttctttccccttcttttctatggttaagttcatgtcataggaaggggataagtaacagggtacagtttagaataggaaacaga

SEQ ID NO: 45628 - DNA, 1599 bp, Homo sapiens
  misc_feature (1)...(1599): n = a,t,c or g
gtcgacgcctacggaggtggcaccatctccttctcggcatcatggccgccctcagaccccttgtgaagcccaagatcgtcaaaaagagaaccaagaagttcatccggcaccagtcagaccgatatgtcaaaattaagcgtaactggcggaaacccagaggcattgacaacagggttccgtagaagattcaagggccagatcttgatgcccaacattggttatggaagcaacaaaaaaacaaagcacatgcttgcccagtggctttccggaagttccctggtccacaacgtcaaggagcttggaagtgctgctgatgtgcaacaaatcttactgtgccgagatcgctcacaatgtttcctccaagaacccgcaaagccatcgtggaaagagctgcccaactggccatcagagtcaccaaccccaatgccaggctgcgcagtgaagaaaatgagtaggcagctcatgtgcacgttttctgtttaaataaatgtaaaaactgccatctggcatcttccttccttgattttaagtcttcagcttcttgggccaacttagtttgccacagagattgttcttttgcttaagcccctttgggaatctcccatttggaggggatttgtaaaggacactcagtccttgaacaggggaatgtggcctcaagtgcacagactagccttagtcatctccagttgaggctgggtatgaggggtacagacttggccctcacaccaggtaggttctgagacacttgaagaagcttgtggctcccaagccacaagtagtcattcttagccttgcttttgtaaagttaggtgacaagttattccatgtgatgcttgtgagaattgagaaaatatgcatggaaatatccagatgaatttcttacacagattcttacgggatgcctaaattgcatcctgtaacttctgtccaaaaagaacaggatgatgtacaaattgctcttccaggtaatccaccacggttaactggaaaagcactttcagtctcctataaccctcccaccagctgctgcttcaggtataatgttacagcagtttgccaaggcggggacctaactggtgacaattgagcctcttgactggtactcagaatttagtgacacgtggtcctgattttttttggagacggggtcttgctctcacccaggctggggagtgcagtggcacactgactacagccttgacctccccaggctcaggtgatcttcccaactcaagccttccaagtacctgggactacagatgcacacctccaaacctgggtagtttttgaagtttttttgtagaggtggtctagccatgttgcctaggctcccgaactcctgagctcaagcaatcnnnnnnnnnnnnnnnnnnnnnnnnnnnnnnnnnnnnnncttctgtagtatataggtcatgagggatatgggatgtggtacttatgagacagaaatgcttacaggatgtttttctgtaaccatcctggtcaacttagcagaaatcgtgcgctgggtataataaagcttttctacttctagtctagacaggaatcttacagattgtctcctgttcaaaacctagtcataaatatttataatgc

SEQ ID NO: 45629 - DNA, 693 bp, Homo sapiens
  misc_feature (1)...(693): n = a,t,c or g
ttttaagtagtaccacacacattttattgcagcacagtttaaaaatttaacaaatgaaagattaaaaataaaaaaacaaaaataaaaaaaattaaaaatacagacgtccagagatgctctaaaacagttaagttaaagatcaggaaaaataaggtcatagacttaacagccagtaaaattcttttccagtgtggggatggggatgagggcaagggtggggttgggagagaaaaggtttacgtgatcaaaccacttaaaaatactaatgccttcgctttctctcccaagatgcaaaactccaaagtcaatcaggaggccggagaaattcttagaaacattcagaaaaactcgattttaatccggttaaaaatcatcagtgtcattatcatcatcatcatcaccatcataagtattaatataataataataagtaatagtaactagtaacaacaataaaaaggaaatcagcggaaagtcaggaaaaatgttaaaaaaaaattggaataacttactgtagctgaagatcaaaaaaatctcactgtaaaaaaacaaaaataaaaatagcccagattagaaaaacngggaggtgcaaaaatgtcaagtcagtaaagttcatttcttttctctttccaaaagcagtttccacaaaaaccgcaaggataaagttttcagtagcagacaagcaaagccctt

SEQ ID NO: 45630 - DNA, 1367 bp, Homo sapiens
atgctcttgtatatagcagacaatctagcctgttttccataccagacacaggaagagccgttgtttataatgcatcatatagacattacactctcagtttctggtagtaacctactgcagtcattcaaggagtctatggtaaaggacaaaaggaaagagagaaaatcatcacctagtaaggaaaatgagtcaagcgacagtgaagaagaagtttccaggcctcggaagtcacggaaacgtgtagattcagattcagattcagattcagaagacgatataaattcagtgatgaaatgtttgccagaaaattcagctcctttaatcgaatttgcaaatgtgtcccagggtattttattacttctcatgttaaaacaacatttgaagaatctttgtggattttctgatagtaaaattcagaagtactctccatctgaatctgcaaaagtatatgataaagcgataaaccgaaaaacaggagttcattttcatccaaaacaaacactggacttcctgcggagtgacatggctaattccaaaatcacagaagaggtgaaaaggagtatagtaaaacagtatctagatttcaaacttctcatggaacatctggaccctgatgaagaagaagaagaaggggaggtttcagctagcacaaatgctcggaacaaagcaattacctcactgcttggaggaggcagccctaaaaataatacagcagcagagacagaagatgatgaaagtgatggggaggatagaggaggaggcacttcagggtcattgagaaggtcaaaacgaaattcagactctacggagttggcagcacagatgaatgaaagtgttgacgtcatggatgtcatcgctatttgctgtccaaagtacaaagatcgaccacaaattgcaagagtagtgcagaaaaccagcagtggcttcagtgttcagtggatggcaggctcctacagtggctcctggactgaggctaagcgccgtgatggccgcaaactggtgccttgggtagacactattaaagagtcagacattatttacaaaaaaattgctctaacgagtgctaataagctgactaataaagttgttcagactttacgatccctgtatgccgccaaggatgggacttccagctaatgaatttgtacatgcagccaaatttacaggaatttttttaaaaggctaaaagacgaaataccaccggaactggtcgaatgaggcacctaaaaattgtataccgcagattcaggcatggattccgtgaaggaacaacacctaaacccaagagggcagctgttgcagcatccagttcatcttaagaatgtcaacgattagtcatgcaataaatgttctggttttaaaaaata

SEQ ID NO: 45631 - DNA, 985 bp, Homo sapiens
taacaaagagaagtaaaaaaatttattgcagtattcgctccaccagattacctggggatcccttttcttgtattgttttcagggtgacctaatacatcaaaatctacatttacaaaaactccttctgcagataggtcatagatactgcatgcttttttttttttcaacagaataaattatatatccaggagattctgccattttacagcctggaaaaaacaatgcttccctggaaactgggctaagctaaagaaagccatccgctgctaggttaaactccaagaacactttattaagaacattaacagactaatttccaacattcacttgtttattttttttaaacagaaagttttttttccaagatataaacaatttttgttaaactataatacagtgggagtaaaaatgaactgagaatctgtttctgctgcacaacagcgaagggagctcccacaaaaatgtttgcccaacatttccttcttttgttcctgcatcccaggttccacttactcttcataaaactgatttttttttgccagaatgttggtatttcaagtttttctgccttttaaaaaaattcctgtaaatttggctgcatgtacaaattcattagctggaagtcccatccttggcggcatacagggatcgtaaagtctgaacaactttattagtcagcttattagcactcgttagagcaatttttttgtaaataatgtctgactctttaatagtgtctacccaaggcaccagtttgcggccatcacggcgcttagcctcagtccaggagccactgtaggagcctgccatccactgaacactgaagccactgctggttttctgcactactcttgcaatttgtggtcgatctttgtactttggacagcaaatagcgatgacatccatgacgtcaacactttcattcatctgtgctgccaactccgtagagtctgaatttcgttttgaccttctcaatgactaaaac

SEQ ID NO: 45632 - DNA, 492 bp, Homo sapiens
attccgactccacttatagggaattttggccctcgaggcccaagaattcggccgcagaagcgagatgacgaagggaacgtcatcgtttggaaagcgtcgcaataagacgcacacgttgtgccgccgctgtggctctaaggcctaccaccttcagaagtcgacctgtggcaaatgtggctaccctgccaagcgcaagagaaagtataactggagtgccaaggctaaaagacgaaataccaccggaactggtcgaatgaggcacctaaaaattgtataccgcagattcaggcatggattccgtgaaggaacaacacctaaacccaagagggcagctgttgcagcatccagttcatcttaagaatgtcaacgattagtcatgcaataaatgttctggttttaaaaaatacatatctggttttggagtttggatcataatacaagagaagcacagggcaaagacactgcataacctcaagaactaagaatggaagg

SEQ ID NO: 45633 - DNA, 918 bp, Homo sapiens
  misc_feature (1)...(918): n = a,t,c or g
tttttaagtagactcttgctgctttgttataaatatattatgtacatccaaaacatgacattaaaatattactccgtgttacagaaaagatattaaggctttctattatttacattaaacaagcaagcacctttaaaaaaaaacaaaacaaaaaagccctactcttccttctctgacatactctggccagaggggataccgtgtcctcttccaaatgaccaagatgctctgcaggggctgtgccctgtgaagacatcttggtattggaaacatcagctctggcagggtgggggcagcagagaagtaggggtctagacttgagcaggaggttccagcctcttctggccggctaccctcagacccctgctgagcttcaccatccttgggggacaggctaggctgaaggtggtggctggggctgttccacctggcccagcctcccggggtcagtatgcagggctgtggcagaacaatgctccacgacgcttaggtgtgcctgggggctccccagaccactggggccagacaaggagggaaagaggcaactcactggccccaacgccagccacactgaagggctgcccagcggggcagggacggcaggcgtgcagggagtgggtaaacctcctctctaccaggggaggctggcagagtcaggcttgcagatagagcaactcaggtggctgaggaggggccgaggaaaaaaaaaaaaagaaatgaaaaatcagtggctcaagtattctgtgtcatgaggggtgggctggggntcacngcccagcccaggagatgtcctctccatctggaggggccagctcaaagaggctggaatttggcagatggcttcggtttgggggctagggaaggttggcaaccaggtagcaggctcggagaagttatttgatcttctgggcccatttc

SEQ ID NO: 45634 - DNA, 1105 bp, Homo sapiens
  misc_feature (1)...(1105): n = a,t,c or g
ggccctcagtcccaggntttgtgtggtgtagtgatggacaggagcctcgtccagggagagctggtgacggcctccaaggccatcattgaaaaggagtaccagccccacgtcattgtgagcaccacgggccccaaccccttcaccacactcacagaccgtgagctggaggagtaccgcagggaggtggagaggaagcagaagggctctgaagagaatctggacgaggctagagaacagaaagaaaagagtcctccagaccagcctgcggtcccccacccgcctcccagcactcccatcaagctggaggaagaccttgtgccggagccgactactggagatgacagtgatgctgccacctttaagccaactctccccgatctgtcccctgatgaaccttcagaagcactcggcttcccaatgttagagaaggaggaggaagcccatagacccccaagccccactgaggcccctactgaggccagccccgagccagccccagacccagccccggtggctgaagaggctgccccctcagctgtcgaggagggggccgccgcggaccctggcagcgatgggtctccaggcaagtccccgtccaaaaagaagaagaagttccgtaccccgtcctttcttgctcttcttcagaaaggacggggtacggaaagccctgcgctaacactgtcctgtccggagcgaccctggctctgccagcgtccccggccacgtctgtgctctgtccttgtgtaatggaatgcaaaaaagccaagccctccgcctagaggtcccctcacgtgaccagccccgtgtagccccgggctgacccagtgtgtgctcagcagccccaccccaccctgccccttgtcctctcagagcctcagcttctgggggagacatgctctccccacaggggggaggcactaagtcatggtcctggctggaaggtactgaaggcttctgcagctttggctgcacgtcaccctcctgagcctcacctttcctgcgtccctctgttgtgaaatcaccacattctgctctgcttggnttcccttcaccctaaagtctcangngacggnatnnnactnctggcttatgnggnattttctct

SEQ ID NO: 45635 - DNA, 4734 bp, Homo sapiens
tcctagttcctgcattttttcctctggttcttattagcatttttcactttaaaaagtaaaaatacgtattacagttgccaagtttaaattattgggataaaatgccctaccacagaattaaaaccaaaataatgctcatgtgatgtcccttaaggtggtgagtgggttcaggaccctcagcccacctgctcagcagggagaaggcagggagggaggggtccctactcgcacaggacagcgggggacaggccagggcataccattcgagtccatcacagaagtggctctggcagacttcttctttggaaataagaatagaaataagttttgtatctgaagttggttaagtttctctgaaattcgcatcagtcaacacccaggtcacagcttcctttatcctctcttggagaggatcagggaaagggttgagagagccctgccttctcagagggcggccgagcgggctgccccatctgccatggaggcaggtacaggctcatggcgtggcgtccacagctcctaccatatccttcttgcttctctgcagagaatctggacgaggctagagaacagaaagaaaagagtcctccagaccagcctgcggtcccccacccgcctcccagcactcccatcaagctggaggaaggtgagctctgggtggcagcggccgccactgtgggagggtgcacggctcgtgcgcgctgtggcggaatgtggcgggagtcgtgttaacagcaacacggaagtgtgtgcttgcatcagcgccaggacgtgacacctttctcctcctatattgcttctgtcctgggtaactccaggcaaaacagatttgtatgtgagctgtgaccaggtaggaaggccggcctcgggggtcggaacccaccatggttgctggtgtccacgttgcccattgctcgcacactcctcgtgctgtgttgtcatgcagatgccaccttcggaggtgccctccgctgtgtgagccacacgccggctgcctctcagccaccgtgtgtctgtggtgtgtgatcccgggtgtctgtccctcggtctcgtacatccatgtctctcgtgaagcccgtggccctgcctttcttcttctgtaacctgatggctgtgactgaatgcatagattctctccttgtgcttttttctccctgtggctgcgtcacaagcaggagacggatgcgctagagagtacctgttaccctagtaagtaccgcgctgcctccgctctccaccggtgccctgcgctttgcctcattctcctgcttctttgttgtttattaagttttgttttctgtttatttaaaataaaaacagaagccccccttttttgtacccagtcccttggaggccttcctggaagtggttcagtcacctgagtgctgtgctgccttcagcggcagcgggtacctccacgcacctaggtgccatggagcactctgggcctcaggagttcctacctccagcctttgagggtctctttggattgcttggtgggagggttttgccacactggatcagatgtaagtgcagcctcggttcagacagggtggggttctgccacctgccgtgtggggtcagattgccttggacctttgctgaagctggtccaaaggaggtgggcagaggagcggatattggaccctcgtaaagcagtgtgatgttcactcagatgatggcagctctccagagcgagtgccctggggcagcctccgtcctagcatcagccacaccatgcccagcagagcgggccccatctcctcagggggagcggcgcctgtgtgcccatagccctttcccggttctcatgaagcgtggcctggaatcagcctggggcagctggcagggtgggggtgcttccagcttcccaaaggtaaagcactgagagtttggggcctgggcctcctgtgctgctcctaaccactcagctgactcccctggccctgatgtgtggcttgatttttaaacactaaacagcttgtggtgcctaacctgtcagttgctggtaactttgtaggccgtttacgaatggacagagcgggtgcccgggtaagtgcaaggaaggcgcccccaggctgtgtcctcagggccgctgtgctccttcacagatggccactcctgatgctgggtggagtttttgcccccactccttgccttacaggccatctctttccttttaattaacttccagcctaaacggctttgttcttttggatgttgacgtcacacaacgtgctgtgggagttatgcacgattttctactggctgttttgggggagaccaggtgttgtagacccaaatttagacttaatttcagtactactagtacatgccctttagggttgacagggcagacttctcgtcacataatgaaagcgggacgtcgctcctttagtcgtcctcagcttgtgctgcagtctgtctttccggcggggggacccaggcctgggacggagtctggtgttgtcagcacactgcccaccagaaggagctaaaaactaccccgagactgagtctgtattttatgatattagctccatccagccgtacagtagagtagaccatattttaagtttcttgtcttggtaaaaatctgtagagtaaaataaaatggcagtttcgtgtgtggggctcccccatctcaagctgccctttgagatctgggcaggaacccttaatcccatctctcacctcacccactagaccttgtgccggagccgactactggagatgacagtgatgctgccacctttaagccaactctccccgatctgtcccctgatgaaccttcagaagcactcggcttcccaatgttagagaaggaggaggaagcccatagacccccaagccccactgaggcccctactgaggccagccccgagccagccccagacccagccccggtggctgaagaggctgccccctcagctgtcgaggagggggccgccgcggaccctggcagcgatgggtctccaggcaagtccccgtccaaaaagaagaagaagttccgtaccccgtcctttctgaagaagagcaagaagaagagtgactcctgaaagccctgcgctaacactgtcctgtccggagcgaccctggctctgccagcgtccccggccacgtctgtgctctgtccttgtgtaatggaatgcaaaaaagccaagccctccgcctagaggtcccctcacgtgaccagccccgtgtagccccgggctgacccagtgtgtgctcagcagccccaccccaccctgccccttgtcctctcagagcctcagcttctgggggagacatgctctccccacaggggggaggcactaagtcatggtcctggctggaaggtactgaaggcttctgcagctttggctgcacgtcaccctcctgagcctcacctttcctgccgtccctcctgttgtgaaatcaccacattctgtctctgcttggcttcccctccaccctaaagtctcaggtgacggactcagactcctggcttcatgtggcattctctctgctcagtgatctcacttaaatctatatacaaagccttggtcccgtgaaaacactcgtgtgcccaccagcggccttgaagaggcaggtctgggccagatgctgggcaggaaaccccagcggcagatgggcctgtgtgcacccaacgtgatgctatgcatgtctgaccgacgatccctcgaccagaatcagattcaggagctcagtttctttttcacttgggtctctggattcctgtcatagggaaggtatatcaggaggggaagaggcctttctagaattttctttgagcaggtttacaatttagcttacatttttcgactgtgaacgtgaataggctgctttttgctttcttctttccagaccccacagtagagcacttttcacttatttgggggaggcttcaggggactgttctcaccttaactcagccagaaagatgccctagttgtgatcaaaggtaactcgaggtggagggtagccctggggcccctcgacatcaccgtcattgatggagcctgaaccgtgtgctcctcggcagatgctgttgttgttacttccctccaagaggctggaaaagggctcagagctgctgagcaggaaccggagggtgacccatttcaggaggtgccggtaccagcctgactaggtacaggcaagcttgtgtgggcccaacaggcccttggtagagctggtgccagatgtgggctcagatcctgggcatgatgggccgagccacctcgggatcccactgattgggccagccgagcgagaaccaggctgctgcatggcactgaccgccgcttccagcttcctctgagccgcagggcctgctacgcgggcaagcgtgctgcctctcttctgtgtcgttttgttgccaaggcagaatgaaaagtccttaaccgtggactcttcctttatcccctcctttaccccacatatgcaatgacttttaattttcacttttgtagtttaatcctttgtattacaacatgaaatatagttgcatatatggacaccgacttgggaggacaggtcctgaatgtcctttctccagtgtaacatgttttactcacaaataaaattctttcagcaagttccttgtctaaatctgggaagcagttttatattttaatttctttgttcccatgtttgtctcgtgctgaaaagagacctcctaatgttcatgtcttgataaaatgtcacctgcaggaattcgatatcaagctt

SEQ ID NO: 45636 - DNA, 1581 bp, Homo sapiens
  misc_feature (1)...(1581): n = a,t,c or g
caagaaaattgtgaaaataaccagttagcaaatttactgctcaaatccaattctgtattcaaaaaatattaagagctgatcaatgatttattttcatacctcattacagtaagaaaaagccctctgaaatttatatttgaaagcaaactgggacaaaaatctgctttatctatgaacttcccactagaaaatacaagcataccattattagagaacataagacatcaaaagccttatgttttaaaaccatactgaaatcatttaccaaataacaaagatcttaatctaaaagatagtgaatacatcatcatcatgaaatctggttttatgtgctctatgaagtacttggagaattgcttttttattttttttttgctttattaggtcacacaaaacagaatgaattagcagaaaaatgtatgttataaaacagcatttactacttcaatttaattttttttactaacaattgtggacctttttgatgacacttatgtatgtttttaataaattatgtacttattagtacttaatgagcccttcctgcctcaatataaaattactaaacttggagaattacagattttattgtaggccctgatgttagtcactttggagaagctaaaaatttggccaaaatgaatgatccaatgatcctttaagttatctttatatttaatatagtgtgatcctggactacactgatttaaaacatgctttttgaaaaatgtcttaggtaatttggggccggtaatcttcagtgtgtttcaaacactacttggcaccaaaatcacgtaggttggttggggtattgggttctcaaactaggataagaaagacacctgcaggagtttgcttaaacacaactggctagcccctgcccctgcccctgcccctagagtatctgatttagtaggtcngatccgaggtgaggncccgagagaggctgcatttcccacaagtacccaggtgacgntaatnctgnatgttggnacnaaacttttgacagtcactgcccaaggtatctggtaagaatgcatactcttgggccccatgcttaaatttgaatttctgagattggggtcttcagatctgcatttaacaacatcctgggcaagtgtgagaacccacagtttaagaatcactgtgacaatttggctgggttaatttgactattactggccaatgccatcagacgtcatatatcatatacataaaaatggaaataatgctacatgaatagccccaagcctgatacggttccaatgaacacacagggttttgaatataaatcctacctctgttacttactagctttgtgacagtgacaaagttactttgtctctgagcctcagtttccttatctataataggggtataacacccaaattttgaggattaacactattatacacagattatctaagcacagtacctagcatacagttggcattggataaatactagctattacttatttccttcagtatctggtcaaagcaaatttttcattcacttaaatgcagtacttacactccaaggtaacagaataataatacaatcttctatttattgctccct

SEQ ID NO: 45637 - DNA, 749 bp, Homo sapiens
cactcttgagccacaatacctgtcaccagcctgttgttttaagagagaaaaaaaatcaaggatatctgattggagcaaaccacttctttagtcatctgtcttacctccctgggacagctgttacctttgcagtgttgccgaatcacagcagttacctttgcaatgttgccgaatcacagcagttctgttggagaaacgcttggtttccggatccagagccacagaaagaaatgtaggtgtgaagtattaggctgctgtcagggagaggatggcagatggaggcatcaagcacaaggaaaatggcacaacctgtgcccctgttatacacacgttcatgtgcacccaagaacctatgactttcttccagttccttctaccaggtccccatcctgctgccagctctcaacatagcaggccataggacccagagaagaatcccagcgttgcctcaaagtctaaccatcataaagacactgcctgtcttctaggaatgaccaggcacccagctcccactggactccaattttttttcctgccttatttagaattctttggcgggaagggtatgatgggttcccagagacaagaagcccaaccttctggcctgggctgtgctgatagtgctgagggagataggaatttgctgctaagatttttctttggggtggagtttcctctgtgaggggcttgcagctatccttcctgtgtatacaaatacagtattttccatggttaaaaaaaaaaaaaaa

SEQ ID NO: 45638 - DNA, 5467 bp, Homo sapiens
agagacttgcgcgcacgcacagtcctctggagatcaggtggaaggagccgctgggtaccaaggactgttcagagcctcttcccatctcggggagagcgaagggtgaggctgggcccggagagcagtgtaaacggcctcctccggcgggatgggagccatcgggctcctgtggctgctgccgctgctgctttccacggcagctgtgggctccgggatggggaccggccagcgcgcgggctccccagctgcggggccgccgctgcagccccgggagccactcagctactcgcgcctgcagaggaagagtctggcagttgacttcgtggtgccctcgctcttccgtgtctacgcccgggacctactgctgccaccatcctcctcggagctgaaggctggcaggcccgaggcccgcggctcgctagctctggactgcgccccgctgctcaggttgctggggccggcgccgggggtctcctggaccgccggttcaccagccccggcagaggcccggacgctgtccagggtgctgaagggcggctccgtgcgcaagctccggcgtgccaagcagttggtgctggagctgggcgaggaggcgatcttggagggttgcgtcgggccccccggggaggcggctgtggggctgctccagttcaatctcagcgagctgttcagttggtggattcgccaaggcgaagggcgactgaggatccgcctgatgcccgagaagaaggcgtcggaagtgggcagagagggaaggctgtccgcggcaattcgcgcctcccagccccgccttctcttccagatcttcgggactggtcatagctccttggaatcaccaacaaacatgccttctccttctcctgattattttacatggaatctcacctggataatgaaagactccttccctttcctgtctcatcgcagccgatatggtctggagtgcagctttgacttcccctgtgagctggagtattcccctccactgcatgacctcaggaaccagagctggtcctggcgccgcatcccctccgaggaggcctcccagatggacttgctggatgggcctggggcagagcgttctaaggagatgcccagaggctcctttctccttctcaacacctcagctgactccaagcacaccatcctgagtccgtggatgaggagcagcagtgagcactgcacactggccgtctcggtgcacaggcacctgcagccctctggaaggtacattgcccagctgctgccccacaacgaggctgcaagagagatcctcctgatgcccactccagggaagcatggttggacagtgctccagggaagaatcgggcgtccagacaacccatttcgagtggccctggaatacatctccagtggaaaccgcagcttgtctgcagtggacttctttgccctgaagaactgcagtgaaggaacatccccaggctccaagatggccctgcagagctccttcacttgttggaatgggacagtcctccagcttgggcaggcctgtgacttccaccaggactgtgcccagggagaagatgagagccagatgtgccggaaactgcctgtgggtttttactgcaactttgaagatggcttctgtggctggacccaaggcacactgtcaccccacactcctcagtggcaggtcaggaccctaaaggatgcccggttccaggaccaccaagaccatgctctattgctcagtaccactgatgtccccgcttctgaaagtgctacagtgaccagtgctacgtttcctgcaccgatcaagagctctccatgtgagctccgaatgtcctggctcattcgtggagtcttgaggggaaacgtgtccttggtgctagtggagaacaaaaccgggaaggagcaaggcaggatggtctggcatgtcgccgcctatgaaggcttgagcctgtggcagtggatggtgttgcctctcctcgatgtgtctgacaggttctggctgcagatggtcgcatggtggggacaaggatccagagccatcgtggcttttgacaatatctccatcagcctggactgctacctcaccattagcggagaggacaagatcctgcagaatacagcacccaaatcaagaaacctgtttgagagaaacccaaacaaggagctgaaacccggggaaaattcaccaagacagacccccatctttgaccctacagttcattggctgttcaccacatgtggggccagcgggccccatggccccacccaggcacagtgcaacaacgcctaccagaactccaacctgagcgtggaggtggggagcgagggccccctgaaaggcatccagatctggaaggtgccagccaccgacacctacagcatctcgggctacggagctgctggcgggaaaggcgggaagaacaccatgatgcggtcccacggcgtgtctgtgctgggcatcttcaacctggagaaggatgacatgctgtacatcctggttgggcagcagggagaggacgcctgccccagtacaaaccagttaatccagaaagtctgcattggagagaacaatgtgatagaagaagaaatccgtgtgaacagaagcgtgcatgagtgggcaggaggcggaggaggagggggtggagccacctacgtatttaagatgaaggatggagtgccggtgcccctgatcattgcagccggaggtggtggcagggcctacggggccaagacagacacgttccacccagagagactggagaataactcctcggttctagggctaaacggcaattccggagccgcaggtggtggaggtggctggaatgataacacttccttgctctgggccggaaaatctttgcaggagggtgccaccggaggacattcctgcccccaggccatgaagaagtgggggtgggagacaagagggggtttcggagggggtggaggggggtgctcctcaggtggaggaggcggaggatatataggcggcaatgcagcctcaaacaatgaccccgaaatggatggggaagatggggtttccttcatcagtccactgggcatcctgtacaccccagctttaaaagtgatggaaggccacggggaagtgaatattaagcattatctaaactgcagtcactgtgaggtagacgaatgtcacatggaccctgaaagccacaaggtcatctgcttctgtgaccacgggacggtgctggctgaggatggcgtctcctgcattgtgtcacccaccccggagccacacctgccactctcgctgatcctctctgtggtgacctctgccctcgtggccgccctggtcctggctttctccggcatcatgattgtgtaccgccggaagcaccaggagctgcaagccatgcagatggagctgcagagccctgagtacaagctgagcaagctccgcacctcgaccatcatgaccgactacaaccccaactactgctttgctggcaagacctcctccatcagtgacctgaaggaggtgccgcggaaaaacatcaccctcattcggggtctgggccatggcgcctttggggaggtgtatgaaggccaggtgtccggaatgcacaacgacccaagccccctgcaagtggctgtgaagacgctgcctgaagtgtgctctgaacaggacgaactggatttcctcatggaagccctgatcatcagcaaattcaaccaccagaacattgttcgctgcattggggtgagcctgcaatccctgccccggttcatcctgctggagctcatggcggggggagacctcaagtccttcctccgagagacccgccctcgcccgagccagccctcctccctggccatgctggaccttctgcacgtggctcgggacattgcctgtggctgtcagtatttggaggaaaaccacttcatccaccgagacattgctgccagaaactgcctcttgacctgtccaggccctggaagagtggccaagattggagacttcgggatggcccgagacatctacagggcgagctactatagaaagggaggctgtgccatgctgcctgtttagtggatgcccccagaggccttcatggaaggaatattcacttctaaaacagacacatggtcctttggagtgctgctatgggaaatcttttctcttggatatatgccataccccagcaaaagcaaccaggaagttctggagtttgtcaccagtggaggccggatggacccacccaagaactgccctgggcctgtataccggataatgactcagtgctggcaacatcagcctgaagacaggcccaactttgccatcattttggagaggattgaatactgcacccaggacccggatgtaatcaacaccgctttgccgatagaatatggtccacttgtggaagaggaagagaaagtgcctgtgaggcccaaggaccctgagggggttcctcctctcctggtctctcaacaggcaaaacgggaggaggagcgcagcccagctgccccaccacctctgcctaccacctcctctggcaaggctgcaaagaaacccacagctgcagaggtctctgttcgagtccctagagggccggccgtggaagggggacacgtgaatatggcattctctcagtccaaccctccttcggagttgcacagggtccacggatccagaaataagcccaccagcttgtggaacccaacgtacggctcctggtttacagagaaacccaccaaaaagaataatcctatagcaaagaaggagccacacgagaggggtaacctggggctggagggaagctgtactgtcccacctaacgttgcaactgggagacttccgggggcctcactgctcctagagccctcttcgctgactgccaatatgaaggaggtacctctgttcaggctacgtcacttcccttgtgggaatgtcaattacggctaccagcaacagggcttgcccttagaagccgctactgcccctggagctggtcattacgaggataccattctgaaaagcaagaatagcatgaaccagcctgggccctgagctcggtcgcacactcacttctcttccttgggatccctaagaccgtggaggagagagaggcaatcaatggctcctttcacaaaccagagaccaaatgtcacgttttgttttgtgccaacctattttgaagtaccaccaaaaaagctgtattttgaaaatgctttagaaaggttttgagcatgggttcatcctattctttcgaaagaagaaaatatcataaaaatgagtgataaatacaaggccagatgtggttgcataaggtttttatgcatgtttgttgtatacttccttatgcttcttttaaattgtgtgtgctctgcttcaatgtagtcagaattagctgcttctatgtttcatagttggggtcatagatgtttccttgccttgttgatgtggacatgagccatttgaggggagagggaacggaaataaaggagttatttgtaatgactaaaa

SEQ ID NO: 45639 - DNA, 668 bp, Homo sapiens
ctgagttctaaagttcctgttgcttcagacaatggatgagcaatcacaaggaatgcaagggccacctgttcctcagttccaaccacagaaggccttacgaccggatatgggctataatacattagccaactttcgaatagaaaagaaaattggtcgcggacaatttagtgaagtttatagagcagcctgtctcattggatggagtaccagtagctttaaaaaaagtgcagatatttgatttaatggatgccaaagcacgtgctgattgcatcaaagaaatagatcttcttaagcaactcaaccatccaaatgtaataaaatattatgcatcattcattgaagataatgaactaaacatagttttggaactagcagatgctggcgacctatccagaatgatcaagcattttaagaagcaaaagaggctaattcctgaaagaactgtttggaagtattttgttcagctttgcagtgcattggaacacatgcattctcgaagagtcatgcatagagatataaaaccagctaatgtgttcattacagccactggggtggtaaaacttggagatcttgggcttggccggtttttcagctcaaaaaccacagctgcacattctttagttggtacgccttattacatgtctccagagagaatacatgaaaatggg

SEQ ID NO: 45640 - DNA, 542 bp, Homo sapiens
cgccgagctcgctgtggcccggatgttcggtgcagctgccagatccgctgatctagcgcttctcgaaaaaaaccttcaggcggcccatggctgtcgatattcaaccagcatgccttggactttattgtgggaagaccctattatttaaaaatggctcaactgaaatatatggagaatgtggggtatgcccaagaggacagagaacgaatgcacagaaatattgtcagccttgcacagaatctcctgaactttatgattggctctatcttggatttatgggcaatgcttcctctggttttacattggttcttcattgaatggtactcggggaaaaagagttccagcgcacttttccaacacatcactgcattatttgaatgcaggcatgggcagctattatcaccttacttgtgagtgatccagttggtgttctttatattcgttcatgtcgagtattgatggctttctgactggtacacgatgctttacaacccaagtccagattacgttaccacagtacactgtactcatgaagccgtcta

SEQ ID NO: 45641 - DNA, 460 bp, Homo sapiens
gtggtctgatcttcctgcggctgaacccgcccggctgagccgacattgccggcgtcttggcgattcggcccgacgagctccgctttcgctacagcatggtggcctactggagacaggctggactcagctacatccgatactcccagatctgtgcaaaagcagtgagagatgcactgaagacagaattcaaagcaaatgctgagaagacttctggcagcaacgtaaaaattgtgaaagtaaagaaggaataatctaccctgactaaagcttgaaatgctacatttccaaggtgaagatgtgtgggcacatgttatggcagattgaaaaggatctcattccatgggaaaaaaaaaaaatcctgtcttgttcataaattgacaatgtcaataaattgaaatatggttcactgttaaaaaaaaaaaagtcgacgcggccgcgaattccagatctatgaatcgta

SEQ ID NO: 45642 - DNA, 968 bp, Homo sapiens
gtggctaaagtctaacgctcctctcttggtcagataacaaaagccctccctgttggatcttttgaaataaaacgtgcaagttatccaggctcgtagcctgcatgctgccaccttgaatcccagggagtatctgcacctggaatagctctccacccctctctgcctccttactttctgtgcaagatgacttcctgggttaacttccttctttccatccacccacccactggaatctctttccaaacatttttccattttcccacagatgggctttgattagctgtcctctctccatgcctgcaaagctccagatttttggggaaagctgtacccaactggactgcccagtgaactgggatcattgagtacagtcgagcacacgtgtgtgcatgggtcaaaggggtgtgttccttctcatcctagatgccttctctgtgccttccacagcctcctgcctgattacaccactgcccccgccccaccctcagccatcccaattcttcctggccagtgcgctccagccttatctaggaaaggaggagtgggtgtagccgtgcagcaagattggggcctcccccatcccagcttctccaccatcccagcaagtcaggatatcagacagtcctcccctgaccctcccccttgtagatatcaattcccaaacagagccaaatactctatatctatagtcacagccctgtacagcatttttcataagttatatagtaaatggtctgcatgatttgtgcttctagtgctctcatttggaaatgaggcaggcttcttctatgaaatgtaaagaaagaaaccactttgtatattttgtaataccacctctgtggccatgcctgccccgcccactctgtatatatgtaagttaaacccgggcaggggctgtggccgtctttgtactctggtgatttttaaaaattgaatctttgtacttgcattgattgtataataatttt

SEQ ID NO: 45643 - DNA, 639 bp, Homo sapiens
  misc_feature (1)...(639): n = a,t,c or g
ttttttttttaaaaggcaaacaactttaatggttattttgctaaagataaaactctgggtggtaaaggaattaaaggcagagtctcaaagagatatttgcacccccgtgtctgtattagcactactcccaatagtcaagaggaagcaagccaagtgttcactgatggaggaacagagtgtggtacgcacatgtaacggaacattccattatatgtataatacnnnnnnnnnnnnnnnnnnnnnnnnnnnnnnnnnnnnnnnnnnnnnnnnnnnnnnnnnnnnnnnnnnnnnnnnnnnnnnnnnnnnnngtcactggtacgattccacttatatgagatactngagaatagtcnaaacccaggggagacngaaagcccgaatggtggctgcgggggctgggaggagtgggaattactgtttaatgggtacagtttccattttacaagctgagaagcctatggagatggacggcggtgacggccacacagcattatgaatgtattaacagttaacgttactgaactgtgcacttaaaaatggtgaagacagtatgttttatgagtattttacgacaatttaaaaattaaaagaaaaaaaaccagaacacactaagggttataggcacaaattctccttatg

SEQ ID NO: 45644 - DNA, 555 bp, Homo sapiens
ttttttttttgagggtacatcgggggagaggagaggagaggagagcctctctgtgccttggtttcccatttgtgcattcagggcctctgcaggcctcacacagggagtctgaggggatagtgtttaagtgagcactcaggcttcctctgaggaaaagaaatgaccaaagtgcagacttttattactgccattcctgctcctaatgggagcaggagtcaaaaggaaaaacaaattaaaaggggctaatgagaaaggaggagagatgagacagagagtgtgaagggctatgccgctggcatctcataaattcttattgagaatggcacaggtattaaaaaagtttctgggtagtctacgagaaatgtcaattattatctctactacaactacttacatatatctaatgggaaaagagtggggcttaggtgtcagagtggatgggagacaaaggagaagctacactaataaatacaacaagtggaaggtacctgtcccattcctaaaaggatttgtgggcaatgctggcacttggtggccaggagaatcttctgaccc

SEQ ID NO: 45645 - DNA, 1215 bp, Homo sapiens
ttgaactcccagccaacctcaaagtgctgggattacagctgtgagcaccagcccaaccttgcctctttaaaaagaaaaaacacaagtccactctgaagtcagcctctgtaacctccccacaagaaaaccgttttacatcagtcactaaccaaacaaccaacagtgcttcaacacagaaagtaaagcattatccagggcttggactgtctttcaagaaagccccaaatcccctggcaggaggaagtcacagcagtgaagccccatcccaggcccagttgttcccacgaaacacaccacgtggagacccagcatgactgccgactgattccaagtccccaggagggctttattttttcttttcaacatcctgttctgcggcttccttggctctttttgcccgtatgccgaagagccgggcgttggcacgggccatacggagactagcgaaggctttgaaattcttctcttcctcagtgatgactcgagctttctccttcttatagacgttccggacgggcatgaccggtccggtcaagctgggtggccagtttcagttcttcagcagaactgtctcccttcttgggggccgagggcttcctggggaagaggatgagtttggagcggtactccttcagccgctgcacgttggccttgcagggactccgtggacttgttccgcctcctcggatccacagaaatgccgatggtccgggccaccttcttgtgaatgccggccaccctgagctcctccaaggctgaagccgcggccggcgcgcaccttcgtgtggtaccgaaccgtggggcagcgcacgatgggccggatgggacccgacgcggggcgcgggccgatgccgcggcggcccttggcttgccgggccttacgtctgcggatcttacgggccggctggttgaaccacgtggccacgcgccgctgccagtccttgtggaagtggggcttcaagaccatgccattccggctgggcgccatggcctgcctacggccctgcggctgcggacgagaggggagcgagtgagaggccggaccccgggcgcgcgcactccctcccgcctccgccccgaaccctccagacttggcgtccggccgcgcctagagcccgggcagcggccgaacgctgtctgcgaagaagaaggggcccatccactcccgcgttggtgaacgccagccgatggcgctggatgatgccaaaggccagg

SEQ ID NO: 45646 - DNA, 1702 bp, Homo sapiens
tttttttttttttttttttatacaaaaggatttattaaaaaaccagtaagacactactacatcatgacactgtcacactgggcttttaacacaagacttgctctacaatactgggggaaagggcataaaacacaaattgattctgaagcatagcaattaagaaataaaacaatgaaagcaaatttcttttaatgagaactcagaattaaacttcagagggacccaacgtcatacttccattcagggacttgatacaaaaaatttagtttgaactgctattagcaggtggcaggagccaccttcaaatgaatcttcaaattggaaaatactgcttcaccacctgttggggataagttgcaaatggaataatttagtatggtttgtagctattttgatgaccacctcgcctggataccttcccataaccactctgctggttgctataatcaccatatccatagtagttgttgtaaccagtgtagtcatatcctccataaccaccgtaaccttggctgttatatccatagttgccatagccttgattccaatagttactatatccctggttccagttttgactggggccaccacctcttccacgagctcttcctgcaaatcctcctctagatccccactgttgctgttgctgatattgttccttcgacatggctacttttatttcacatttactaagaccaacattgtggtatttcttttccattatcttcttcactggttcttcttccttaaaggtaataaagcagaacccacgcctcttattggtcttgttgtccatggggagctctatggattccacctcaccaaaaccaccaaagtactcccttattttctcttcaggtgtatctggagaaaggccaccaacaaaaatttttttaaccggctcttttgttttcatggctttggcccttttaggatcaatcaccttcccattcaatttatgttctttttgatccatgaccttatctacactctccgattctttaaatagcacaaagccaaaaccccttgatcgccctgtgataggatctaacttcagagtgcagtctacaacttcaccaaatttggaaaagtagtccttcagatctttctttgtagtgtcccagctaaggcctcctataaacattttccattcttcccgctgtgccgtcgctgcttcagagtgtcgtggggaggagtttgaatggccttcatcctcctcgttcttactggcgtcaatcttcgccccctccgactcggcgctgcccccttcggtgcctccagacgcggttccgcccccggtcccggctccgcttcccgccgccgccgctgccccctgtgtcgccgccaccatggctccctcctgctcgcccgccgagccgcctaccgccgccgttgccgctgccgccgccccgtccccgccgaactgctcctccgacatagtgctagtgtctccgccgctgccgccgagactacacccgcctgccgcgaaccgaaactagcagcaaagtaatccccgcgctgccgcgcgcccgctctacctcgcgaagcacacaagacagggaaggcgcgcgcgtggctgcaaaggctcctgcgcctctccctggcctgcccccttcgcctcccactctcgcgcggcgcacactcccgctctctcccgctgcactaaaaaagaataagcaccagcggcggccgctctcgcctc

SEQ ID NO: 45647 - DNA, 1578 bp, Homo sapiens
cggcgccattaaagcgaggaggaggcgagagcggccgccgctggtgcttattcttttttagtgcagcgggagagagcgggagtgtgcgccgcgcgagagtgggaggcgaagggggcaggccagggagaggcgcaggagcctttgcagccacgcgcgcgccttccctgtcttgtgtgcttcgcgaggtagagcgggcgcgcggcagcgcggggcgttactttgctgctagtttcggttcgcggcagggcgggtgtagtctcggcggcagcggcggagacactagcactatgtcggaggagcagttcggcggggacggggcggcggcagcggcaagcggcggcggtaggcggctcggcgggcgagcaggagggagccatggtggcggcgacacagggggcagcggcggcggcgggaagcggagccgggaccgggggcggaaccgcgtctggaggcaccgaagggggcagcgccgagctcggagggggcgaagattgacgccagtaagaacgaggaggatgaaggccattcaaactcctccccacgacactctgaagcagcgacggcacagcgggaagaatggaaaatgtttataggaggccttagctgggacactacaaagaaagatctgaaggactacttttccaaatttggtgaagttgtagactgcactctgaagttagatcctatcacagggcgatcaaggggttttggctttgtgctatttaaagaatcggagagtgtagataaggtcatggatcaaaaagaacataaattgaatgggaaggtgattgatcctaaaagggccaaagccatgaaaacaaaagagccggttaaaaaaatttttgttggtggcctttctccagatacacctgaagagaaaataagggagtactttggtggttttggtgaggtggaatccatagagctccccatggacaacaagaccaataagaggcgtgggttctgctttattacctttaaggaagaagaaccagtgaagaagataatggaaaagaaataccacaatgttggtcttagtaaatgtgaaataaaagtagccatgtcgaaggaacaatatcagcaacagcaacagtggggatctagaggaggatttgcaggaagagctcgtggaagaggtggtgaccagcagagtggttatgggaaggtatccaggcgaggtggtcatcaaaatagctacaaaccatactaaattattccatttgcaacttatccccaacaggtggtgaagcagtattttccaatttgaagattcatttgaaggtggctcctgccacctgctaatagcagttcaaactaaattttttgtatcaagtccctgaatggaagtatgacgttgggtccctctgaagtttaattctgagttctcattaaaagaaatttgctttcattgttttatttcttaattgctatgcttcagaatcaatttgtgttttatgccctttcccccagtattgtagagcaagtcttgtgttaaaagcccagtgtgacagtgtcatgatgtagtagtgtcttactggttttttaataaatccttttgtataaaaaaacaaaaaaaat

SEQ ID NO: 45648 - DNA, 2975 bp, Homo sapiens
gcgaccgcgcgcggcggagctgagccccgctcctcccttcgctcgctcccagctccgcccggcagggcgacgccgggcccagcgccacgtcaccgcccagcagccctcccgattggcgggcggggcggctataaagggagggcgcaggcggccggaggtctcttccgccgccattttaaatccagctccatacaacgctccgccgccgctgctgccgcgacccggactgcgcgccagcacccccctgccgacagctccgtcactatggaggatatgaacgagtacagcaatatagaggaattcgcagagggatccaagatcaacgcgagcaagaatcagcaggatgacggtaaaatgtttattggaggcttgagctgggatacaagcaaaaaagatctgacagagtacttgtctcgatttggggaagttgtagactgcacaattaaaacagatccagtcactgggagatcaagaggatttggatttgtgcttttcaaagatgctgctagtgttgataaggttttggaactgaaagaacacaaactggatggcaaattgatagatcccaaaagggccaaagctttaaaagggaaagaacctcccaaaaaggtttttgtgggtggattgagcccggatacttctgaagaacaaattaaagaatattttggagcctttggagagattgaaaatattgaacttcccatggatacaaaaacaaatgaaagaagaggattttgttttatcacatatactgatgaagagccagtaaaaaaattgttagaaagcagataccatcaaattggttctgggaagtgtgaaatcaaaggttgcacaacccaaagaggtatataggcagcaacagcaacaacaaaaaggtggaagaggtgctgcagctggtggacgaggtggtacgaggggtcgtggccgaggtcagggccaaaactggaaccaaggatttaataactattatgatcaaggatatggaaattacaatagtgcctatggtggtgatcaaaactatagtggctatggcggatatgattatactgggtataactatgggaactatggatatggacagggatatgcagactacagtggccaacagagcacttatggcaaggcatctcgagggggtggcaatcaccaaaacaattaccagccatactaaaggagaacattggagaaaacaggaggagatgttaaagtaacccatcttgcaggacgacattgaagattggtcttctgttgatctaagatgattattttgtaaaagactttctagtgtacaagacaccattgtgtccaactgtatatagctgccaattagttttctttgtttttactttgtcctttgctatctgtgttatgactcaatgtggatttgtttatacacattttatttgtatcatttcatgttaaacctcaaataaatgcttccttatgtgattgcttttctgcgtcaggtactacatagctctgtaaaaaatgtaatttaaaataagcaataattaaggcacagttgattttgtagagtattggtccatacagagaaactgtggtcctttataaatagccagccagcgtcaccctcttctccaatttgtaggtgtattttatgctcttaaggcttcatcttctccctgtaactgagatttctaccacacctttgaacaatgttctttcccttctggttatctgaagactgtcctgaaaggaagacataagtgttgtgattagtagaagctttctagtagaccatatttcttctggattgtaataaaattgttagtagctccttttactttgttcctgtctctggaaagccatttttgaattgctgattactttggctttaatcagtggtcacctagaaaaagctttgtaatcataacacaatgagtaattcttgataaaagttcagatacaaaaggagcactgtaaaactggtaggagctatggtttaagagcattggaagtagttacaactcaaggattttggtagaaaggtatgagtttggtcgaaaaattaaaatagtggcaaaataagatttagttgtgttttctcagagccgccacaagattgaacaaaatgttttctgtttgggcatcctgaggaagttgtattagctgttaatgctctgtgagtttagaaaaagtcttgatagtaaatctagtttttgacacagtgcatgaactaagtagttaaatatttacatattcagaaaggaatagtggaaaaggtatcttggttatgacaaagtcattacaaatgtgactaagtcattacaaatgtgactgagtcattacagtggaccctctgggtgcattgaaaagaatccgttttatatccaggtttcagaggacctggaataataataagctttggattttgcattcagtgtagttggattttgggaccttggcctcagtgttatttactgggattggcatacgtgttcacaggcagagtagttgatctcacacaacgggtgatctcacaaaactggtaagtttcttatgctcatgagccctccctttttttttttaatttggtgcctgcaactttcttaacaatgattctacttcctgggctatcacattataatgctcttggcctcttttttgctgctgttttgctattcttaaacttaggccaagtaccaatgttggctgttagaagggattctgttcattcaacatgcaactttagggaatggaagtaagttcatttttaagttgtgttgtcagtaggtgcggtgtctagggtagtgaatcctgtaagttcaaatttatgattaggtgacgagttgacattgagattgtccttttccctgatcaaaaaatgaataaagcctttttaaacaaaatccaaacttttaatcaagtcttgatatgtattgactgagaaaaaatacactacatctagagatgattgagatgttttggcaaagatttgagggggagtgagaatt

SEQ ID NO: 45649 - DNA, 884 bp, Homo sapiens
ttttttttttgagagaacctgaacatttaatatggtcagcaccttgtaaggtgaaggtgtgttttttacacaaattataaataatgaaaaatatgcatttagaaaaagaagcagcagtccccttggcgggccggctcgaggactctttggttgagtggcaggtgaggccctgggtccagggtctgtcagagcccccctaggtcatctgccaggaaggccagcaggtagcggctgacatgtctgtcgatgatgacaggcgagaaaccgaggacgcgccgggtccctggcaggcccttggggtctggcggatagcagtacaggagcagggccagtcccacagcaaggcccaggccagccaggaagctcatgggtcccctgttactcagctcgccgctctggctgcccgagtctagctctgtgcaatctgagttctgcagagcgtggcggctgggcaggcggctgtgcaggggctgggcatggatatacagggctcggtagaactcctggcagtcccgcttcaacctccgctgcaggtggctcaggaggtcacagagccgcacacgcaaggatgccttggggttccggaactcctcagcaccttttccgcctccttgttggtaaggatctgtgggtagtaacggttcagctggaggatgatcctgtccacctgctgctcactcaagcgcccatggcctgtcaggaaaggcgtgtcctgcaccaggcggtcacaataggtctgatctgtcatggcgacggacacagcgccgcccgcagtccccagcggtctgccccgccgcgcgtccgcccctcggtcagccgcccggtccactagctccagcgaacgcccccgcgggccgtgctcgcccgccccttttggctaggcc

SEQ ID NO: 45650 - DNA, 5456 bp, Homo sapiens
ggtaaattccattttcaaagatacctgtaaagatttttaaaatcattcatgaatgcggtctgttcgttgcacagagtagatgctcaaaaatggtgaatgagaccctctattttggtctcatgctgaagaagtccataaagcccacaagtcattttcatgatggacagaaaaatgtgtgtgctttctctgtctactgcctcaactgcacagaccccgggactgtagcagaaccatcttttgagcttgacaccgggaggcccaaattctagcacgggacctagggccagttgctctctggtcctcagtctcctcacccataaaatgggaaggagagaaccctgaatcattgcttctagcttctgaactcagttgttcagaacaaggactcactgctgatttttcaacagcacagggaattgcactgttcctggaatgatggacagtaccctctgttccactgggcaagtgagatttcccaggcctctctgttcccttctccccttagagagcaacagacgtgtggccccaccacctccctcaaccctctctctcctccctcaggactgggcacctcgctgcccccgctgctgcccactctgcgactgtgcctgtacgtgccagctccccgactgccgagacctcaactgtctctgcttcgagatcaagctccataggacccaggcccctgcctctggggagcggccagcccccaggcccatgtgccctcctccctgaagagcctttccccacgccactggaaccacagatggcctgccgagcacccaggcctgggaactggaatggcagcgcagggcctggctcctgcagggcaggactcttggccggctggacggcagctcctctggagggccagaaaagagagggctagtgctcggcagtgccctgcttcccttcccctccacacgtcaacgattctatttgaagttgggcagggggtggcgctgctcaccacacacaagtgttataggaggagtctggccccgtagtaccgggtacgcaggggtgcctcaaccacactccgtccacggactctccgttattttaggaggtagatgtagtgccagtatctactctccttcttaaaaaaaaccagggctccagagaatcagaacagccaccatcaccgcagggagtcaagggaggagggagattagagaaggagccagggagggtggcagggaggccacgtgatccgagtcccctcacccctttccttcccacaggtccctggccaaagatttatttctcttgacaaccaagggcctccgtctggatttccaaggaagaatttcctctgaagcaccggtgagtgggcaggggctctttgtccccaatcaatcagggccgacccaagtcttcctcccccttccccatgccgggccccacgatagtgtgaatgtcaggggcttcaggtttccctaaatataggtccctgccagaggatccgtggcgggaaaagggcaggggtcattagagaagatcggggacacatgtggggctgggcaggagctgccttataaccacccgggaacccctagctcactcgctgctgaccaggctctgccggctccttgccctcgccgcaggtgggccccttgcaggaccggccgggtgggatgggttggaattgggccaacaggtccagatgggtccaggtaggaggggagatttggacgataggagcagggggctcagcatctgggaggcagatcagttcggggacggattttcttttggagaaggaagtcaggctcaaggaagacgtttggcaggaactgtgaccccgcatgccagaggccgagcagcggccgtgcatagccgcgcattctggttttctgtggcgcagaggactaccagcctggctgcggcggcccggcggagaccgccaccatgcgcgacccagcccgcctgccagcctggaactcggatggggaggtctgcctccgcgcgccgctagtttccgaccgccttctcgctcccctgctgtcctctcgatgccctttcctccgcctcccttgacgcctgggccagtgacaggtgtcgtccgcgccgattcagcccgcgggcgaggcagctaacgcacgactgcgcgatgtggcccctatggtgacacgctgcagccgcgaagaccggaagctggggccccgggccgcgcgcgctgggcctgggaggcgaaactcagcttccttcgtttccgacttttccatccgcgtcctccacttccccgttccgccctcccccattgccaacattctggctgagatcagcgcccagagcgcgccaggctgggggaaaggagcagaagggagggccctagcgacccgcgggatgtggtccgagtcacgtccgagggggtggggagggatcgtgttctcgcgcccgccccttcctagcgcggcctctggctcgcctctcgggggcggcccgtagcccagtccgtcgcctgccattggacgccgcccgctcctcgtaaaggaaaaagctcggcggagggcggagtggtgcctttaaaaggccggcgccgccttccgcctgcaccgcctcctgcgccgccccttccgaggctaaatcgcttcctctcggaacgcgccgcagaaggggtcctggtgacgagtcccgcgttctctccttgaatccactcgccagcccgccgccctctgccgccgcaccctgcacacccgcccctctcctgtgccaggtgagcgcccctcttgcggggacccagggaccgtggagagggtcttgggggcagtggcgggttggcgtccgcgtggaggcctcccccattcgcgcccatgccagcgtctccccactaccaggcacacacaggctccccggcccctccagcctgaggtcctctaactgcgcaatgcagctgcgcgcgctgagtcatggcggggaggaagccggacgagatgaaggaccattctcccccttttcttgcagggacccctgtggcaaaggattagggccccttaccgctggcgtggatcctaagaggcagtgaggggtgggggccggcccatgtacagccccagggttctcgcaagtgggagcttggtttctgtcctgggaaacgggcgcccttcgcgaggagggaaacccctcgcgtgcttgatgcccccttaacactttccctgtctctccttatcgggcgaccattgattctgagcccggaacagctgcagccatgcgaagcgacgggagcatttttcaggggaaggcgcttgctcctccacgttcttgccccgtaggaacagtgacgatggcaaagcttaccgctttcctgcctgggctagggctagttccgccgccctttcctgggcttctccttgctctcttatatttttcctaatgcccctttcctaccacccgccccctccttgtggggaaaagcctgaccttgggatgtccttgaagccttggagcccgggccagccctgggatcttgaggggattggaaggaacacccagtggcagtcagaagagctgggttctaacctcagatctggctccggggttgctgtgtggcttgaagcacagacctttcccatatctgggccctttcccacgagggtgttgggccctctgcttgattcacgatctttacattctaaaatactccggttcggttttgttttcaggcaaggtgaccccatggcaaggcgcaagccagaagggtccagcttcaacatgacccacctgtccatgctatggccttttcctttcccccagttgccagtgggcaactccaccctcagctgggcaacacccagcaccagacagagttaggaaaggtaccggggcaggcctagcaaagggaagttgggcgtaagagagagctggggaccagaagtgccccagggcctgctgggtgtggggcaggggaggtagggaacatttccctgacctccaggagaggggccctggtcatcgggagatgatgggaaaccctagctaactagtccttcccctctgtttcctgtatccaggaacttgctactaccagcaccatgccctaccaatatccagcactgaccccggagcagaagaaggaactgtctgacatcgctcaccgcatcgtggcacctggcaagggcatcctggctgcagatgagtccactggtcgcgggcaggagacagaatgggtggagggtgcagggttgggagtggcaggctgatcccctaattcccatgtgacactcccagggagcattgccaagccggcttgcagtccattgggcacccgaggaacaccgagggagaaccgggcgctttttaccgccagcttgctgctgacaagctgaccgaccgcgttgaaccccttgcattggggggtgtcatcctcttccaatgagacacttctaccagaagggcggatgatggggcgtcccttcccccaagtttattcaaattccaaggggcggtgttgtggggcatcaaggtagacaaagggcgtggtccccctggacaggggacaaattggcgagactaccaacccaagggttggatgggctgtctgagcgctgtgcccagtacaagaaggacggagctgacttccgccaagtggcgttgtgtgctgaagatttggggaacacaccccctcagccctcgccatgcatggaaaatgccaatgttctggcccgttatgccagtatctgccagcagaatgggcattgtgccccatccgtgggagcctgagatcctccctgatggggaccatgacttgaagcgctgccagtatgtgaccgagaaggtgctggctgctgtctacaaggctctgagtgaccaccacatctacctggaaggcaccttgctgaagcccaacatggtcaccccaggccatgcttgcactcagaagttttctcatgaggagattgccatggcgaccgtcacagcgctgcgccgcacagtgccccccgctgtcactgggatcaccttcctgtctggaggccagagtgaggaggaggcgtccatcaacctcaatgccattaacaagtgccccctgctgaagccctgggccctgaccttctcctacggccgagccctgcaggcctctgccctgaaggcctggggcgggaagaaggagaacctgaagctgcgcaggaggagtatgtcaaagcgagccctggccaacagccttgcctgtcaaggaaagtacactccgagcggtcaggctggggctgctgccagcgagtccctcttcgtctctaaccacgcctattaagcggaggtgttcccaggctgcccccaacactccaggccctgccccctcccactcttgaagaggaggccgcctcctcggggctccaggctggcttgcccgcgctctttcttccctcgtgacagtggtgtgtggtgtcgtctgtgaatgctaagtccatcaccctttccggcacactgccaaataaacagctatttaagggggagtcggc

SEQ ID NO: 45651 - DNA, 4068 bp, Homo sapiens
gcggccgcgggagccggggccgccgcgccggcttctcagcaccccgcaaccggcaccggcgctgtccagaccgaggccatgaagcagattctcggggtgatcgacaagaaacttcggaacctggagaagaaaaagggtaagcttgatgattaccaggaacgaatgaacaaaggggaaaggcttaatcaagatcagctggatgccgtttctaagtaccaggaagtcacaaataatttggagtttgcaaaagaattacagaggagtttcatggcactaagtcaagatattcagaaaacaataaagaagacagcacgtcgggagcagcttatgagagaagaagctgaacagaaacgtttaaaaactgtacttgagctacagtatgttttggacaaattgggagatgatgaagtgcggactgacctgaaacaaggtttgaatggagtgccaatattgtccgaagaggagttgtcattgttggatgaattctataagctagtagaccctgaacgggacatgagcttgaggttgaatgaacagtatgaacatgcctccattcacctgtgggacctgctggaagggaaggaaaaacctgtatgtggaaccacctataaagttctaaaggaaattgttgagcgtgtttttcagtcaaactactttgacagcacccacaaccaccagaatgggctgtgtgaggaagaagaggcagcctcagcacctgcagttgaagaccaggtacctgaagctgaacctgagccagcagaagagtacactgagcaaagtgaagttgaatcaacagagtatgtaaatagacagttcatggcagaaacacagttcaccagtggtgaaaaggagcaggtagatgagtggacagttgaaacggttgaggtggtaaattcactccagcagcaacctcaggctgcatccccttcagtaccagagccccactctttgactccagtggctcaggcagatccccttgtgagaagacagcgagtacaagaccttatggcacaaatgcagggtccctataatttcatacaggattcaatgctggattgtgaaaatcagacacttgatcctgccattgtatctgcacagcctatgaatccaacacaaaacatggacatgccccagctggtttgccctccagttcattctgaatctagacttgctcagcctaatcaagttcctgtacaaccagaagcgacacaggttcctttggtatcatccacaagtgaggggtacacagcatctcaacccttgtaccagccttctcatgctacagagcaacgaccacagaaggaaccaattgatcagattcaggcaacaatctctttaaatacagaccagactacagcatcatcatcccttcctgctgcgtctcagcctcaagtatttcaggctgggacaagcaaacctttacatagcagtggaatcaatgtaaatgcagctccattccaatccatgcaaacggtgttcaatatgaatgccccagttcctcctgttaatgaaccagaaactttaaaacagcaaaatcagtaccaggccagttataaccagagcttttctagtcagcctcaccaagtagaacaaacagagcttcagcaagaacagcttcaaacagtggttggcacttaccatggttccccagaccagtcccatcaagtgactggtaaccaccagcagcctcctcagcagaacactggatttccacgtagcaatcagccctattacaatagtcgtggtgtgtctcgtggaggctcccgtggtgctagaggcttgatgaatggataccgggggccctgccaatggattcagaggaggatatgatggttaccgcccttcattctctaacactccaaacagtggttatacacagtctcagttcagtgctccccgggattactctggctatcaacgggatggatatcagcagaatttcaagcgaggctctgggcagagtggaccacggggagccccacgaggtcgtggagggcccccaagacccaacagagggatgccgcaaatgaacactcagcaagtgaattaatctgattcacaggattatgtttaatcgccaaaaacacactggccagtgtaccataatatgttaccagaagagttattatctatttgttctccctttcaggaaacttattgtaaagggactgttttcatcccataaagacaggactacaattgtcagctttctattacctggatatggaaggaaactatttttactctgcatgttctgtcctaagcgtcatcttgagccttgcacatgatactcagattcctcacccttgcttaggagtaaaacaatatactttacagggtgataataatctccatagttatttgaagtggcttgaaaaaggcaagattgacttttatgacattggataaaatctacaaatcagccctcgagttattcaatgataactgacaaactaaattatttccctagaaaggaagatgaaaggagtggagtgtggtttggcagaacaactgcatttcacagcttttccagttaaattggagcactgaacgttcagatgcataccaaattatgcatgggtcctaatcacacatataaggctggctaccagctttgacacagcactgttcatctggccaaacaactgtggttaaaaacacatgtaaaatgctttttaacagctgatactgtataagacaaagccaagatgcaaaattaggctttgattggcactttttgaaaaatatgcaacaaatatgggatgtaatccggatggccgcttctgtacttaatgtgaaatatttagatacctttttgaacacttaacagtttctttgagacaatgacttttgtaaggattggtactatctatctatcattccttatgacatgtacattgtctgtcactaatccttggattttgctgtattgtcacctaaattggtacaggtactgatgaaaatctctagtggataatcataacactctcggtcacatgtttttccttcagcttgaaagcttttttttaaaaggaaaagataccaaatgcctgctgctaccacccttttcaattgctatcttttgaaaggcaccagtatgtgttttagattgatttccctgtttcagggaaatcacggacagtagtttcagttctgatggtataagcaaaacaaataaaacgtttataaaagttgtatcttgaaacactggtgttcaacagctaggcagcttatgtgattcaccccatgccacgttagtgtccacaaattttatggtttatctccagcaacatttctctagtacttgcacttattatcttttgtctaatttaaccttaactgaattctccgtttctcctgggaggcatttatattcagtgataattccttcccttagatgcatagggagagtctctaaatttgatggaaatggacacttgagtagtgacttagccttatgtactctgttggaatttgtgctagcagtttgagcactagttctgtgtgcctatgaagttaatgctgcttattgtctcattctgacttcatggagaattaatcccacctttaagcaaaggctactaagttaatggtattttctgtgcagaaattaaattttattttcagcatttagcccaggaattcttccagtaggtgctcagctatttaaaaacaaaactattctcaaacattcatcattagacaactggagtttttgctggttttgtaacctaccaaaatggataggctgttgaacattccacattcaaaagttttgtagggtggtgggaaatgggggatcttcaatgtttattttaaaataaaataaaataagttcttgacttttctcatgtgtggttgtggtacatcatattggaagggttaacctgttactttggcaaatgagtatttttttgctagcacctccccttgcgtgctttaaatgacatcctgcctgggatgtaccacaaccataatgttacctgtatcttaaggggaatggataaaatatttgtggtttactgggtaatccctagatgatgtatgcttgcagtcctatataaaact

SEQ ID NO: 45652 - DNA, 1935 bp, Homo sapiens
gtgtgcgcctaatctcaggtggtccacccgagaccccttgagcaccaaccctagtcccccgcgcggccccttattcgctccgacaaggtacaaaaaggctctggacggcggcgtggtaggaggacgggagcgggggcgggaagttccctgaaggagcgagacagggagggacagggcagaggaggagaggaaggcgatgcgacggacaggcgcacccgctcaggctgactctcgggggcgaggtcgagccaggggcggctgccctgggggcgaggcgacgctgtctcaacctccacctcgcggcggaacccgaggacaggagcctcagatgaaagaaacaatcatgaaccaggaaaaactcgccaaactggcaggcacaagtgccgcattggtgggaaaggaactgctcgcagaaagaagaaggtggttcatagaacagccacagcagatgacaaaaaacttcagttctccttaaagaagttaggggtaaacaatatctctggtattgaagaggtgaatatgtttacaaaccaaggaacagtgatccactttaacaacccctaaagttcagggcatctctggcagcgaacacttttcaccattacaggccatgctgagacaaagcagctgacagaaatgctacccagcatcttaaacccagcttggtgcggatagtctgactagttttaaggagactggccgaagctctgccccaaacaatctgtggatggaaaagcaccacttgctactggagagggatgatgatgatgaagttccagatcttgtgggagaattttgatgaggcttccaagaatgaggcaaactgaattgagtcaacttctgaagataaaacctgaagaagttactgggagctgggagctgctattttatattatgactgctttttaagaaatttttgtttatggatctgataaaatctagatctctaatatttttaagcccaagcccccttggacactgcagctcttttcagtttttgcttatacacaattcattctttgcagctaattaagccgaagaagcctgggaatcaagtttgaaacaaagattaataaagttctttgcctagtatacagttttatttttttatttcattgacaccgatctgtacacagtaaaaaaaattgcttatagaaagctaatcatggcatgtaatatggctgataacctttggaatttgattaaagatttaaaatcacggtgtaagtgtaacaaaggtggtataaagttctcaggtttgaaaactttgtctccaacagtccttagtgcttccatgatttatatggtgggtgtaaatatgagaatagagtattccttagtggataaacagacatttctccctgatattctctattgtaagcatatgttaagtgccttttatgaattaccctcggtgttatcttcctttattcctcaatttgtgaagaactaatagctccattttgtagatgtaacctgaggtttagaacttctaaaaagtaaaagtaatctccagatcccttctttgtaggatattttataaggtgacttggaaaaggtagtgtttagaataggagtggctcctgggtcattgtcttttccttaagtgtaacacctaataaatgaatagggttatgtttttatttaataaaaaatatacagtaaaattgagcatatacagttaaaagaatttataatgtctgccactataaccaggcttaccagacagtttcatggtccagaaaatccctaaacatagggttacttttaaacattttacaaattacaatgaaacaattgtgtaatctgaaccaaggccatttgaggagaaatagttctacttgtatggtatttatttttaaatttttcatagcaatttgcaagtaccttttgaaagtattatcagttgtatctaaaatgcactattaaccgtgg

SEQ ID NO: 45653 - DNA, 668 bp, Homo sapiens
gactgctgtgccggacgccaggtgtagccatgcagcgagccgattccgagcagccctccaagcgtccccgttgcgatgacagcccgagaaccccctcaaacaccccttccgcagaggcagactggtccccgggcctggaactccatcccgactacaagacatggggtccggagcaggtgtgctccttcctcaggcgcggtggctttgaagagccggtgctgctgaagaacatccgagaaaatgaaatcacaggcgcattactgccttgtcttgatgagtctcgttttgaaaatcttggagtaagttccttgggggagaggaagaagctgcttagttatatccagcgattggttcaaatccacgttgatacaatgaaggtaattaatgatcctatccatggccacattgagctccaccctctcctcgtccgaatcactgatacacctcaatttcaacgtcttcgatacatcaaacagctgggacgtggttactacgtttttccaggagcttgccacaatcgatttgaggatagtctaggggtgtggtatctagcaggacgtctagttcacgcactgggtgaaaaacaaccagagctgcagataagtgaacgagatgttctctgtgttcagatcgctggactttgtcatgatctcggtcatgggccattt

SEQ ID NO: 45654 - DNA, 1496 bp, Homo sapiens
  misc_feature (1)...(1496): n = a,t,c or g
tttttttttgccattaccatcaaacaccatgtattgaatacttttaaatgattgtatatctgaacattaaactactacttttcacccgctcctctctaataaagaagctagttgcttattaactggcatttgggatgtggctaccttagatttctcatgctttttgttccaccttctgccctattacttgccttcagagaagggaaaggccctcacttgattgtcgtaagaagtctgtatgggagagttattctgcattgtctaggcaagtcttggtttaaccatggcttggttcatagcctggagtgtccctgtgtctggactagctcgcttgtctgtggcaacttccagatgttcaagtttcttaaaaatctggccacgggaaaaacacaccacttcttttattaatgttgctgtttttctttttttaaaaaaatacccaacttaacataaaatgcatatttcagaaatctaaacctcgggtctgaggctgtttgtgttaagcagcccccttgggtgagcaattaggaccttcagtcccatagttgactggagcccatgtatggttgcatttctctccttgcaggtcactttcgtccttcccgagagcagcattagagagagagtcacagcctaaataaactacagcatgagaagtatatttcaagtcctctaagggccttgtccagtatgattggttggtgtcaaatgttgtccagctccaaatggtattaggaagacaggcatgtcccagatggctgtacatgtcattgctgtctcttggtggcagcaggaatacgtgaggcaaagcccagttgccctacttcaggatgtctgccaacttctcctcgtagtataggaagttctcctgaatgtcctcccagggctgaaaggccttggattcaccctcttcttgctccacaaaattctgccagacatattcgaagtcctggggcttcatgatgcgcagtttacagccagcctccttcagcttcttcagagcagcctggatctccggctcctcccacatgaagagtcgacccaccagaatgagcagacgcaggttcttggtcttgctaagggttttgataatgcggtcagcacacgctgcacaggggctggaggacacataccaggtgacattgtaccgcagggctgggtcgaaggctggcaggatggtgttgaagaaagcttcctctgcatgggcagccgcatgctcatcctctaggtatccccgagatgcctgcacttggccccccttgccctgtgcttcaaccacatagcagaggaaggtcattgntctcccggaactgtactccacattccggaactggaatttaaagaagttggcaggcagccgttctcctgtgacaatctcaaagggcggcagctcaatcagctctttcagcttctcagggtcgtccaggttctccagatcctcccattctgggaggcagcctcagtgccacagcagcctcttccttcntggcnatggc

SEQ ID NO: 45655 - DNA, 982 bp, Homo sapiens
ggtccgacattcgtagcagcagctgccccccaagcatcagtgtacccagcccagtgactgacgtggagccctgggcttcgcgtagagtcacctagacggggcgaaaacgggaaaaggggccttaactggggcacctggctcctttgagagctcggagtttctgactggcctgcgcaacaccccagaggcaaggtgaacgcgagggcctataatgcaagaaccaaggcgagtcacgccctgtctgggcaaaagaggagtaaagacccctcagctgcagcccggcagcgcattcctacccagggtccgccgccagagctttcccgcgcggtcggatagttacactactgtccgggacttcctagccgtgccgcggaccatctcaagtgcttccgccacactcatcatggcggtggcagtaagtcacttccgcccgggaccggaagtgtgggatactgcgagtatggcggcgtcaaaggtgaagcaggacatgcctccgccggggggctatgggcccatcgactacaaacggaacttgccgcgtcgaggactgtcgggctacagcatgctggccatagggattggaaccctgatctacgggcactggagcataatgaagtggaaccgtgacggcaggcgcctacaaatcgaggacttcgaggctcgcatcgcgctgttgccactgttacaggcagaaaccgaccggaggaccttgcagatgcttcgggagaacctggaggaggaggccatcatcatgaaggacgtgcccgactggaaggtgggggagtctgtgttccacacaacccgctgggtgccccccttgatcggggagctgtacggctgcgcaccacagaggaggctctccatgccagccacggcttcatgtggtacacgtaggccctgtgcctccggccacctggatccctgcccctccccactgggacggaataaatgctctgcagacctggaaaaaaaaaaaaaaaaa

SEQ ID NO: 45656 - DNA, 4308 bp, Homo sapiens
  misc_feature (1)...(4308): n = a,t,c or g
tggacgccgtgccgttactcgtagtcaggcggcggcgcaggcggcggcggcggcattagcgcacaacgcacattagcagcagcagcagcagcagcagcatcggaggtacccccgccgtcgcagcccccgcgctggtgcagccaccctcgctccctctgctcttcctcccttcgctcgcaccatggctgatcagctgaccgaagaacagattgctgaattcaaggaagccttctccctatttgataaagatggcgatggcaccatcacaacaaaggaacttggaactgtcatgaggtcactgggtcagaacccaacagaagctgaattgcaggatatgatcaatgaagtggatgctgatggtaatggcaccattgacttccccgaatttttgactatgatggctagaaaaatgaaagatacagatagtgaagaagaaatccgtgaggcattccgagtctttgacaaggatggcaatggttatatcagtgcagcagaactacgtcacgtcatgacaaacttaggagaaaaactaacagatgaagaagtagatgaaatgatcagagaagcagatattgatggagacggacaagtcaactatgaagaattcgtacagatgatgactgcaaaatgaagacctactttcaactcctttttcccccctctagaagaatcaaattgaatcttttacttacctcttgcaaaaaaaagaaaaaagaaaaaagttcatttattcattctgtttctatatagcaaaactgaatgtcaaaagtaccttctgtccacacacacaaaatctgcatgtattggttggtggtcctgtcccctaaagatcaagctacacatcagttttacaatataaatacttgtactaccttaatgataaggactccttaaagttccatttgctaatgattaatacactgtttgggctggccagtttttcatgcatgcagcttgacgattgagcacagtcaggcctttgtattaaaaatgaaaaatgaaaaaacaaattcaaaacctattcaaatgggttctagttcaatttgtttagtataaattgtcatagctggtttactgaaaacaaacacatttaaaattggtttacctcaggatgacgtgcagaaaaatgggtgaaggataaaccgttgagacgtggccccactggtaggatggtcctcttgtacttcgtgtgctccgacccatggtgacgatgacacaccctggtggcatgcccgtgtatgttggtttagcgttgtctgcattgttctagagtgaaacaggtgtcaggctgtcactgttcacacaaatttttaataagaaacatttaccaagggagcatctttgggactctctgtttttaaaaccttctgaaccatgacttggagccggcagagtaggctgtggctgtggacttcagcacaaccatcaacattgctgttcaaagaaattacagtttacgtccattccaagttgtaaatgctagtcttttttttttttttttccaataaaaagaccattaacttaaagtggtgttaaatgctttgtaaagctgagatctaaatggggacaaggcaggtggaggggaggccagtgtacatgtaaatgcccacagcccagcattgggtttccctcccaaggccccagcaccaacctctgagcccaagaccttgcctgaaaacaagcagataccgattgcttcatcctatttatggacatgtaggtctagttgcattttcactggggggaggggggaaggtgaattatggtaacttttaatgatctattcaggcagtagagctcttaaggaaaaaaaaaacccactttctctcaagcatgtatttaggggttgttctcaattgtgctgctgattacctgtcttatgtaactacttgagaccatctgcaagagacatgatttagtgtgtctgtaattcaatcttcgctgtgtgtggtagaagcagtagtcacttttgtaagccagtctcttcatgcctaaaagacactaccagtcacctttgattcgcgacttttaatttatgattatacttagcctcctcctcctttttttttttttcccaagttgacttgactttgcttttttccccccaagtagaactaatgctagcttccagcttgaaagtaaaactccagtgtggagtgaattttgtgtctaattataaacctgtaaccaaaactcagacatctggtactggtctttgcattgagattggtccctgtaaaaccccctttaaaagcatattgcatttagtacagagctcttttttgaaatgaaggctggagatgtgcatttttcacggtgttaactggttgtatcttattagcaaggagattggggttttgagtgtttgcgtgggtggtttcaatttgccagggaaccagtggcaggctgctagcaaggcagtgagaagctcttggcagccaaatgggtgcattcagggctgatttatagagacccttggcttctccttctcctactccctgtctttctggcattttgtagcttgttagattttctgccagaggggtgggtcagagcagtggaggggagacatcgcccatgtgcttctgctactggtccttgggctgggtggttggtagaggagatgttgacactatgagctaagggttggcttttgtaattacctgaatctgaaaggaatgcctaaggttaccttggggtttctcttctggtgagatagggttcctggtttgagtaagttaatgtcctggatatttcttgtggcagggggtggtcaaagagcctgattgctgacccagtctcaggcctgtggtcgatgacctctcggtagtttcaaagggggctggagggggatatttgacttgttttttcgaaatgtagccttctaaccctcaagtctttagaagctgggtggactcttagtggtcctgcagcgtatcctaaaagactacctttgaaacaggattcttgtatggccaggatcgtgtctgggaaccagaaaccctacaccctccccctccagggaatgctgagttccagttttgagcagaggtgaggcagaatccactgtagccttccgccctggtatttggggggatgaccagcccaggcgttgggtgttagtctgcatgagtttgtgagaggaaatagctgggtgtcctggcagtgcccttgaagttggttaggaccttcctgtaaactcttgcccctacttctaactactctataaatatatacatatatttatatataaagtgattagttgaactggcatcctgctttagcctgagacttgccataagaaactgctgagtacttggcaaaccctttcatagttttgttctccatctgtttggggtaggtgttgagccgaggcaaatggatctcgatatttcagatgggcttttgatgcactgttgccaaggaaggctttttctgattttttgacaaatgaatttttgcacactttcattggtgtctttcggcaacttacacacattgaaaatgagctattgtacatatttttatattctctttataaatgcatgtctgattgtacttgtaacaatattgtaatgaacggctgtgcagtaggcccagcgctgctgtgtctcgtcagaggaatagcttaccacgaacccctcagcatactgggaatctcttcctgaacaacgaatgtaaatttggtcaagtctactcttccgttcattcaattattttaagcatttgaattatttattgtatatcctaaatatatttctcctttggcagtgactagatttccactaatgtgtcttaatctatccctccagctggcagttactgtttttttaatcccctgaagttgtcctgtaggagacagaaattctttgctgtctgtatcccttggagtaagaaggtagtggcatgggtggagtgtgtgttctttctccaaatctattatgatgtttattaaacacttctgtagcaaagatggtggtagttcttttgttactgaagttgcccttcaccatggctatttgaaaaggagatgtacttggacgtttctgtaaatcttgagataaactgtttggagatttaaccacctctctgatgggcttttgatgcactgttgccaaggnaggctttttctgattttttgacaaatgaatttttgcacactttcattggtgtctttcggcaacttacacacattgaaaatgagctattgtacatatttttatattctctttataaatgcatgtctgattgtacttgtaacaatattgtaatgaacggctgtgcagtaggcccagcgctactgagtaa

SEQ ID NO: 45657 - DNA, 2585 bp, Homo sapiens
acagcagggccaacagtcacagcagccctgaccagagcattcctggagctcaagctcctctacaaagaggtggacagagaagacagcagagaccatgggacccccctcagcccctccctgcagattgcatgtcccctggaaggaggtcctgctcacagcctcacttctaaccttctggaacccacccaccactgccaagctcactattgaatccacgccattcaatgtcgcagaggggaaggaggttcttctactcgcccacaacctgccccagaatcgtattggttacagctggtacaaaggcgaaagagtggatggcaacagtctaattgtaggatatgtaataggaactcaacaagctaccccagggcccgcatacagtggtcgagagacaatataccccaatgcatccctgctgatccagaacgtcacccagaatgacacaggattctataccctacaagtcataaagtcagatcttgtgaatgaagaagcaaccggacagttccatgtatacccggagctgcccaagccctccatctccagcaacaactccaaccccgtggaggacaaggatgctgtggccttcacctgtgaacctgaggttcagaacacaacctacctgtggtgggtaaatggtcagagcctcccggtcagtcccaggctgcagctgtccaatggcaacatgaccctcactctactcagcgtcaaaaggaacgatgcaggatcctatgaatgtgaaatacagaacccagcgagtgccaaccgcagtgacccagtcaccctgaatgtcctctatggcccagatggccccaccatttccccctcaaaggccaattaccgtccaggggaaaatctgaacctctcctgccacgcagcctctaacccacctgcacagtactcttggtttatcaatgggacgttccagcaatccacacaagagctctttatccccaacatcactgtgaataatagcggatcctatatgtgccaagcccataactcagccactggcctcaataggaccacagtcacgatgatcacagtctctggaagtgctcctgtcctctcagctgtggccaccgtcggcatcacgattggagtgctggccagggtggctctgatatagcagccctggtgtattttcgatatttcaggaagactggcagattggaccagaccctgaattcttctagctcctccaatcccattttatcccatggaaccactaaaaacaaggtctgctctgctcctgaagccctatatgctggagatggacaactcaatgaaaatttaaagggaaaaccctcaggcctgaggtgtgtgccactcagagacttcacctaactagagacagtcaaactgcaaaccatggtgagaaattgacgacttcacactatggacagcttttcccaagatgtcaaaacaagactcctcatcatgataaggctcttacccccttttaatttgtccttgcttatgcctgcctctttcgcttggcaggatgatgctgtcattagtatttcacaagaagtagcttcagagggtaacttaacagagtatcagattctatcttgtcaatcccaacgttttacataaaataagagatcctttagtgcacccagtgactgacattagcagcatctttaacacagccgtgtgttcaaatgtacagtggtccttttcagagttggacttctagactcacctgttctcactccctgttttaatttcaacccagccatgcaatgccaaataatagaattgctccctaccagctgaacagggaggagtctgtgcagtttctgacacttgttgttgaacatggctaaatacaatgggtatcgctgagactaagttgtagaaattaacaaatgtgctgcttggttaaaatggctacactcatctgactcattctttattctattttagttggtttgtatcttgcctaaggtgcgtagtccaactcttggtattaccctcctaatagtcatactagtagtcatactccctggtgtagtgtattctctaaaagctttaaatgtctgcatgcagccagccatcaaatagtgaatggtctctctttggctggaattacaaaactcagagaaatgtgtcatcaggagaacatcataacccatgaaggataaaagccccaaatggtggtaactgataatagcactaatgctttaagatttggtcacactctcacctaggtgagcgcattgagccagtggtgctaaatgctacatactccaactgaaatgttaaggaagaagatagatccaattaaaaaaaattaaaaccaatttaaaaaaaaaaagaacacaggagattccagtctacttgagttagcataatacagaagtcccctctactttaacttttacaaaaaagtaacctgaactaatctgatgttaaccaatgtatttatttctgtggttctgtttccttgttccaatttgacaaaacccactgttcttgtattgtattgcccagggggagctatcactgtacttgtagagtggtgctgctttaattcataaatcacaaataaaagccaattagctctataactaaaaaaa

SEQ ID NO: 45658 - DNA, 2908 bp, Homo sapiens
gggaacccagggtgagccagccagtcaactgattatggagggactgggaggggtaccaggggctgtgactcccattgacgtgtctgtccatgacccaacactgctgctcaattgacacttgagaaagtctgtgcctccctaaaacagagcaggtggcctcacagtctttgagcccttagatcatcatgcatctatcttgtgacagaagcaccagctattggctttcaaggactcgggtgggctgagaggtgggagatgccaactctgattgaagtatgcctgtggaggaatcaaaggtgccacacaggacaatcttctctctgttatccacacagcaaagctgtccaagccctacatcacaatcaacaacttaaaccccagagagaataaggatgtcttaaccttcacctgtgaacctaagagtgagaactacacctacatttggtggctaaatggtcagagcctcccggtcagtcccagggtaaagcgacccattgaaaacaggatcctcattctacccagtgtcacgagaaatgaaacaggaccctatcaatgtgaaatacgggaccgatatggtggcatccgcagtgacccagtcaccctgaatgtcctctgtgagtatcttttgttcctctgtgggccaggacaccagcttaaatccaaaccaccagaggccaggcctctcactctctctctggtccaagtatagacaccttcacttctggacatccgagctggccatgactccctgccctgggaaaacctgggtaggcacagcttaaccaagagtataaggggagtggacgctcttgtcatgggagacttggggcccacagcttgtgatgggagaaacaggtgaatacctcaggcttcggctcagtgaacatagagggagtttggctgggacttgagggtgtgtcttggctcagagggtcactgtgtccctttaagagaccaggaacatccccttccctcggatgacatcacctatggctttattctctttgcgccagatggtccagacctccccagaatttacccttcattcacctattaccgttcaggagaaaacctctacttgtcctgttctgcggactctaacccaccggcacagtattcttggacaattaatgggaagtttcagctatcaggacaaaagctctttatcccccaaattactacaaagcatagcgggctctatgcttgctctgttcgtaactcagccactggcaaggaaagctccaaatccatgacagtcaaagtctctggtaagtggatcccagcatccttggcaatagggttttaggtggagtctatctgggcattcagggaagagtcaggaaaacatttttattcccagcctgtgtcccatgggcacaagcaaatcccaaattctcctcctaaaccctccaaatttgtctaagaacttcgaaaactttaacaaacaggctgatatcttcataacattcccagcctagaccaagcaggaaaaacattgatttcattgaaataattgataataatgaggataatgtttttatgatttttatttgaaaatttgctgattctttaaatggtttgttttctacattgacggaatttttctcttttaacctatctgtagcttatagcagttcaataaactatacttctgggaatgataattgaaatatttacttttgctttctacctgactgccccagaattgggcaactattcatgagaattgatatgtttatggtaatacacatatttgcacaagtacagcaacaatctgctctctttgtaacaggacacatttcaaatcattggttatattaccaaggctttgactgggatgttatatttaaggatatagatagaatgaaccagtatgaactgcaggcaaagtctgaagtcagccttggtttggcttcctattctcaagagttttgtaaaagtttaatctcagattccttataaaaacttagagaaaagaaaattttaaaagagagcctacacggtccattgctactcttgctgcacttatgtaaacaatcagaccacgtttgaagaaactcaacctattttgcaaacaaacttattctactgaaattatcattggtaaaactagagatgcccatagagagaaaaattatgtggaaaataaaaactgtagtacacctgttatgagattgcatctctgttcattgtttctgtgtttttattatccacctgtagactggacattaccctgaattctactagttcctccaattccatcttctcccatggaacctcaaagagcaagacccactctgttccagaagccctataagtcagagttggacaactcaatgtaaatttcatggggaaaacccttgtacctgaagcatgagccactcagaactcaccaaaatattcgacaccataacaacagctactcaaactgtaaacaaggaaaacaagttgatgacttcacactgtggacagtttttcccaaagatgtcagaacaagactccccatcatgatgaggctcccacccctcttaactgtccttgctcatgcctgcctctttcacttggcaggataatgcagtcattagaatttcacatgtagtagcttctgagggtaacaacagagtgtcagatatgtcatctcaacctcaaacttttacgtaacatctcagggggaaatgtggctctctccaccttgcatacagggctcccaatagaaatgaacacagagatattgcctgtgtgtttgcagagaagatggtttctataaagagtaggaaagctgaaattatagtagagtctcctttaaatgcacattgtgtggatggctctcaccatttcctaagagatacagtgtaaaacgtgacagtaatactgattctagcagaataaaacatgtaccacatttgct

SEQ ID NO: 45659 - DNA, 2315 bp, Homo sapiens
gaattcgggctgaccctgcccatgagcttgagaattgctcctgccctgggaagaggctcagcacagaaagaggaaggacagcacagctgacagccgtgctcagagagtttctggatcctaggcttatctccacagaggagaacacacaagcagcagagaccatgggaaccctctcagcccctccctgcacacagcgcatcaaatggaaggggctactgctcacagcatcacttttaaacttctggaacctgcccaccactgcccaagtcacgattgaagcccagccacccaaagtttccgaggggaaggatgttcttctacttgtccacaatttgccccagaatcttaccggctacatctggtacaaagggcaaatgagggacctctaccattacattacatcatatgtagtagacggtgaaataattatatatgggcctgcatatagtggacgagaaacagcatattccaatgcatccctgctgatccagaatgtcacccgggaggacgcaggatcctacaccttacacatcataaagggagatgatgggactagaggagtaactggacgtttcaccttcaccttacacctggagactcctaagccctccatctccagcagcaacttaaatcccagggagaccatggaggctgtgagcttaacctgtgaccctgagactccagacgcaagctacctgtggtggatgaatggtcagagcctccctatgactcacagcttgaagctgtccgaaaccaacaggaccctctttctattgggtgtcacaaagtatactgcaggaccctatgaatgtgaaatacggaacccagtgagtgccagccgcagtgacccagtcaccctgaatctcctcccgaagctgcccaagccctacatcaccatcaacaacttaaaccccagggagaataaggatgtcttaaacttcacctgtgaacctaagagtgagaactaccctacatttggtggctaaatggtcagagcctcccggtcagtcccagggtaaagcgacccattgaaaacaggatcctcattctacccagtgtcacgagaaatgaaacaggaccctatcaatgtgaaatacgggaccgatatggtggcatccgcagtgacccagtcaccctgaatgtcctctatggtccagacctccccagaatttacccttcattcacctattaccgttcaggagaagtcctctacttgtcctgttctgcggactctaacccaccggcacagtattcttggacaattaatgaaaagtttcagctaccaggacaaaagctctttatccgccatattactacaaagcatagcgggctctatgtttgctctgttcgtaactcagccactggcaaggaaagctccaaatccatgacagtcgaagtctctggtaaagtggatcccagcatcgttggcaatagggttttaggtggagtctatctggcattcagagaagagtcaggaaaacaattgtattcccagcctgtgtcccatgggcacaagcaaatcccaaattctcctcctgaaccctccaaatttgtctaagaacttcgaaaactttaacaaacaggctgatatcttcataatattcccagcctagaccaagcaggaagaacattgatttcattgaaataattgataataatgaagataatgtttttatgatttttatttgaaaatttgctgattctttaaatggtttgttttctacattgatggaatttttctcttttaatctatctacagcttatagcagttcaataaactatacttctgggaaccgtaattgaaacatttacttttgctttctacctgactgccccagaattgggcaactattcatgagaattgatatgtttatggtaatacacatatttgcacaagtacagtaacaatctgctttctttgtaacatgacacatttgaaatcattggttatattaccaatgctttgattcggatgttatattaaaaacatagatagaatgaatgaaccaatatgaactgcaggcaaagtctgaagtcagccttggtttggcttcctattctcaagaggtttgtgaagatttaatctcagattccttataaaaacttagagaaaagaaaattttagaagacagcctacatggtccattgctactcttgctgcacttatgtaaacaatcagaccacatttgaagaaactccacctattttgcaaacaaacttattctactgaaattatcattggtaaaagtagagatgcccatagagggaaaaattatgtggaaaataaaaactgtagtatacctgtacccgaattc

SEQ ID NO: 45660 - DNA, 2128 bp, Homo sapiens
  misc_feature (1)...(2128): n = a,t,c or g
gctgacagccgtgctcagacagcttctggatcccaggctcatctccacagaggagaacacacaggcagcagagaccatggggcccctcccagccccttcctgcacacagcgcatcacctggaaggggctcctgctcacagcatcacttttaaacttctggaacccgcccaccactgccgaagtcacgattgaagcccagccacccaaagtttctgaggggaaggatgttcttctacttgtccacaatttgccccagaatcttcctggctacttctggtacaaaggggaaatgacggacctctaccattacattatatcgtatatagttgatggtaaaataattatatatgggcctgcatacagtggaagagaaacagtatattccaacgcatccctgctgatccagaatgtcacccggaaggatgcaggaacctacaccttacacatcataaagcgaggtgatgagactagagaagaaattcgacatttcaccttcaccttatacttggagactcccaagccctacatctccagcagcaacttaaaccccagggaggccatggaggctgtgcgcttaatctgtgatcctgagactctggacgcaagctacctatggtggatgaatggtcagagcctccctgtgactcacaggttgcagctgtccaaaaccaacaggaccctctatctatttggtgtcacaaagtatattgcaggaccctatgaatgtgaaatacggaacccagtgagtgccagtcgcagtgacccagtcaccctgaatctcctccatggtccagacctccccagaatttacccttcattcacctattaccgttcaggagaaaacctcgacttgtcctgcttcacggaatctaacccaccggcagagtatttttggacaattaatgggaagtttcagcaatcaggacaaaagctctttatcccccaaattactagaaatcatagcgggctctatgcttgctctgttcataactcagccactggcaaggaaatctccaaatccatgacagtcaaagtctctggtaagtggatcccagcatccttggcaatagggttttaggtggagtctatctggctttcagagaagagtcaggaaaacatttttattcccagcctgtgtcccatgggcacaagcaaatcccaaattctcctcctgaaccctcccaatttgtctctacagactctcttctccttgtttttctgttttcttatggctgaccttgtgtctggcctgaaaaaggtagggagggggctttatcagccctgagccctatgtggtagaagaggcttcagagagggacaagaaggagagtcctcaagatcaagttgcttctcgctgtcaccgacacatccccttctgccacgtcttttttttcttgtacctattccatgagctacaaggaacagctgaggctttgaaacaagctcacacttttcccccagatgagaggaggaagccccttgggtgagggaggagcagctcagactctgcttcctgctctgctccgggctcctctggtgactggccctgcctcactcaacctggggtgggactagcgtgtgtgtagaaagggccctggtggctgttcctgaatttggctaaattgagctgccagttgaagccaagcctcccccgggccagggctgcagggaaataagaagagagggagcctcagggcagactcctgagctgcgtcctggctctgaagtcaccagctgtatgaggctttggggcacagcacgtgggacacaacacggaggacagtgactgatgcagagctggaggaatagggagattcaccgttggggttattcatggcaggaaaggggcagtgccaaaaagtgtgtaattatagagagggtaagactaccagacactttatatatatctaatataagacttaccattaactatttctatgtgtgcaatttagtgttgtgtaaccatcannnnnnnnnnnnnnnnnnnnnnnnnnnnnnnnnnnnnnnnnnnnnnnnnnnnnnnnnnnnnnnnnnnactccttcttcccctaacccttagcacccatcattctactttgtctctatgtaactggctattctaactatcttttataaatggaattacata

SEQ ID NO: 45661 - DNA, 1539 bp, Homo sapiens
gaattcgggggaaggacagcacagctgacagccgtgctcaggaagtttctggatcctaggctcagctccacagaggagaacacgcaggcagcagagaccatggggcccctctcagcccctccctgcacacagcacatcacctggaagggggtcctgctcacagcatcacttttaaacttctggaacctgcctatcactgctcaagtcacgattgaagccctgccacccaaagtttccgaggggaaggatgttcttctacttgtccacaatttgcctcagaatcttgctgggctacatctggtacaaaggacaactgatggacctctaccattacattacatcatatgtagtagacggtcaaataaatatatatgggcctgcatacactggacgagaaacagtatattccaatgcatccctgctgatccagaatgtcacccgggaagacgcaggatcctacaccttacacatcataaagcgaggtgataggactagaggagtaactggatatttcaccttcaacttatacctgaagctgcccaagccctacatcaccatcaagaactcaaaacccagggagaataaggatgtcttagccttcacctgtgaacctaagagtgagaactacacctacatttggtggctaaatggtcagagcctcccggtcagtcccagggtaaagcgacccattgaaaacaggatcctcattctacccagtgtcacgagaaatgaaacaggaccctatgaatgtgaaatacgggaccgagatggtggcatgcgcagtgacccagtcaccctgaatgtcctctatggtccagacctccccagcatttacccttcattcacctattaccgttcaggagaaaacctctacttgtcctgttcgcggaatctaacccaccggcagagtatttttggacaattaatgggaagtttcagcaatcaggacaaaagctctctatcccccaaattactacaaagcatagagggctctatacttgctctgttcgtaactcagccactggcaaggaaagctccacatccttgacaatcagagtcattgctcctccaggattaggaacttttgctttcaataatccaacgtagcagccgtgatgtcatttttgtatttcaggaagactggcaggagatttatggaaaagactctgacaaggactcttgaatacaagttcctgataacttcaagatcataccactggactaagaactttcaaaattttaatgaacaggctgataccttcatgaaattctagacaaagaagaaaaaaactccatgttattggactaaataatcaaaagcataatgttttcataattttctatttgaaaatgtgctgattctttgaatgttttattctccagatttatgaactttttttcttgagcaattggtaaagtatacttttgtaaacaaaaattgaaacatttgcttttgctctctatctgagtgccccagaattgggaatctattcatgaatattcatatgtttatggtaataaagttatttgcacaagttt

SEQ ID NO: 45662 - DNA, 1955 bp, Homo sapiens
atccttgaatacccatttaatacgactcactatagggaatttggccctcgaggccaagaattcggcacgaggcacagctgagagccatgctcaggaagtttctggatcctaggctcagctccacagaggagaacacgcaggcagcagagaccatggggcccctctcagcccctccctgcacacagcgcatcacctggaaggggctcctgctcacagcattacttttaaacttctggaacttgcctaccactgcccaagtcacgattgaagccgagccaaccaaagtttccaaggggaaggacgttcttctacttgtccacaatttgccccagaatcttgctggctacatctggtacaaagggcaaatgaaggacctctaccattacattacatcatacgtagtagatggtcaaataattatatatgggcctgcatacagtggacgagaaacagtatattccaatgcatccctgctgatccagaatgtcacccgggaggacgcaggatcctacaccttacacatcgtaaagcgaggtgatgggactagaggagaaactggacatttcaccttcaccttatacctggagactcccaagccctccatctccagcagcaacttataccccagggaggacatggaggctgtgagcttaacctgtgatcctgagactccggacgcaagctacctgtggtggatgaatggtcagagcctccctatgactcacagcttgcagttgtccaaaaacaaaaggaccctctttctatttggtgtcacaaagtacactgcaggaccctatgaatgtgaaatacggaacccagtgagtgccagccgcagtgacccagtcaccctgaatctcctcccgaagcttgcccaagccctacatcaccatcaacaacttaaaccccaggggagaataaggatgtcttagccttcacctgtgaacctaagagtgagaactacacctacatttggtggctaaatggtcagagcctcccggtcagtcccagggtaaagcgacccattgaaaacaggatcctcattctacccagtgtcacgagaaatgaaacaggaccctatcaatgtgaaatacaggaccgatatggtgggcatccgcagttacccagtcaccctgaatgtcctctatggtccagacctccccagaatttacccttcattcacctattaccattcaggagaaaacctctacttgtcctgcttcgcggaatctaacccaccggcagagtatttttggacaattaatgggaagtttcagcaatcaggacaaaagctctctatcccccaaattactacaaagcatagagggctctatacttgctctgttcgtaactcagccactggcatggaaagctccacatccttgacaatcagagtcattgctcctccaggattaggaacttttgctttcaataatccaacgtagcagccgtgatgtcatttttgtatttcaggaagactggcagaaagttgctttgattcttcctcaaagtatttaaaatcagctacagtcccaaaattgctttttcttcaaggagatttatggaaaagactctgacaaggactcttgaatacaagttcctgataacttcaagatcataccactggactaagaactttcaaaattttaatgaacaggctgataccttcatgaaattctagacaaagaagaaaaaaactccatgttattggactaaataatcaaaagcataatgttttcataattttctatttgaaaatgtgctgattctttgaatgttttattctccagatttatgaactttttttcttgagcaattggtaaagtatacttttgtaaacaaaaattgaaacatttgcttttgctctctatctgagtgccccagaattgggaaactattcatgaatattcatatgtttatggtaataaagttatctgcacaagttcaaaaaaaaaaaa

SEQ ID NO: 45663 - DNA, 2097 bp, Homo sapiens
acagctatgacatgattacgaatttaatacgactcactatagggaatttggccctcgaggccaagaattcggcacgaggcacagctgacagccgtgctcagagagtttctggatcctaggcttatctccacagaggagaacacacaagcagcagagaccatgggaaccctctcagcccctccctgcacacagcgcatcaaatggaaggggctcctgctcacagcatcacttttaaacttctggaacctgcccaccactgcccaagtcacgattgaagccgagccaaccaaagtttccgaggggaaggatgttcttctacttgtccacaatttgccccagaatcttaccggctacatctggtacaaagggcaaatgagggacctctaccattacattacatcatatgtagtagacggtgaaataattatatatgggcctgcatatagtggacgagaaacagcatattccaatgcatccctgctgatccagaatggtcacccgggaggacgcaggatcctacaccttacacatcataaagggagatgatgggactagaggagtaactggacgtttcaccttcaccttacacctggagactcctaagccctccatctccagcagcaacttaaatcccagggagaccatggaggctgtgagcttaacctgtgaccctgagactccagacgcaagctacctgtggtggatgaatggtcagagcctccctatgactcacagcttgaagctgtccgaaaccaacaggaccctctttctattgggtgtcacaaagtatactgcaggaccctatgaatgtgaaatacggaacccagtgagtgccagccgcagtgacccagtcaccctgaatctcctcccaaagctgtccaagccctacatcacaatcaacaacttaaaccccagagagaataaggatgtcttaaccttcacctgtgaacctaagagtgagaactacacctacatttggtggctaaatggtcagagcctccctgtcagtcccagggtaaagcgacccattgaaaacaggatcctcattctacccagtgtcacgagaaatgaaacaggaccctatcaatgtgaaatacgggaccgatatggtgggcatccgcagtgacccagtcaccctgaatgtcctctatggtccagacctccccagcatttacccttcattcacctattaccgttcaggagaaaacctctacttgtcctgttctgcggactctaacccaccggcacagtattcttggacaattaatgaaaagtttcagctaccaggacaaaagctctttatccgccatattactacaaagcatagcgggctctatgtttgctctgttcgtaactcagccactggcaaggaaagctccaaatccatgacagtcgaagtctctgactggacagttccctgaattctactagtacctccaattccattttctcccatgggaatcactaagagcaagacccactctgttccagaagccctataagctgggaggtgggacaactcgatgtaaatttcatggggaaaacccttgtacctgacatgtgagccactcagaactcaccaaaatgttcgacaccataacaacagctactcaaactgtaaaccaggataacaagttgatgacttcacactgtggacagtttttcccaaagatgtcagaacaagactccccatcatgataaggctcccacccctcttaactgtccttgctcatgcctgcctctttcacttggcaggataatgcagtcattagaatttcacatgtagtagcttctgagggtaacaacagagtgtcagatatgtcatctcaacctcaaacttttacgtaacatctcagggggaaatgtggctctctccaccttgcatacagggctcccaatagaaatgaacacagagatattgcctgtgtgtttgcagagaagatggtttgtatgaagacgtaggaaagctgaaattataatagagtcccctttaaatccacattgtgtggatggctcttgccgtttcctaagagatacattgtaaaacgtgacagtaatactgattctagcagaataaaacatgtaccacatttgcta

SEQ ID NO: 45664 - DNA, 1723 bp, Homo sapiens
aattcggcacgagcacagaaggaggaaggacagcacagctgacagccgtgctcagacagcttctggatcctaggctcatctccacagaggagaacacgcaggcagcagagaccatggggcccctcccagccccttcctgcacacagcgcatcacctggaaggggctcctgctcacagcatcacttttaaacttctggaacccgcccaccactgccgaagtcacgattgaagcccagccacccaaagtttctgaggggaaggatgttcttctacttgtccacaatttgccccagaatcttcctggctacttctggtacaaaggggaaatgacggacctctaccattacattatatcgtatatagttgatggtaaaataattatatatgggcctgcatacagtggaagagaaacagtatattccaacgcatccctgctgatccagaatgtcacccggaaggatgcaggaacctacaccttacacatcataaagcgaggtgatgagactagagaagaaattcgacatttcaccttcaccttatacttggagactcccaagccctacatctccagcagcaacttaaaccccagggaggccatggaggctgtgcgcttaatctgtgatcctgagactctggacgcaagctacctatggtggatgaatggtcagagcctccctgtgactcacaggttgcagctgtccaaaaccaacaggaccctctatctatttggtgtcacaaagtatattgcaggaccctatgaatgtgaaatacggaacccagtgagtgccagtcgcagtgacccagtcaccctgaatctcctcccgaaactgcccatcccctacatcaccatcaacaacttaaaccccagggagaataaggatgtcttagccttcacctgtgaacctaagagtgagaactacacctacatttggtggctaaatggtcagagcctcccggtcagtccgagggtaaagcgacccattgaaaacaggatactcattctacccagtgtcacgagaaatgaaacaggaccctatcaatgtgaaatacgggaccgatatggtggcctccgcagtaaccccagtcaccctgaatgtcctctatgggtccagacctccccagaatttacccttcattcacctattaccgttcaggagaaaacctcgacttgtcctgcttcacggaatctaacccaccggcagagtatttttggacaattaatggggaagtttcagctatcaggacaaaagctctttatcccccaaattactacaaatcatagcgggctctatgcttgctctgttcgtaactcagccactggcaaggaaatctccaaatccatgacagtcaaagtctctggtccctgccatggagacctgacagagtctcagtcatgactgcaacaactgagacactgagaaaaagaacaggctgataccttcatgaaattcaagacaaagaagaaaaaaactcaatgttattggactaaataatcaaaaggataatgttttcataattttttattggaaaatgtgctgattctttgaatgttttattctccagatttatgaactttttttcttcagcaattggtaaagtatacttttgtaaacaaaaattgaaatatttgcttttgctgtctatctgaatgccccagaattgtgaaactattcatgagtattcataggtttatggtaataaagttatttgcacatgttccgta

SEQ ID NO: 45665 - DNA, 489 bp, Homo sapiens
caaaacactattctgtttgctggctactgccttctctaaaagcacatagcacatccttctgcaggtgccagctctctgcccagttgtctgtcccccatcccatcttctgggcactgggctttcccacactggcgtacaagcagacacggggctcaacagacaccgacccaacacaaggcaagctgcagcacagagggaggtggcctgtaaggtggggcaggtcctgcagcccccgtggcatcccagttgctgagtgcttatcttctcttctccaggaacggttttccaaagcagacagcagctcagctgattctgaaggccatctccagttacttcgtgtctacaatgtcctcttccatcaaaacggtgtacttcgtgctttttgacagcgagagtataggcatctatgtgcaggaaatggccaagctggacgccaactaggctgagcaatgacagaaccagctgcaccatgtaccccaccttcagttt

SEQ ID NO: 45666 - DNA, 561 bp, Homo sapiens
gataattaaccctggtcatcgcagggtgactccaaagagaatttgggctggtgcattccgatgcaccttgaccgtcccataccataattgtgccaggtgcacctggaattttccaagacagatgtgaatcttaaggggagtattttgtcctcttgtgaggaaaagtactttaaaatgtgcaaaactgaggaatcagagcttaaggaagactcagaccccattctggccaaacttgaaaggctgatcttgttgctaactttgattgccacttgctatcccacatgagcatcaacccagagttctcataggtgttggtgatcttgtttgggaacttggttttcacagcaggaactgattacttagcaagtgccctaattgaagaaaacacattgctcccaatctccattggcttttgtgaaaaatctggtcctgagcagttagacatcctcctttccaagctttttattagaacacagattaatcttttaagctctgcttctgatgttggccttctttactggaaacaattctgaatcattagtgtaattaagaaaataccgc

SEQ ID NO: 45667 - DNA, 1884 bp, Homo sapiens
gggccgcgcgggcggggaagcgaagaggcgggcgggccagcgaggagcgcggagagaaaaggcgcgagcggccaggagggctcaggccgagacaccttgcagctgccgccgccgccaccgagccgccgctgtgctcactgatccgcctccagggccaccgccatgtcgagccgcggtgggaagaagaagtccaccaagacgtccaggtctgccaaagcaggagtcatctttcccgtggggcggatgctgcggtacatcaagaaaggccaccccaagtacaggattggagtgggggcacccgtgtacatggccgccgtcctggaatacctgacagcggagattctggagctggctggcaatgcagcgagagacaacaagaagggacgggttcacaccccggcacatcctgctggctgtggccaatgatgaagagctgaatcagctgctaaaaggagtcaccatagccagtgggggtgtgttacccaacatccaccccgagttgctagcgaagaagcggggatccaaaggaaagttggaagccatcatcacaccacccccagccaaaaaggccaagtctccatcccagaagaagcctgtatctaaaaaagcaggaggcaagaaaggggcccggaaatccaagaagaagcagggtgaagtcagtaaggcagccagcgccgacagcacaaccgagggcacacctgccgacggcttcacagtcctctccaccaagagcctcttccttggccagaagctgaaccttattcacagtgaaatcagtaatttagccggctttgaggtggaggccataatcaatcctaccaatgctgacattgaccttaaagatgacctaggaaacacgctggagaagaaaggtggcaaggagtttgtggaagctgtcctggaactccggaaaaagaacgggcccttggaagtagctggagctgctgtcagcgcaggccatggcctgcctgccaagtttgtgatccactgtaatagtccagtttggggtgcagacaagtgtgaagaacttctggaaaagacagtgaaaaactgcttggccctggctgatgataagaagctgaaatccattgcatttccatccatcggcagcggcaggaacggttttccaaagcagacagcagctcagctgattctgaaggccatctccagttacttcgtgtctacaatgtcctcttccatcaaaacggtgtacttcgtgctttttgacagcgagagtataggcatctatgtgcaggaaatggccaagctggacgccaactaggctgagcaatgacagaaccagctgcaccatgtaccccaccttcagtttaaaagaaaaaaaaaatccccttcactcctactgggaggtgggacccctttcattttcagttttgctcatctagggaaaataaggctttggtttccagtttaattgtttttgaccttctaaaatgtttttatgttagcactgatagttggcattactgttgttaagcactgtgttccagaccgtgtctgacttagtgtaacctaggagattttatagttttattttaatgaaaccctgattgacgcacagcagtggggagaacagcgtcttttacctgtcaccgaagccaggaagccccgtttgtaagcgtgtgttgtggtgctttattgtacatcctccagtggcgttctttttactctaatgttcttttggtttcccccctcagaagaatcatgaatttgcaacagacctaatttttggttactttttgtcttattgatggatttgaaaatgaaagatttaataaggcaaagcagaatctgttgtccttaattatatttgcaatttggaatttgtgtgagttgatttagtaaaatgttaaaccgttgttgtga

SEQ ID NO: 45668 - DNA, 732 bp, Homo sapiens
gttccagcgtggcagaagaacaaattggcccatattgcccagagaagagcttttcagagaaaggtacagacaagaagctagaaagagtggaaggagcagcagtcttgcaaggaagcagggcagagacacagcccatggcccctcactgccctgctggaagggctgatggagctccccgcagcgtggttcctgcctgggtgacagaggctcctgtggccactttagaagtgcggtttactcctcatgccgagatggaccttgggcagctcagttcacaagatgttggtcaggcgtcatttaaatattttcagtcagcagaggaagcaaagcgtgccattgaggctgtgctgtcagcggatcctcggtctgtgtaccgccggaagctttgccaggaccgccttttctactttactgtagacatagcgcatgtcacttgctggtttggtgatggctttgcagaggtgctgaggatcaagccggcttctgagcctgttcatatgactggccctgtggggtccttggtgtctctagggtcttaaggagcctccctcatgtctttaaggtagcatcattgatctttggatgtggcttttggattttctgaacaagctaatgttgtgtcgagaagcaacactttgtgatctcatggctttgattgatttgggctgttcaaaatgtttatttgaaaaacgtatacattaataaacttaacaaagagatataaaaaaaaaa

SEQ ID NO: 45669 - DNA, 1083 bp, Homo sapiens
attttgaggaaaggatgaaggagctcagagaagaggaggaaaaggccaaagcgtacaagaaagagaaacagaaggagaagaaaaggagggctgaggaggacttgacatttgaggaggacgatgagatggcagctgtgatgggcttctctggctttggttccaccaaaaagagttactgaggctttctgtgcttggcctgactttggcctatgctggacctaactttgcgtgtgtgtgtgtgtagtagggggtcatttctttttgggtaatgggaaagttcttaagagtgtcaatggggagggatagagggtgggggctcatggtttccctctactttgggagagggcacagattgcagaggtaatgctgtggcatattgcttctgcctcagtgtatcactggagtcacaggaccctgcccacctgagttcccaataaagaaaaacctccccttctgaggctgctttcccaaaactccccctgcatctttatctcttcatctatcccacctcttgtctgaacatcccacctttatcctgtgttctgcctttgttttaattttaactcatgttcatcctgcaacagaagcattctctaggtcccagtttccagttgattgcatatccttgatcagccctttttcccatcctgccctatggttctctagccacctgtgcatgcatgtgtatttctgcctggttctatggtgtgtggatgtgtgtgcatgaatctgtcatatagagggggtccgagctggaatcctagagcattgctgccctggggcctgatgttcttggcttcctcagagcatgtaacaggaaattaaatgggatgagtgtttggtgtggtttgtgtctgatgagttttttaacattcaggtgtagattgtttcagcttctcttgtttcattttcctgaagatttatgtttttgtctaccttgtgagcaggcttttggaagaacctgtttgatgcaaaaaagaaaatgaaaaacaaaacaaaaaatccccaaaaccttattatgggagcccgtcggtcttagaagctgtttgacatgtataataaatggcattgactgggcctgtt

SEQ ID NO: 45670 - DNA, 1950 bp, Homo sapiens
tctcagtcgccgctgccagctctcgcactctgttcttccgccgctccgccgtcgcgtttctctgccggtcgcaatggaagaagagatcgccgcgctggtcattgacaatggctccggcatgtgcaaagctggttttgctggggacgacgctccccgagccgtgtttccttccatcgtcgggcgccccagacaccagggcgtcatggtgggcatgggccagaaggactcctacgtgggcgacgaggcccagagcaagcgtggcatcctgaccctgaagtaccccattgagcatggcatcgtcaccaactgggacgacatggagaagatctggcaccacaccttctacaacgagctgcgcgtggccccggaggagcacccagtgctgctgaccgaggcccccctgaaccccaaggccaacagagagaagatgactcagattatgtttgagaccttcaacaccccggccatgtacgtggccatccaggccgtgctgtccctctacgcctctgggcgcaccactggcattgtcatggactctggagacggggtcacccacacggtgcccatctacgagggctacgccctcccccacgccatcctgcgtctggacctggctggccgggacctgaccgactacctcatgaagatcctcactgagcgaggctacagcttcaccaccacggccgagcgggaaatcgtgcgcgacatcaaggagaaggttgtgctacgtcgccctggacttcgagcaggagatggccaccgccgcatcctcctcttctctggagaagagctacgagctgcccgatggccaggtcatcaccattggcaatgagcggttccggtgtccggaggcgctgttccagccttccttcctgggtatggaatcttgcggcatccacgagaccaccttcaactccatcatgaagtgtgacgtggacatccgcaaagacctgtacgccaacacggtgctgtcgggcggcaccaccatgtatccgggcattgctgacaggatgcagaaggagatcaccgccctggcgccccagcaccatgaagatcaagatcatcgcacccccagagcgcaagtactcggtgtggatcggtggctccatcctggcctcactgtccaccttccagcagatgtggattagcaagcaggagtacgacgagtcgggcccctccatcgtccaccgcaaatgcttctaaacggactcagcagatgcgtagcatttgctgcatgggttaattgagaatagaaatttgcccctggcaaatgcacacacctcatgctagcctcacgaaactggaataagccttcgaaaagaaattgtccttgaagcttgtatctgatatcagcactggattgtagaacttgttgctgattttgaccttgtattgaagttaactgttccccttggtatttgtttaataccctgtacatatctttgagttcaacctttagtacgtgtggcttggtcacttcgtggctaaggtaagaacgtgcttgtggaagacaagtctgtggcttggtgaagtctgtgtggcccagcagcctctgatctgtgcagggtattaacgtgtcagggctgagtgttctggggatttcctctaagaggctggcaagaaccagttgttttgtcttgcggggtctgtcagggttggaaagtccaagccgtaggaccccagtttcctttcttagctgatgtctttggccagaacaccgtgggctgttacttgctttgagttggaagcggtttgcatttacgcctgtaaatgtattcattcttaatttatgtaaggttttttttgtacgcaattctcgattctttgaagaagatgacaacaaattttggttttctactgttatgtgagaacattaggccccagcaacacgtcattgtgtaaggaaaaataaaagtgctgccgtaaccaaaaaaaaaaaacaaaaaaaaa

SEQ ID NO: 45671 - DNA, 2797 bp, Homo sapiens
ctgagaggcgcacccgggcggccagctgggctcggagcggaacggggtcaggatggacgaggacgtgctaaccaccctgaagatcctcatcatcggcgagagtggggtgggcaagtccagcctgctcttgaggttcacagatgatacgtttgatccagaacttgcagcaacaataggtgttgactttaaggtgaaaacaatttcagtggatggaaataaggctaaacttgcaatatgggatactgctggtcaagagaggtttagaacattaactcccagctattatagaggtgcacagggtgttatattagtttatgatgtcacaagaagagatacatttgttaaactggataattggttaaatgaattggaaacatactgtacaagaaatgacatagtaaacatgctagttggaaataaaatcgataaggaaaatcgtgaagtcgatagaaatgaaggcctgaaatttgcacgaaagcattccatgttatttatagaggcaagtgcaaaaacctgtgatggtgtacaatgtgcctttgaagaacttgttgaaaagatcattcagacccctgggactgtgggaaagtgagaaccagaataaaggagtcaaactgtcacacagggaagaaggccaaggaggaggagcctgtggtggttattgctctgtgttataaactctgggaaattccatctcttgcatatttgatcagatagtgacatctttctgtatataaactctttaactgctattttagggaccttgcagtttgcacataattgttttatatcatagcagtaaatatttgcaagaaatcccactcatcgaccccgggtaaaatgttatggtaagcatgcacagtttgcagtctacagtttttttatgtagcacaaaataggtgtacctttataagtacattcaattttatgatttacatttatcatgtaatttttaaaaaaatccatctatctaggatatgttgatacaaagtctgcttttgctattctttttgcttaaatactcctatcattttctgaattacttggtatttagaactcctagcaccacggggaagaatagaggtatcatcaaacgtggcaaattttctttcaggaataataaagagcatgattccacagcttttctgggatgtttgagattcttttttagtactaagcaaaattctcatcacagaatgtagcccaggccaatttataactaaatctctatttgttcggatgatgcttctaaaacagcattgataggttaaagaagcttggtatttttaatttacttcaatgattagctcagttgcttaactggagttttaatcctgtgatatgtacattggattcatgactgtgcagcatttttagttatgtggtgtttggcagaatgacaataaggttttcccccattttggtttcaggaggacatgaatagtgtgtttattgtaactcctcatacacttttaaaaccaacatcttttttcataaatgttggtagtgtttgtccaggtaccttaactgtagcttgtgtaatgttgatgaatatctgtatcttacggcttccataatggctagttgatattcaaaaacctatttctgtgttttgaggggtggggaaaaaaaacactaagtgataatttgaaaaaggcatattgcttccagattctgatgtgtgagggaaaatactgtcacaatgaaaatcttgacaatttacttaacaagtaaccagtagttcatcaaaaccaacttgtacagactaataaatctttttcacagtattcagttttctcacctcttgctattgtatattgtagatttttttcattcatgtgttatttaatttacactgatctctgctattttaaccccccaaataagttatttgtcctttaaggttggttactataatacccctcagtaagattccagtattaatttctgggcagtttgttctctgtatacaattgcaaatgataagcatttttgtgagtgaccacctttgcaatatgtttgttaatttacttcatgttgggttctttctgaaatgtacatctttacatataaaaacctcacattctacttgatttacacttcctagtctacattacatgtggttgaaggttttatacattctatatgcttttactaaatatacaagatttactactagaaatttggagaaagaacactaacacatgtacttgtgatttgttcatgttatattaaaacttgagatttgtgtatttatgtagagtctgtattgacaagactgttgttttttgctccttgagctatataataatctgtgtattggattgttgtcttgatttggtctaaatttgaatatatatgagttacttgaatataacaaaaatgaattttgtttgatagatttatattgtaacctttttctagttcttgaataaatatagcctgctttccctagatgcatttgtgtaggaagtatatacatttccctattactctcatcagctgaagaatatgtactattgtgttactcaaattatgtggctttcattttgttgttttgttgcaagcttagtgttttgtagtggaggttttgtaaatgaaacagttgtaatatctaaggtcaggcacctagtaacagggttttgttaattcttttcagaatcattgaagcagtcttaaagggtcttttgcagatggtacaaattagaacaattagaatatagtattttgagttctagtagtactgagattgacccaaacaaataaaaaactattcaatttctgaaaaaaaaaaaaaaaa

SEQ ID NO: 45672 - DNA, 373 bp, Homo sapiens
gaaagatcaacactattccttataacaacacctcagtatcctgcgagctgtacacaccagagtttatttaaccaccttgctgctggcatgaaagcctcaggagccctgggctcccccagtgttgcctgggtctgactttgcctcagtgaaaactgcctcgaattctttcttgcaccgatgggcagatgggcagtgtcggaggatcgtgtcatctgtcccgtggcgctggttggcttggtcaagtcagtgttcaaactatctcctgctctttcaaggggatctggggctctagaagattagaggacttggagaggttagtgacttgctcgaggtcggctaggaagcaagacccaggattccaactcaggtctgg

SEQ ID NO: 45673 - DNA, 481 bp, Homo sapiens
cggacgcgtgggcggacgcgtgggtttaggagcgaagttaatgtttgcaccaggcttcctgtagggagatccctccccaaagcagctggcgccaaggcttgggggcatcctactgagctgggttcctgctccttcttgggctccatgaaggaagtaagaggctagttgagagcctcccttggcccctttccggtgcctccccgcctggcttcaaatttatgagcattgccctcatcgtcctttcttgttccagggtcagtggccctcttcctaaggaggcctcctgcttgccatgggccaaaaggcacggggtgggttttttctctccctaccctcaggattggacctcttggcttctgctggattggggatctgggaatagggactggagcaagtgtgcaaatagcatgatgtctacactgccagagagaccgtgaggatgaaactaataatggggcctttgtgagctaaaagctggaag

SEQ ID NO: 45674 - DNA, 379 bp, Homo sapiens
atttcaaatgagatgtaatcgactttatatcttagtcacggagttgccatggcatgtagtagaaaaccacaggaagaatggtcatattcactttgtgggctgcccataatctttcttgggcattcacaactcttgagtttggtgttcaggcatcattattaaaaagtggagtcctatgtaccagactgagtttttacaaatgatttgcaggctagacataacccactgatggaaatggtgaagaatgagcttcatgtaggtttaaaagtgtattctgagcctgtagatgattaatcaggtttttattcaatcatataaatgtattcctttgtaatcatttttggttaactgaggatatctagtggctgcttcatagggg

SEQ ID NO: 45675 - DNA, 1345 bp, Homo sapiens
  misc_feature (1)...(1345): n = a,t,c or g
ccccacccacacgcacgcacacatatatatatatatatatatatggtgtgtgtgtgtgtgtgtgtggtatatatattcctatccagatacctcatattcctaacttcctaaatatcctggtatagtgtttgaaatatgattaaatgtacctatgcttgggcaaaatagcttttgaaaacaggaactcatgccagaagccccctggttgtctgaaaggtatgctttactcagtctaatggtgctgttggagtctggggagaatgtcatgctaataaatagaacactataaaaatattaagagaatgtcctaatgaagtgtgcatgaaacatgttgacaattttttatgagcaacagaaataaatcattttaaaagttctcagaaaacctatttatgtcatctttgcttttgtgagtttgtgttaccgcacaactcccagacttttaactgcctgtaccttggaaatgtctgctgttcgtaacttcttcagtttgtataacagtgctgcagctgtatttggtttttacctctccctgttcccacggcacaccgtcagtgaaccttcaccaaaccccacgtgcattttatcctcagtgaattgttggtggaggtgcacctgactgctctgtgagaatccgtgccatggctcctttgggtcaaagatgccctcccctccgtcttaggttcttgtctagaaatgagtaatgtcttacaagcatgcctagttctaatcatctcatcctgtgtttgtgattgatgtttgcctgcctaaatgtacaaaccaccattgtgtccaaagcacagctattcatgacttaattttctaatctcaccacagagaaagtgggctcatgccaaagaagaaaaccttagtatgcatcagatgctggatcagactttactggagttaaacaacatgtgaaaacctccttagctgcgaccacattctttcgttttgttttgttttgtttttaaacacctgcttacccctttaaatggcaatttatttacttttaccactgtcacagaaacatccacaagataccagctaggtcagggggtggggnaaacacatacanaaaggcaagcccatgtcaggncgatcctggttncaaatgtgccatttcccgggttgatgctgccacactttgtagagagtttagcaacacagtgtcttagtcagcgtaggaatcctcactaaagcaggagaagtcccattcaaagtgccaatgatagagtcaacaggaaggttaatgttggaaacacaatcaggtgtggattggtgctactttgaacaaaaggatcccctgtggtcttttgttcaacattgtacaatgtagaacctg

SEQ ID NO: 45676 - DNA, 1213 bp, Homo sapiens
gcctcctccgcccgaccgcgcgctcgccccgccgctcctgctgcagccccagggcccctcgccgccgccaccatggacgccatcaagaagaagatgcagatgctgaagctcgacaaggagaacgccttggatcgagctgagcaggcggaggccgaccaagaaggcggcggaagacaggagcaagcagctggaagatgagctggtgtcactgcaaaagaaactcaagggcaccgaagatgaactggacaaatactctgaggctctcaaagatgcccaggagaagctggagctggcagagaaaaaggccaccgatgctgaagccgacgtagcttctctgaacagacgcatccagctggttgaggaagagttggatcgtgcccaggagcgtctggcaacagctttgcagaagcttggaggaagctgagaaggcagcagatgagagttagagaggcatgaaagtcatttagagtcgagcccaaaaagatgaagaaaaaatggaaattcaggagatccaactgaaagagggccaagcacattgctgaagatgccgaccgcaaatatgaagaggtggcccgtaagctggtcatcattgagagcgacctggaacgtgcagaggagcgggctgagctctcagaaggcaaatgtgccgagcttgaagaagaattgaaaactgtgacgaacaacttgaagtcactggaggctcaggctgagaagtactcgcagaaggaagacagatatgaggaagagatcaaggtcctttccgacaagctgaaggaggctgagactcgggctgagtttgcggagaggtcagtaactaaattggagaaaagcattgatgactttagaagaccgagctgtacgctcagaaactgaagtacaaagccatcagcgaggagctggaccacgctctcaacgatatgacttccatataagtttctttgcttcacttctcccaagactccctcgtcgagctggatgtcccacctctctgagctctgcatttgtctattctccagctgaccctggttctctctcttagcatcctgccttagagccaggcacacactgtgctttctattgtacagaagctcttcgtttcagtgtcaaataaacactgtgtaagctatttctgtttgctattctttttacttcttatttattgacattttagtttcaacattgaataaaactacaaagctgcttcacacaaaaa

SEQ ID NO: 45677 - DNA, 456 bp, Homo sapiens
gcagaaagaggtgacagtgagacacctcaaaaccaagctgaaggaatctgagcgccgactccatgaaagggaaagtgaaatcgtggagcttaagtcccagctggcccgcatgcgagaggactggattgaggaggagtgtcaccgggtagaggcccagttggcactcaaagaagccaggaaagagattaaacagctcaaacaggtcatcgaaaccatgcggagcagcttggctgataaagataaaggcattcagaaatattttgtggacataaacatccaaaacaagaagctggagtctctccttcagagcatggagatggcacacagtggctctctgagggacgaactgtgcctagactttccatgtgattccccagagaagagcttaaccctcaacccccctcttgacacaatggcagatgggttatctctggaagagcaggtcacgggggaagg

SEQ ID NO: 45678 - DNA, 766 bp, Homo sapiens
ttttttttttttttaaaatggaaacatcaattttattaacaatttacggcaatagacatttacagaacaaaaataagacagttccaagacaaaggagtgtaaaagtacagcacacaggttaatactcttcaccctcatcctctccgtcagcactatctgctccaacctcctcataatccttctcaagggcagccatgtcctcacgggcctctgaaaactcgccttcctccatcccctcacccacgtaccagtgaacaaaggcacgcttggcatacatcaggtcaaacttgtggtccaggcgagcccaggcctcggcaacagctgtggtattgctcagcatgcacacagctctctgtaccttggccaggtctccgccaggcaccacagtgggaggctggtaattaatgccaaccttgaagccagtggggcaccaatccacaaactggatggtacgcttggttttgatggtggcaatggcagcattgacatctttgggaaccacgtcaccacggtataacaggcagcaagccatgtatttaccatggcgagggtcacatttcaccatctggttggctggctcaaagcaagcattggtgatctctgctacagtaagctgttcgtggtaggctttctcagcagagatgacaggggcatatgtggccagagggaagtggatgcgggggtagggcaccaggttggtctggaattctgtcaggtcaacattcagggctcaatcaaatctcagggaagcagtgatggaggacac

SEQ ID NO: 45679 - DNA, 1668 bp, Homo sapiens
agctatgacatgattacgaatttaatacgactcactatagggaatttggccctcgaggccaagaattcggcacgagaaccgggacccggtgtctgctcctgtcgccttcgcctcctaatccctagccactatgcgtgagtgcatctccatccacgttggccaggctggtgtccagattgggcaatgcctgctgggagctctactgcctggaacacggcatccagcccgatggccagatgccaagtgacaagaccattgggggaggagatgactccttcaacaccttcttcagtgaaacgggcgctggcaagcacgtgccccgggctgtgtttgtagacttggaacccacaagtcattgatgaagttcgcactggcacctaccgccagctcttccaccctgagcagctcatcacaggcaaggaagattgctgccaataactatgcccgagggcactacaccattggcaaggagatcattgaccttgtgttggaccgaattcgcaagctggctgaccagtgcaccggtcttcagggcttcttggttttccacagctttggtgggggaactggttctgggttcacctccctgctcatggaacgtctctcagttgattatggcaagaaatccaagctggagttctccatttacccggcaccccaggtttccacagctgtagttgagccctacaactccatcctcaccacccacaccaccctggagcactctgattgtgccttcatggtagacaatgaggccatctatgacatctgtcgtagaaacctcgatatcgagcgcccaacctacactaaccttaaccgccttattagccagattgtgtcctccatcactgcttccctgagatttgatggagccctgaatgttgacctgacagaattccagaccaacctggtgccctacccccgcatccacttccctctggccacatatgcccctgtcatctctgctgagaaagcctaccatgaacagctttctgtagcagagatcaccaatgcttgctttgagccagccaaccagatggtgaaatgtgaccctcgccatggtaaatacatggcttgctgcctgttgtaccgtggtgacgtggttcccaaagatgtcaatgctgccattgccaccatcaaaaccaagcgcagcatccagtttgtggattggtgccccactggcttcaaggttggcatcaactaccagcctcccactgtggtgcctggtggagacctggccaaggtacagagagctgtgtgcatgctgagcaacaccacagccattgctgaggcctgggctcgcctggaccacaagtttgacctgatgtatgccaagcgtgcctttgttcactggtacgtgggtgaggggatggaggaaggcgagttttcagaggcccgtgaagatatggctgcccttgagaaggattatgaggaggttggtgtggattctgttgaaggagagggtgaggaagaaggagaggaatactaattatccattccttttggccctgcagcatgtcatgctcccagaatttcagcttcagcttaactgacagacgttaaagctttctggttagattgttttcacttggtgatcatgtcttttccatgtgtacctgtaatatttttccatcatatctcaaagtaaagtcattaacatcaaaaaaa

SEQ ID NO: 45680 - DNA, 539 bp, Homo sapiens
  misc_feature (1)...(539): n = a,t,c or g
cgaaagaccatccggggcaagcacagcgtcatcccccctgcagcaaggtcaggccggcgcccgggtaagaagccacactctaccaggaggtctcagcccaaggcaccacctgtggatgatgctgaggtggatgagctggtgcttcagaccaaancgantcccggagcaaagcctggagctgcagaagtgtgaagagatcctccacaagatcgtgaagtaccgcttcagctggcccttcagggagcctgtgaccagagatgaggccgaggactactatgatgtgatcacgcaccccatggactttcagacagtgcagaacaaatgttcctgtgggaagctaccgctctgtgcaggagtttcttactgacatgaagcaagtgtttaccaatgctgaggtttacaactgccgtggcagccatgtgctaagctgcatggtgaagacagaacagtgtctagttggctctgtttgcataaacaccttcctggccacccatatgtncgcagaagcgcaagaagtttcctgatangcttgctgaaga

SEQ ID NO: 45681 - DNA, 4723 bp, Homo sapiens
  misc_feature (1)...(4723): n = a,t,c or g
ttttaagggagatataagtgaataatttggacctgctctctttgaatgtttataatctggtggtggaaaaaaaatggacatatgaatattgatttgtgaccagtgcaaagggggcaaaaattcatatcccaaagaaaacggggacacatccggtctgtcttgttcatcactgtgtccacagggcctgacacctagtaggctcagtgggagaaaggagccccaattaccaacaaaagccaggaaagaacgggaggctcttacggaaaagggtgatacttaaactgagcaaggaggcacctggaaatagtgccacctaataatttttggcgatcagactggcacactagaacggttcataagaccagccttctcccattggctagcttccttcctcacccttctcaccctgggcaagccgcttcctctctctgggcctcttgcttttcctctgtaacataaaaggggttgagcaatatcatctctgagagcgccatgtgtgtgcgtgccagagggaaaacccccacaacgctaatacatcaaaactgcaggtttgcacaaaaactgaattctgctgaatgcgaacaggcaaacagcatttaccaggaaacaaaaacaaaatcaagcacataaaaaagtaggaagagttggaaaacggaaggaagataagttttcaaacagctggaatagttgatgttagctagcgaagtttttcagaggaaaaaacaagaatttggttatgaggcaagtggacctgagaaaaaagactaaaggggaagaatagcaagtaaaacagaactccacttgctagatctctccgtctgtcgcgttctttcacctgacccactcccttattccccccacaccctttccttctctccctacgttaccgcacaggaacgaagtctgggtcatgtgcggaccgcttgtggctcttaaatcctctttttgtcaccctggccgtgcaaaattttgaaaacgtccctcggcaaaaaaaataaaaataaaaaaaaaaatctgtccctggcctcttccctagttctgggtccagttgcagccaagtgaggggcagcgcgcgctcccaagtccccgtttcagagacgcgcacgcgcctggcgcccaacccccaatcccctgctgctcagtgaccccgcccacgggtttccgggccggcgtagctatttcaaggcgcgcgcctcgtggtggactcaccgctagcccgcagcgtcggcttcctggtaattcttcacctcttttctcagctccctgcagcatgggtgctgggccctccttgctgctcgccgccctcctgctgcttctctccggcgacggcgccgtgcgctgcgacacacctgccaactgcacctatcttgacctgctgggcacctgggtcttccaggtgggctccagcggttcccagcgcgatgtcaactgctcggttatgggaccacaagaaaaaaaagtagtggtgtaccttcagaagctggatacagcatatgatgaccttggcaattctggccatttcaccatcatttacaaccaaggctttgagattgtgttgaatgactacaagtggtttgccttttttaagtataaagaagagggcagcaaggtgaccacttactgcaacgagacaatgactgggtgggtgcatgatgtgttgggccggaactgggcttgtttcaccggaaagaaggtgggaactgcctctgagaatgtgtatgtcaacacagcacaccttaagaattctcaggaaaagtattctaatagggctctacaagtatgatcacaactttgtgaaagctatcaatgccattcagaagtcttggactgcaactacatacatggaatatgagactcttaccctgggagatatgattaggagaagtggtggccacagtcgaaaaatcccaaggcccaaacctgcaccactgactgctgaaatacagcaaaagattttgcatttgccaacatcttgggactggagaaatgttcatggtatcaattttgtcagtcctgttcgaaaccaagcatcctgtggcagctgctactcatttgcttctatgggtatgctagaagcgagaatccgtatactaaccaacaattctcagaccccaatcctaagccctcaggaggttgtgtcttgtagccagtatgctcaaggtaagtgttgcatttcagacaccatttatgagctatttacctgtgtgcagctggctgttgttggcaaaggcaaaaggatgatgcagtagagagagcgcagtgtctatagtcagaaaatctgagtgcaagtctggccctatcacttattaatggatgattgctcatggaatttactgtaccatccagcaaaatgtcaatagttactatatattgagtgagctctgcttgttacatatatggcctaaacaatggctcaaaaaaatttggaggaagtagtaagtataattcctatttatgggggcgggggaacagggaactaaggaaattttttctaataatttggaaggtctcaacaagttttagcattgggagtttcaattctaattcattcgttctccaaaaacccacttttattaaaactatactaaacactgtttctctctggggagaattttaaaattctgtaacttagnnnnnnnnnnnnnnnnnnnnnnnnnnnnnnnnnnnnnnnnnnnnnnnnnnnnnnnnnnnnnnnnnnnnnnnnnnnnnnnnnnnnnnnnnnnnnnnnnnnnnnnnnnnnnnnnnnnnnnnnnnnnnnnnnnnnnnnnnnnnnnnnnnnnnnnnnnnnnnnnnnnnnnnnnnnnnnnnnnnnnnnnnnnnnnnnnnnnnnnnnnnnnnnnnnnnnnnnnnnnnnnnnnnnnnnnnnnnnnnnnnnnnnnnnnnnnnnnnnnnnnnnncggagtgaggccctgttatgaaaaaaaaaaaatctgtacttaggctttcagatcaggctgtatgtgatgtatgtcgaaaacacagctataattgattgagggagaaacgttaccattttaaagtttatgctttcaagcccagatttggccactaggaatttcccagctcactagtgaaactgctgatgagtgattatttgccagtgagcctttcattctttctaaaatatgtactactagttgtgacttgtaggctataggggctataatatatcaagacaatctttatcctcatgaagcttacagttaagtaagagatagagattaaataattataacaacagagtgaagaacagtgaagaaaaagtacagagttataatatatataatagggccaggactgcatgaggaaggtaggaaagacatttcggcaagaggttgtcagggaaaagacttgcttgagaaagagccaagttgtggggtctggctgcttagcaatgaccataatacctaacttttgctatttttacatgaagtaactaatttaaccttatgaggaaagtactactaccatctagattttacaggtaagtaagcagagatacagagaagttaaactcttcacacggctttggctttaaacctatataggcttcggagcctccccacttaaccactttgccatagctacatccatattaggtgctaagtagatatctgttaagtagaaggaggatgaaaggatagttagctagttgaaaaatggatggatgaatgaagtgatgcttaagctaagaacaactttcaggggtaacatgcaaagaataatggagcaaagaagaaaaaatagaaaatgggataatcctttttctactaaggggtaaccatgtgtgttattcaatcttcaggctgtgaaggcggcttcccataccttattgcaggaaagtacgcccaagattttgggctggtggaagaagcttgcttcccctacacaggcactgattctccatgcaaaatgaaggaagactgctttcgttattactcctctgagtaccactatgtaggaggtttctatggaggctgcaatgaagccctgatgaagcttgagttggtccatccatgggcccatggcagttgcttttgaagtatatgatgacttcctccactacaaaaaggggatctaccaccacactggtctaagagaccctttcaacccctttgagctgactaatcatgctgttctgcttgtgggctatggcactgactcagcctctgggatggattactggattgttaaaaacagctggggcaccggctggggtgagaatggctacttccggatccgcagaggaactgatgagtgtgcaattgagagcatagcagtggcagccacaccaattcctaaattgtagggtatgccttccagtatttcataatgatctgcatcagttgtaaaggggaattggtatattcacagactgtagactttcagcagcaatctcagaagcttacaaatagatttccatgaagatatttgtcttcagaattaaaactgcccttaattttaatatacctttcaatcggccactggccatttttttctaagtattcaattaagtgggaattttctggaagatggtcagctatgaagtaatagagtttgcttaatcatttgtaattcaaacatgctatattttttaaaatcaatgtgaaaacatagacttatttttaaattgtaccaatcacaagaaaataatggcaataattatcaaaacttttaaaatagatgctcatatttttaaaataaagttttaaaaataactgca

SEQ ID NO: 45682 - DNA, 2163 bp, Homo sapiens
actgaagggcaggaccctctatccggcagtaagcgctgtctggggccagtgccaggtaccgcatccgctacctgggcgaaaggagagcggagccacactcccttctgcacctgagccgcctgtgtgtgcgccacaacctgggggatacccggctcggccaggtgtctgccctgcccttgccccctgccatgaagcgctacctgctctaccagtgagccctgtgataccacagactgtgctgaggtcttgccaccaccccctcccttggggaggtggggaggcactgctggcctagaccagctgctgaaagctggtgaggctgagcccctaccccaacccaagctctgcggaaatcaacagccccagagccacttggagggaggaagaaagggagccggcgttcaaggctatgacagtctgctacgcaaaacattttttcaagtaaaaatagtaagagatgttgttatagaaacctgttcttgtttttttttttttcttgcacaaatgatcatttatatagctgcctcaaaaaggaagattatctgggcaagtccagtgaaggcagacaaaccacaagacctagtgccaggtttattccctcacatgggtggttcacatacacagcacagaggcacgggcaccatgggagagggcagcactcctgccttctgaggggatcttggcctcacggtgtaagaagggagaggatggtttctcttctgccctcactagggcctagggaacccaggagcaaatcccaccacgccttccatctctcagccaaggagaagccaccttggtgaccgtttagttccaaccattatagtaagtggagaagggattggcctggtcccaaccattacagggtgaagatataaacagtaaaggaagatacagtttggatgaggccacaggaaaggagcagatgacaccatcagaagcatatgccagggaaaagggcagttactgggcttctggggctgcttagtcccctggcttggcaggaaagggtagggaagatggatggggctcattgtttggcattgatgatgtcccacgaattcgggcttgagggaagcaccacccacaaggaagccatccacatcaggctggctggcccagctccttgcaggttgccccagtcacagagcctccataaatgatacgggtgctctgagccaccgcatcagagacgttggacttcagccatcctcggagcttctcgtgtacttcctgggcctgttggggtgttgcagtcttgccagtaccaatggcccacacaggctcataggccaggacggaccttgcttccagtccttcacgttatctgcgatgacctttgtctgctcgaaaaacaaccttctcaagtgatgcccagcttcccttttcatctagcttctccccaaatgccaggcgattactccgagtccctctgccagagcatgggccactttctgcccaatcagctcatctgactccccaaagacatgccttctctctgagtgccccaggaccacccacgtggctccgcagtctttgatcatgccagggctgatctccccagtaaaagccccattagtcactttgtacgcaggttctgcgcagccacagcaatcttgggatctagcttctgccgggcgaagtcgatataggcagtagggggagcacaaaccacctcggtgtcggccggcaccttggccgcgttcagagtgccgatgagctcccccagactctgcttccgcccgttcatcttccaggtttcccccaacgaagaacttcctggagggcgccatggcgctggagccgaggcgctgaaggtcagtgtctgccgcagtcggccactgcccacttatatagagcgccgcgaagtggaactccgcctcctcgccgtcctccgccatggcccgcccagtcccccggagccctgccccccgcccgccctcctgccgccgccccggccgccgcccgatgatgcactgttccgacgttcccccttcttgtggcaacgttctaggagagtcgggggctcggtcgcctccgcctcgattgcggggctttcgggacaaggcgagacctgtgagctccggcgctcaggggaaccctcgcttggcgacttgagtcccccacggggccagaagtggttttcaagcggaactagctggt

SEQ ID NO: 45683 - DNA, 273 bp, Homo sapiens
cccgctgccacctcgcccagccatcaagccctccgataccttcggctaaaatatctttcatatttttagaatttgtcctcggaaacctttttcgcttggggtggtctctctcactctgccccctcctcacgcagctcttggcagtcaacagacgctggcggctggggctgcccatgccatcccagctccaagcttcccacttccggacttgtgtttgggtggggagacctgacctgggcatgttcctgtttcttcatcgttgagcttttctgg

SEQ ID NO: 45684 - DNA, 296 bp, Homo sapiens
cagcatcgttctagctatttctgactttgtgtatatgtgtgtgtgtgtgtgttgggggggggtgagtgggggcgctcttgtgcattttaaaagccataaattaattaaaacagatccacttcggtcagtatgtgtcccaacaaagaccctttgattccagctatggccgaatgaatgagtgagtgagtgagtgagtgaatgaacacacatgtgggggaggggagaaggaagtgcatgatgtcatggcaccgcgttggcatcacacaacaaactgaggatcagtttttttttttttt

SEQ ID NO: 45685 - DNA, 1269 bp, Homo sapiens
  misc_feature (1)...(1269): n = a,t,c or g
cagcctttaatgccttttattcataaaaactgtgaaagctagactgaaccattggaaacatttaactcagactctggattcagagtcgggaacccttagttctatctgaatccaagacagccacaccttagtatactgcccaaactaatgagtttaataaatacaaatactcgtttctttttgattagtgtgattagaactgaacaacggcacttaaggaatctggaagatagcctggatagatttctgattcatcccaagacctcaaagacaacacctgggtaccaaatttctttatttgaaggaatggtacaaatcaaagaacttaagtggatgttttggtacaacttatagaaaaggtaaaggaaaccccaacatgcatgcactgccttggtgaccagggaagtcaccccacggctatggggaaattagcccgaggcttagctttcattatcactgtctcccagggtgtgcttgtcaaagagatattccgccaagccagattcgggcgctcccatcttgcgcaagttggtcacgtggtcacccaattctttgatggctttcacctgctcattcaggtaatgtgtctcaatgaagtcacacaaatggggggtcatttttgtcagtggccagtttgtgcagttcccagtagtgactgattcacattttttttccaaatgtaatgcacactccattgcattcagcccggctctcccagtcatcacagtctggtttctttgatatcctgaaggaagattcggccacctcgttggttctgcagcttcatcagtttctcagcatgttccctctcctcatgagattggtgaagaaagtatttggcaaaagttcttcaaagccacatcatcgcggtcaaagtagtaagacatggacaggtaaacgtaggaggcgtagagctccaggttgatctggcggttgatggcggcctctgagtcctggtggtagttctggcgcacctgcgaggtggacgcggtcgtcatggcggcgactaaggagagggcggcggccggcggcggtggctgcgcggcgctggagcggcggcgggggccttggggcagtccgagggtgcggtgaagaggtgacggagggctggctatgggcggccggccggggtggggaacgagcgccgggttccgtccaagcactgttgaagcaggaaaccccgacgactctcggcctcgtgccgaattcttggcctcgagggccaaattccctatagtgagtcgtattaaattcgtnatcatgtcataa

SEQ ID NO: 45686 - DNA, 3126 bp, Homo sapiens
cgggtcccgtgcggaggtgctcctcgcagagttgtttctcgagcagcggcagttctcactacagcgccaggacgagtccggttcgtgttcgtccgcggagatctctctcatctcgctcggctgcgggaaatcgggctgaagcgactgagtccgcgatggagagagaaaaggaacagttccgtaagctctttattggtggcttaagctttgaaaccacagaagaaagtttgaggaactactacgaacaatggggaaagcttacagactgtgtggtaatgagggatcctgcaagcaaaagatcaagaggatttggttttgtaactttttcatccatggctgaggttgatgctgccatggctgcaagacctcattcaattgatgggagagtagttgagccaaaacgtgctgtagcaagagaggaatctggaaaaccaggggctcatgtaactgtgaagaagctgtttgttggcggaattaaagaagatactgaggaacatcaccttagagattactttgaggaatatggaaaaattgataccattgagataattactgataggcagtctggaaagaaaagaggctttggctttgttacttttgatgaccatgatcctgtggataaaatcgtattgcagaaataccataccatcaatggtcataatgcagaagtaagaaaggctttgtctagacaagaaatgcaggaagttcagagttctaggagtggaagaggaggcaactttggctttggggattcacgtggtggcggtggaaatttcggaccaggaccaggaagtaactttagaggaggatctgatggatatggcagtggacgtggatttggggatggctataatgggtatggaggaggacctggaggtggcaattttggaggtagccccggttatggaggaggaagaggaggatatggtggtggaggacctggatatggcaaccagggtgggggctacggaggtggttatgacaactatggaggaggaaattatggaagtggaaattacaatgattttggaaattataaccagcaaccttctaactacggtccaatgaagagtggaaactttggtggtagcaggaacatggggggacccatatggtggaggaaactatggtccaggaggcagtggaggaagtgggggttatggtgggaggagccgatactgagcttcttcctatttgccatgggcttcactgtataaataggagaggatgagagcccagaggtaacagaacagcttcaggttatcgaaataacaatgttaaggaaactcttatctcagtcatgcataaatatgcagtgatatggcagaagacaccagagcagatgcagagagccattttgtgaatggattggattatttaataacattaccttactgtggaggaaggattgtaaaaaaaaatgccctttgagacagtttcttagctttttaattgttgtttctttctagtggtctttgtaagagtgtagaagcattccttctttgataatgttaaatttgtaagtttcaggtgacatgtgaaaccttttttaagatttttctcaaagttttgaaaagctattagccaggatcatggtgtaataagacataacgtttttcctttaaaaaaatttaagtgcgtgtgtagagttaagaagctgttgtacatttatgatttaataaaataattctaaaggaaattgtgtaattatagactttttattttaaataagttaaggagtgggtagtataattaaggtccgttgcaaagctgttgttatatttgtataagataaatgctggtcagatgtaagtgtgttgtctgcaattcatcaggattaaattatgtagataacttaagggatatctctgcaaggagaaacacctttttagatcttttagatgctgcttcttcaatgcaaggaaaggaaataaccccagcgaggtactcttcagggacacaggtctagtacaagagaactcttgacggctactaagttcagccagtcttaaaaaactgtgctgtttctacaaaactttaactacagtagtttataagggatgccaacggaaagctgagggtgtagagcaaaatagttctaagcttcagttaaacttctttaggtaagatcttatttacttttcctttcttaattttcctccctaaaagataaactaatactcttaaatggtctttcagtatagtggttcttacgtagtttaacatagctataaattgagtttaacaatttataaactcaagagaataatttttataaaccctgttttccaatctgtcatttacttaaattattttggttgtttttccctttttttccttcttttcccaccccctccccctccatgtgaagatttgggtgcttaacatatcatttttttccctgccggaattttagcattgatatgaaccatggacaagtatattctgctgccacaaagactgtaaagtgcttcatttcaacagctgaggcaagccaagtgatcattaataaagcttttcttggttccttcagtggtgttggtagtaaaatggaaggtgtcttgctgcaggtaactaatgaagaagtggtcaaccacagagtcttcaagaaataagaaattctgtaccatctgaaagtagttcttgttggtgccttcatttaaaaagcactctttaaaataaaagggaaatgttttctgataaaacaaacatttagttgaggttcttgatataaaacaattacaaaatgagtgttgtttgtaaaacagtaacatcaaattggctagagagataaatgtatcatgttttaaattaggttttgtgagtagacagattacaattctattttaaatataaagtttataaaataaatactttttgtatccaaatacttggtgtaatgtttacacataaaatgtgtgaatcttgttctataaatatttggttgtctaaaagatcaccatcccctaaattttttacagtgcataatgaacagcattttattggggacagccaataatgtccacaatgctcttctcatttacctgttaatattaaaatatgcatagctttgtgaaactgcttttaaaaatttaggggatggtgatcttttagacaacgtcgacg

SEQ ID NO: 45687 - DNA, 453 bp, Homo sapiens
  misc_feature (1)...(453): n = a,t,c or g
gcagagggcctttgaaaccctattcatgacncnaatttaatacgactcactatagggaatttggccctcgaggccaagaattcggcacgagggcatctcagggacggtggctgcagtgctgactctaccctttgacgtggtaaagacccaacgccaggtcgctctgggagcgatggaggctgtgagagtgaaccccctgcatgtggactccacctggctgctgctgcggaggatccgggccgagtcgggcaccaagggactctttgcaggcttccttcctcggatcatcaaggctgccccctcctgtgccatcatgatcagcacctatgagttcggcaaaagcttcttccagaggctgaaccaggaccggcttctgggcgtctgaaaggtgcaaggaggcaaggaccccgtctctnccacggatggggagaggtcaggaggagacccagccaa

SEQ ID NO: 45688 - DNA, 470 bp, Homo sapiens
  misc_feature (1)...(470): n = a,t,c or g
tnnnnttttgaaantntgaaanccgttatgacatgattacgaatttaatacgactcactatagggaatttggccctcgaggccaagaattcggcacgaggtgaggcacgagggcaccaggaccctctggagcggcctccccgccaccctggtgatgactgtgccagctaccgccatctacttcactgcctatgaccaactgaaggccttcctgtgtggtcgagccctgacctctgacctctacgcacccatggtggctggcgcgctggcccgcctgggcaccgtgactgtgatcagccccctggagcttatgcggacaaagctgcaggctcagcatgtgtcgtaccgggagctgggtgcctgtgttcgaactgcagtggctcagggtggctggcgctcactgtggctgggctggggccccactgcccttcgagatgtgcccttctcagccctgtactggttcaactatga

SEQ ID NO: 45689 - DNA, 461 bp, Homo sapiens
tttgagatcacaggctttattcctacaaccacagggcttgagcctgactggggcaagaaaacagagtttcatctgagaatgtctcttatgggctgggttctgttcaggggagggtgggaacagaggacaaggaagacaagctcctctggccctaggaacaaaacacatttactccttcaaagaagcagatgatctgaataccctctggagactgaatctggcacaaaagggaattcagacccagaacagaagcagcaaaatattttaaaaatagtaaattgttcctggactcacaaatcattgtttttaagggcaagtgcatgcccaatataagtactggggcttcctaagagagctgacataggattacacagctgcctccctgcttcagtggaggccctcacatcccctttgaacacttaacttgggtaggagaggtagccttttcgtctctgttctgg

SEQ ID NO: 45690 - DNA, 1456 bp, Homo sapiens
gagacaggtggccacatgttgactccccttcctggtgccacacccatgaaacccggttctgctactttcccattctttggtgtagctcctgcaatcctgaatgagtccggggaagagttggaaggtgaagctgaaggttatctggtgttcaagcagccctggccagggatcatgcgcacagtctatgggaaccacgaacgctttgagacaacctactttaagaagtttcctggatactatgttacaggagatggctgccagcgggaccaggatggctattactggatcactggcaggattgatgacatgctcaatgtatctggacacctgctgagtacagcagaggtggagtcagcacttgtggaacatgaggctgttgcagaggcagctgtggtgggccaccctcatcctgtgaagggtgaatgcctctactgctttgtcaccttgtgtgatggccacaccttcagccccaagctcaccgaggagctcaagaagcagattagagaaaagattggccccattgccacaccagactacatccagaatgcacctggcttgcctaaaacccgctcagggaaaatcatgaggcgagtgcttcggaagattgctcagaatgaccatgacctcggggacatgtctactgtggctgacccatctgtcatcagtcacctcttcagccaccgctgcctgaccatccagtgaacatgatcctgacctttacctaggattcctcctgctccaaactttgcccatcctctttgccccctcaggagtgctgagggccagtgttgacccacactaccctcccttgaccagctgtctgggaccggaaaccagctttgtctccaggtagagacaacatcctgtgactgccaggcagaaaggacagggcccaggtcagcctcagtctgctgtgcctccagactgcagagctctcagaacccagaacagagacgaaaaggctacctctcctacccaagttaagtgttcaaaggggatgtgagggcctccactgaagcagggaggcagctgtgtaatcctatgtcagctctcttaggaagccccagtacttatattgggcatgcacttgcccttaaaaacaatgatttgtgagtccaggaacaatttactatttttaaaatattttgctgcttctgttctgggtctgaattcccttttgtgccagatgccagtactgtctgcccattggctccaggggctgtatgggcagattcagtctccagagggtattcagatcatctgcttctttgaaggagtaaatgtgttttgttcctagggccagaggagcttgtcttccttgtcctctgttcccaccctcccctgaacagaacccagcccataagagacattctcagatgaaactctgttttcttgccccagtcaggctcaagccctgtggttgtaggaataaagcctgtgatctcaaaaaaaaaaa

SEQ ID NO: 45691 - DNA, 1758 bp, Homo sapiens
ttttttttttttttagaagttcatcatctttagacttaaggaattaacaagggtcagggagactacaccaggctgagggcttcttggttcctggagacatgcccagctacagcaaacacagggaaacacgaagggggcagctggaagatttggtcttgaacttggggggtgggtaagtgatgatccccacgactggagcagcaggaagaagttgtgtctgaggaagtgctgggccgcccagagggacagccctgccctggagcttgtcgccgggagggaagggaaacaagccccctccctcagtgctgaggaaaaggcacttggctgggtctcctcctgccctctccccatccgtgggagagacggggtccttgcctccttgcccctttcagccgcccagaagccggtcctggttcagcctctggaagaagcttttgccgaactcataggtgctgatcatgatggcacaggagggggcagccttgatgatccgaggaaggaagcctgcaaagagtcccttggtgcccgactcggcccggatcctccgcagcagcagcccaggtggagtccacatgcagggggttcactctcacagcctccatcgctcccagtgacatctggcgttgggtcttcaccacgtcaaagggtagagtcagcactgcagccaccgtccctgagatgccaccagccacaaagctcatgcccacagaagtctggtccttcggcctgaacccattgagccagctcttcaccagctcatagttgaaccagtacagggcttggggtgggggatgcactgagaagggcacatctcgaagggcagtggggccccagcccagccacagtgagcgccagccaccctgagccactgcagttcgaacacaggcacccagctcccggtacgacacatgctgagcctgcagctttgtccgcataagctccagggggctgatcacagtcacggtgcccactgtgtggggattgggggtgacaatggggagaagtgagatcacaggtcttacatggcatcacctacctgctgtcccaggtctggggacctagaacacccccctatccctaggctggcagaggttggggctgggagctgggactgactgggtttgggccgaggtggggacagagggaggtcaaaggcccaagactatgctcacggcgggccagcgcgccagccaccatgggtgcgtagaggtcagaggtcagggctcgaccacacaggaaggccttcagttggtcataggcagtgaagtagatggcggtagctggcacagtcatcaccagggtggcggggaggccgctccagagggtcctggtgccctcgtgcctcacgatcttcacgaaggcatccatggtgccagtgaagcgggtagggtcttgaaaccaggtggcacagcgggcaccatttgggcacaggtacagaggctcccaggacaccattgcaatacaggaggcacttccctgtggattggagagaggagggcaatttggtataggagaggctcccacagtctggaggaaggcatcagctcgctggccatggagggccgctgagactgcaggcgaaccttcaccacgtccaggggtgtcatgaagagagaggtaaccacagccccggtgcctgaggccaccatttgctggagggggctgatgcccgcagggtcctggtcagccatcttgaagcttcagtcctggctctaggctggtgctcgctgcggcgcggcgcccagggtcaggcgggcc

SEQ ID NO: 45692 - DNA, 1109 bp, Homo sapiens
tgagtgtgcccgggctagcggcctgggttgggctttgtagctgctccgcagcccagcccgggcgcgctcgcagagtcctaggcggtgcgcggctcctgcctcctccctcctcggcggtcgcggcccgcggcctccgcggtgcctgccttcgctctcaggttgaggagctcaagcttgggaaaatggtgtgcattccttgtatcgtcattccagttctgctctggatctacaaaaaattcctggagccatatatataccctctggtttcccccttcgttagtcgtatatggcctaagaaagcaatacaagaatccaatgatacaaacaaaggcaaagtaaactttaagggtgcagacatgaatggattaccaacaaaaggaccaacagaaatctgtgataaaaagaaagactaaagaaattttcctaaaggaccccatcatttaaaaaatggacctgataatatgaagcatcttccttgtaattgtctctgacctttttatctgagaccggaattcaggataggagtctagatatttacctgatactaatcaggaaatatatgatatccgtatttaaaatgtagttagttatatttaatgacctcattcctaagttcctttttcgttaatgtagctttcatttctgttattgctgtttgaataatatgattaaatagaaggtttgtgccagtagacattatgttactaaatcagcactttaaaatctttggttctctaattcatatgaatttgctgtttgctctaatttctttgggctcttctaatttgagtggagtacaattttgttgtgaaacagtccagtgaaactgtgccagggaaatgaaggtagaattttgggaggtaataatgatgtgaaacataaagatttaataattactgtccaacacagtggagcagcttgtccacaaatatagtaattactatttattgctctaaggaagattaaaaaaagatagggaaaagggggaaacttctttgaaaaatgaaacatctgttacattaatgtctaattataaaattttaatccttactgcatttcttctgttcctacaaatgtattaaacattcagtttaactggtaaaaaaaaa

SEQ ID NO: 45693 - DNA, 1647 bp, Homo sapiens
ttactggagcatgaacaaggaagatgtcattgattcatttcaggtttactgcatggaggagccacaagatgatcaagaagtaaatgagttggtagaagaatacagactgacagtgaaagaaagctactgcatttttgaagatctggaacctgaccgatgctatcaagtgtgggtgatggctgtgaacttcactggatgtagcctgcccagtgaaagggccatctttaggacagcaccctccacccctgtgatccgcgctgaggactgtactgtgtgttggaacacagccactatccgatggcggcccaccaccccagaggccacggagacctacactctggagtactgcagacagcactctcctgagggagagggcctcagatctttctctggaatcaaaggactccagctgaaagttaacctccaacccaatgataactactttttctatgtgagggccatcaatgcatttgggacaagtgaacagagtgaagctgctctcatctccaccagaggaaccagatttctcttgttgagagaaacagctcatcctgctctacacatttcctcaagtgggacagtgatcagctttggtgagaggagacggctgacggaaatcccgtcagtgctgggtgaggagctgccttcctgtggccagcattactgggaaaccacagtcacagactgcccagcatatcgactcggcatctgctccagctcggctgtgcaggcaggtgccctaggacaaggggagacctcatggtacatgcactgctcctgagccacagagatacacatttttctacagtgggtattgtgagtgatgttcatgtgactgagcgtccagccagagtgggcatcctgctggactacaacaaccagagacttatcttcatcaacgcagagagcgagcagttgctcttcatcatcaggcacaggtttaatgagggtgtccaccctgcctttgccctggagaaacctggaaaatgtactttgcacctggggatagagcccccggattctgtaaggcacaagtgatccttggctttcagaatttgcaagaacagcgatttgaattttgggggggtctgctgttcattcctttaggtgctatacattattcaaaaagtctcccgcgcatttgcactaatgatggctgcatgcatagcaatcagcatgtgagcaaaatcgacaagaaaaccttgactttacagagcagtgtgtgagtaaacagaatgaaaacaacaacctccactctttagtttatataagtttgagttctttcctaaattaaaagatctacacttgagttgggaaccaaaagagaaaaatggacttccatctgttttactggtaaaggaaatcctctgatggacaggtcagagtgaaggaaggttgtgctggtaagacatctctgacgaagagccatggatgctttccacaaaatgtcacctcgctgcactaaaggatgatgaatcctaatcattaaaggaattgtttcagctgatttaaatttataatgaactcttttgtaataatgtatactgtagaacatgagtctctcctccctaaaattttaaatgtagaaaagtgctatatattagaaatttccattttgttaaataaatggttagagtctataaagcc

SEQ ID NO: 45694 - DNA, 473 bp, Homo sapiens
  misc_feature (1)...(473): n = a,t,c or g
gngnnnnntttggnaccgctatgactgattacgaatttaatacgactcactatagggaatttggccctcgaggccaagaattcggcacgaggttctcacctaaagcccacggactaataggccagttcatgcaggaaccaaagatacacatcttcaatgagagaccaggaaaggaccctgagaagccagaggccagcatggaagtgaaggggcagaagctgatcatcaccaggggcttacagaaagactacagaacggatctagtgtttggaacggacgttacctgctggtttgtgcacaacagtggaaaaggattcattgacgggcattacaaggattacttcgtgcctcagctctacagctttctcaaacggccttaaaggtttatagtttgggaaattatatatattaatatacatctttcccctgtcacttttgcagatattcttcggtttgaataattaaaatgaacc

SEQ ID NO: 45695 - DNA, 460 bp, Homo sapiens
gcggtgacgacctacgcacacgagaacatgcctgtgagtgctttggtccaggtttcggcggagatctcgctgttctgtccgaactctcccctcacgctgatttcggatcgtagagggtcctcatttaccctctgcacttcttaggacattaactccagggaccgcagcggcccacgggccacccgcatagacgggagcggagaggagataagatggcggcccagctgcgcagacaccaggggcggcgaggggcgagctctccccggtgtgtgacagtgggggctattttcgaccatcccattttcgctgttggtttctaaatctctgcatttctgtccctcttagctcgcaaaggatctccttcatccctctccagaagaggagaagaggaaacacaagaagaaacgcctggtgcagagcccaattcctacttcatggatgtgaaatgccaggatgctat

SEQ ID NO: 45696 - DNA, 579 bp, Homo sapiens
cgacctacgcacacgagaacatgcctgtgagtgctttggtccaggtttcggcggagatctcgctgttctgtccgaactctcccctcacgctgatttcggatcgtagagggtcctcatttaccctctgcacttcttaggacattaactccagggaccgcagcggcccacgggccacccgcatagacgggagcggagaggagataagatggcggcccagctgcgcagacaccaggggcggcgaggggcgagctctccccgctcgcaaaggatctccttcatccctctccagaagaggagaagaggaaacacaagaagaaacgcctggtgcagagccccaattcctacttcatggatgtgaaatgcccaggatgctataaaatcaccacggtctttagccatgcacaaacggtagttttgtgtgttggctgctccactgtcctctgccagcctacaggaggaaaagcaaggcttacagaaggatgttccttcaggaggaagcagcactaaaagcactctgagtcaagatgagtgggaaaccatctcaataaacacattttggataaataaaaaaaaaaaaaa

SEQ ID NO: 45697 - DNA, 860 bp, Homo sapiens
tttttttttttttttttgctttttaaaactgttttattaacttcacaatatataatgagcatctttccatgcaataggtaaaattcttctgctaacaaaaatcttacagactggttcaaaaacacaatattcaattagaagctggtaataggagacccacgtaaacaagtgacaggtaaaggtttacaacaagggcacatcatgaacatgtaaattcgaaagcaggggtctgtttccgtaataactttagggaaaccatcaggattcagggcataaggcaaaactcatcatgatggtcatggtgaggggggtcagtgctgactgcccgcagactatgactcaactgcttttccctcagcttttccatcagctgtctcacctcctccccaatcctttccatattctcttctctcatccttgcctgtggttctccaagcctatgcatcatatcccatctatactgcaggatgggctgcctaacgcggaaccgcctacggtttcctctaggcacacagtattcaccagcatccaaagggagggccaagggctcccctttattagcaacttgctccttttcatctttttcatcattttcctggttgacattttccatgctgagactgtttactgctcgtttctctttggactccattactcctgggcctatccttgtagtctcctccttctcccgattctcgccacgaggtgcgccgccgggacacttggccccgcagacctgcagactgctccccctccgcttcctaatttcggggccgcccctggcccgcacgtcctcagggacaccgggaacaggtaccactgccgagaagggagcgagcgacggcgggcccacgcgtccg

SEQ ID NO: 45698 - DNA, 611 bp, Homo sapiens
ggcacgaggagcttgctagctgtgtgggctgggaggtctggtagggctgagcttgcaagaggatcaacatgcctttggctagagatttactacatccgtccttggaagaggaaaagaaaaaacataaaaagaaacgcctagtacaaagtccaaattcttactttatggatgtaaaatgtccaggttgctacaagatcaccacggttttcagccatgctcagacagtggttctttgtgtaggttgttcaacagtgttgtgccagcctacaggaggaaaggccagactcacagaagggtgttcatttagaagaaagcaacactaatgattcaaacagcttcctgaattttaattttgtgttgtctcacagaaagccttatcataaattccataattctaattaatttaccaagataatgtaattacatttggttttgtaaggtatacagcagtaatctcctattttggtgtcagtttttcaataaagttttgattatgggcaaatcccctctttttctttttttaaaatatatttgagtatgccatacatttatatatatggtgtatatgaatttggtttaaacattttaaaatttattctgattagtttgtg

SEQ ID NO: 45699 - DNA, 872 bp, Homo sapiens
ccctgcgtggcaatccctgacgcaccgccgtgatgcccagggaagacagggcgacctggaagtccaactacttccttaagatcatccaactattggatgattatccgaaatgtttcattgtgggagcagacaatgtgggctccaagcagatgcagcagatccgcatgtcccttcgcgggaaggctgtggtgctgatgggcaagaacaccatgatgcgcaaggccatccgagggcacctggaaaacaacccagctctggagaaactgctgcctcatatccgggggaatgtgggctttgtgttcaccaaggaggacctcactgagatcagggacatgttgctggccaataaggtgccagctgctgcccgtgctggtgccattgccccatgtgaagtcactgtgccagcccagaacactggtctcgggcccgagaagacctcctttttccaggctttaggtatcaccactaaaatctccaggggcaccattgaaatcctgggtgtccgcaatgttgccagtgtctgtctgcagattggctacccaactgttgcatcagtaccccattctatcatcaacgggtacaaacgagtcctggccttgtctgtggagacggattacaccttcccacttgctgaaaaggtcaaggccttcttggctgatccatctgcctttgtgctgctgcccctgtgctgctgccaccacagctgctcctcgtgctgctgcagccccagctaaggttgaagccaaggaagagtcggaggagtcggacgaggatatgggatttggtctctttgactaatcaccaaaaagcaaccaacttagccagttttatttgcaaaacaaggaaataaaggcttacttctttaaaaagtc

SEQ ID NO: 45700 - DNA, 478 bp, Homo sapiens
  misc_feature (1)...(478): n = a,t,c or g
ggacttctcctggggatatggtgaactcgatcaaaatgccactgaaaaagtccagacaatgttcacagccattgatgaactcttgtatgagcagaagttgagtgtgcataccaagagtctacaagaagagtgccaacagtggacagctagctttcctcacctcaggattctaggtaggcagataatcactccaagtgaaggttatagattgtatcctagatccccttctgctgtttccgcttcatatgaaacaaccttgtctcaagaaagagattctactatatttggtataaggggaaagaagttacatttttcatcttcttatgctcataaagcatcttccattgccaaatcctccagcttttgttctatggaaagagatgaggaagactctataatcgtctcaggaagggaatnaattggagggatacctagcctttcgattcacntaggattattagnaggaggggttttnctg

SEQ ID NO: 45701 - DNA, 1002 bp, Homo sapiens
gtgaatgtgagtacagggaagcagcggccgccatttcagggagcttgtcgacggctgtcgcaggggtggatcctgagctgccgaagccgccgtcctgctctcccgcgtgggcttctctaattccattgttttttttagattctctcgggcctagccgtccttggaacccgatattcgggctgggcggttccgcggcctgggcctaggggcttaacagtagcaacagaagcggcggcggcggcagcagcagcagcagcagcagcaatctcttcccgaacacgagcaccacaggcgcccgaaggccggaacaggcgtttagagaaaatggcagacgatattgatattgaagcaatgcttgaggctccttacaagaaggatgagaaaaaacatgtcggtgaggtttatatatttcttaatttagcattattcacgaaactactgctgaaatgtaaactaacctccccggagccctcttgatttatcttatcagagatgcattacgtgtaacttacaaaagtaaatatatgctattgatgtaataatattgtgcagtagtttcacttcagcgtgatgaataaatgcccatctatctctctttgtagacttgcctaacgatatctcacctctactcccatgaattcacctttgattccagtgtgaactgtcaatcataaggtagtaattgagtgacttatcgctgtaccgtggtcccctaggtaaaatgactcaactaagaattaccacctccagtttggtatagcaaaaaggtgaatgtagtggtttgggaaaaagcaggggtccaagaataacaaagcatgaccagtctgtggcaagttaaatcttctaatagtcttataagaagaaatgggtgagattttaaaatttatgtatctatgtaagactggtgatagtaaatcttaaaacagtccagtggcaatctgctgctcagttaataattactaaaattcttggatccctgaatagaaaaaaaaaaaaaaaaaa

SEQ ID NO: 45702 - DNA, 376 bp, Homo sapiens
gtactagcttagtaaatagagctgactgctgaactggtatgcaaattgttttactaataataaataacttggtgtcttctatggaaggaactgctgggaagctggtacagaaacaaaggcattccatttatcctagttttcataggcttctgtataaggaagaagagaaacataaagctatactgaacaagattagagtcaacagtagacagaaattacttagaacagtataagatgacttaccaaaggggttattcagacagtatctgaggtttttgttggtagagcagggtgtgggtggtacatgccacagccttctgaaaaatgagctaccgctgatttggtaagggtgttctgcatccactgatagaccttg

SEQ ID NO: 45703 - DNA, 3303 bp, Homo sapiens
ttttttttttttttttagggaaagaaatctgggttccttttatttttgagccatagaaatagtatcttaggacttatttctagatgcagtttctttaatgtaagccaattctggttatttctacttggagctgaaagcaacctgaaaatagccaccttggttttcatgttagagatctaaaaactttcatgttagagatctagaaactttcatgttagagatctagaaactttcaagattctaaatgtaccaaaggtctaaggggagaaaataaaatccttcaaacaagatttgcacatgctgatactgctcattatttcattataacagcccttccaaatcttgaatttgcatttttaaccagtgttagcaaatcctgtatttccctctttgggaaatatgggaagcatgagccatggcatattcttgaagctaaatctcagggcatcacccctcacaaacaagagatcaagatgctttctgtatttatttaaaaaaaaaaaaaattccagaatgggtaagagaacaatcatcaaggatgtaggtgccagacacagggcagaaggtagctagaaaagtatgccttagggaagttaaaggtctagcctcattcctaccttgttttaatagctgtacctaatataaatagctaagtttcccattgttctagattcctctgccccatctacaaacatggcacagccagcttgacttgcaaggcctcagttgaaggaccccatgtacatacaggccagtacagcagtactaggctaactagaaggatctcatccccatatgtggtctcatttcaagtctatggatgactaccttcattgctgtgtgcgagatggtttcaccccttgaaaatatggtcacttcagcataaaatagttaaatctttataatgatcaattcatcctacctccttttacatgcagctgaaaaatgacaggctagggacatagaatattgtgaactttatactgttagaatcactgtccattaaatgatcactagctaatggtcactaaatttacaaattaaggaaattatatatagaatactgcaaaaacacagtaaaaagactgaagttcggcccatttctgctcaggaagtctcttcactcctaagcttcatatgttgtccttctggcttcaaaatttctgctattattactgtttttcctccttttgatcttccttttgttccccagtgccagaacttccagagccttctcgctcagatgccatctttttgtatgccatttcgaacagcttcagtgatgcctgctgaagagaggatgctgcctgtctaatattttctcctgtttcgctgtcttttctagccaggagctccctcattttggaaatctcttctttcagcttgttgcactcatcagcaggtaattggtccttgaattcttccatcttggtttctgtgtcgtgaatgattccttcagccatattaactgcttcaactcgttccttctttcgccggtcttcttcagcatatttctctgcatttttaaccatattttcaatatcatctttgcttaatccaccagaagactggattacaatctgctgctcacgtcctgtgcctttatctttagcagaaacatgtactatcccattggcatcaatgtcaaatgtaacttcaatctgaggaactccacgaggggctggtggaattccaatcaaagtaaactgtccaaggagtttgttgtctccagccatctctctttcaccctgacacactttaatttccacttgcgtttgaccatcagcggcagtagagaatacctggctcttcttggttggaatagtggtattcctattaataagtttggtaaagacacctcctagagtttcaatacccagagacaggggagtgacatcaaggagcagcacatccgtgacatcgccggccaacacacctccctgaatggcagctccaatggccacagcctcatcaggattgacagctttacttggggctctgccaaaaagatcctgtacagtctgctgaaccttgggcatcctagtcatgccacccacaagaatcacttctcctatgtcactcttgctgacttctgcatcttgcatagctttttggcatggagcgatagtccttctgattagatcagtgacaatcccttcaaattgagcacgggtcaacttcatattcaaatgcttgggtccagaagaatccattgtaagatagggcaaattgatgtcagtctgcacagatgaggagagttcacatttagccttttcagcagcttcccgtaccctctgaagtgccatgttgtctttagtcaaatcaacccctgtctctctcttgaactccttcacaatgtgccgtagcaaggcctggtcaaagtcttccccacctaagaaggtatccccatttgtggatttcacctcaaatactcctttctgaatttccaggatagaaatatcaaaagttccaccacctaaatcatatacagcaatgactttgtcttctgatttgtctagaccataggcaagagcagcagctgtgggctcattaatcacccgaagcacattcagtcccagatatctggccagcatctttagtggcctgtctctgcgagtcattgaaataagctgggactgtgatcacagcattttttgctgtgtgccccaagtaattttctgcagtctctttcatcttcatcaacacaaatgctccaatctgactcggagaatacaatttcccatgagcctcaacccaggcatcaccattggaggcacggacaattttaaagggaacatttttaatgtctttctgtacttcaggatcatcatatcgccggccaatgagacgcttggtagcataaaatgtattgtttgggttggtgacagcctgtcgcttggccggcattccaacaagtcgctcaccatctgctgtaaaggccacaactgaaggggtggttctggcaccttcggcattctccagcacctttgcttgtttaccttccataactgccacgcaggagttggtagtacccaaatcaataccaacaactgctcccttgattgcttctgatgcataatcccgccttgaaacaagtctaaaagcctcatgactaaggccattccagctatcctggtggcgggcggccgtagggccccgggaggctgcggcgcccacgagacgggctgctgcagctcggctggcacttatcatggcggataaatggaggagtacgaggcagcaaacaagcgctccgacggcaaagagctgcgcgatgcggtggcggcagcgcttctggaaacc

SEQ ID NO: 45704 - DNA, 660 bp, Homo sapiens
  misc_feature (1)...(660): n = a,t,c or g
aaagggaacatagatgagaagcatgtgataaaaaccacttgttcaccatgttatactactggacaaggcagaggttcacatactgtgtgaatgggattcagagtgaggaggagactaggctgggatggggtatttggattggacatgattgcgtttataagaatgagagtgttaaattggatttcttgctttatttgtgacatttcagtttattagaaatcatgttaccattagaaaaattgaagtttcctagtaacaaagtaatttgatttgtgtaacttgataaaagatttactgacttaagcttttgttttttttcataagctgcttttgagctttgtcccccacaggttgtaaaatgtaagcatttggtaaaattgtccagncaccttgccccagtcatttttttaaagggttcaaaaacctttttgttttaattcgtatagttgggtcttaactattggaaataacatcatcagtaattttttcttcattccttttgcaggaggcaagtgaggcctatctggttggcctttttgaagacaccaacctgtgtgctatccatgccaaacgtgtaacaattatgccaaaagacatccagctagcacgccgcatacgtggagaacgtgcttaagaatccactatgatgggaaacatttc

SEQ ID NO: 45705 - DNA, 698 bp, Homo sapiens
  misc_feature (1)...(698): n = a,t,c or g
ttttgccatcaataagaaatttacttgttttaaaaaaatccaaatgctggcattgtccagaaaaatttaacaggtttatttataattattataaagttgaaccgctgaaacttgttcactgaaacattttaacttgcattaatgctttacgtctccgcatttatattaaaaattcacacacaaatgtgtttcccatctcgggcttgggcactgggtcacaagcttggacagtgaagctacttctaaacccagcacagggtacagtggatgcaggacatgggataaacttctgttagattaagcccgtccctctgcttctgaggtctggcctgcctcgctgttctggtcagaacctgttttatgcaattggagaggagaggggtcccaggagtattagccctaatgtgagaaattagattacaggtctctgaaagggattctgcaaaccaatcctccttccaagcctactctacccatacctaatattcttaagcagttatgaattttgcagaggtctacaacacttgacactcactcaaggcaactgtgaggaaactgaggcttaaaggccactagtaagcagtgtaaaaaggacctgatcatgacaattattctttgagtgccataccatgcatgtgcntggctcaggcccttcactcaaaccctggctcgtactctctgaagggtcctctcgtgcc

SEQ ID NO: 45706 - DNA, 1074 bp, Homo sapiens
gccatctttcaattgtgttcgcagccgccgccgcgccgccgtcgctctccaacgccagcgccgcctctcgctcgccgagctccagccgaaggagaaggggggtaagtaaggaggtctctgtaccatggctcgtacaaagcagactgcccgcaaatcgaccggtggtaaagcacccaggaagcaactggctacaaaagccgctcgcaagagtgcgccctctactggaggggtgaagaaacctcatcgttacaggcctggtactgtggcgctccgtgaaattagacgttatcagaagtccactgaacttctgattcgcaaacttcccttccagcgtctggtgcgagaaattgctcaggactttaaaacagatctgcgcttccagagcgcagctatcggtgctttgcaggaggcaagtgaggcctatctggttggcctttttgaagacaccaacctgtgtgctatccatgccaaacgtgtaacaattatgccaaaagacatccagctagcacgccgcatacgtggagaacgtgcttaagaatccactatgatgggaaacatttcattctcaaaaaaaaaaaaaaaaatttctcttcttcctgttattggtagttctgaacgttagatattttttttccatggggtcaaaaggtacctaagtatatgattgcgagtggaaaaataggggacagaaatacaggtattggcagtttttccattttcatttgtgtgtgaatttttaatataaatgcggagacgtaaagcattaatgcaagttaaaatgtttcagtgaacaagtttcagcgggttcaactttataataattataaataaacctgttaaatttttctggacaatgcccagcatttggatttttttaaaacaagtaaatttcttattgatggcaactaaatggtgtttgtagcatttttatcatacagtagattccatccattcactatacttttctaactgagttgtcctacatgcaagtacatgtttttaatgttgtctgtcttctgtgctgttcctgtaagtttgctattaaaatacattaaactataaaaaaaaaaaaga

SEQ ID NO: 45707 - DNA, 346 bp, Homo sapiens
  misc_feature (1)...(346): n = a,t,c or g
ttngaacatccgctatcacatgattacgaatttaatacgactcactatagggaatttggccctcgaggccaagaattcggcacgagcttttatatgtttcttgccagcccctccgctcccttccatctctagcctctgtcctgtttagtttgatacgtcactgcagtaccttaagaggtgactcttaagaatgcatcccctcctgattcctcagctggttcaccctggaggttatttgcaaaaagaaaaggaggttcttgagggcaccgattgcgagcattctggagcctggctccccgcctgggaagcgatggggnnnnnnnnnnnnnnnnnnnnnngggggagg

SEQ ID NO: 45708 - DNA, 1172 bp, Homo sapiens
  misc_feature (1)...(1172): n = a,t,c or g
ccctcgggctgtcaaagtggaggagagtaaggcctgacagtgcctggctgccacctcgcctctccctactgaggacggtgccgccatgcggcctcgacacagccgacactcgggagcctcaccagatccaccgtccaaatgcgtggcccagactgagagacctccctcctctccactcccgaaagctccgttgtcaaccagcttgcacccgtggatatatggcattgacccgcttgctttgatacgaaacaaaaaagcagacgactccttcatcccatctgctcctaccgtgactgtggagtgacgcctcctgtgcagtgcagatttgccctccctgcctcctccctgtcctgccgcgcagccagggcgccttctcagcagtgcttccggcccagccgcccatccctaggcacagtgatttggcagcagggtcattttactttgaggctttttgttttaaaatgtagccaaggtttttacaaaggggaaaggaaaagaaaacaaaaacgcaagctccatgtgtatagctgaacttttatatgtttcttgccagcccctccgctcccttccatctctagcctctgtcctgtttagtttgatacgtcactgcagtaccttaagaggtgactcttaagaatgcatcccctcctgattcctcagctggttcacccttgaggttatttgcaaaaagaaaaggaggttcttgagggcaccgattgcgagcattctggtgcctggctccccgcctgggaagcgatggggtgctcagagcagcaggcaggttgggggagggggggggtcatagttgggttccagctcctggcttgatgagcccagggcgcttacaggcagcccatgaagttgatgacagttttagcatgagaatcacacagggtccctgtcctgggctcctctaaagccagtggatgtgctgggcaccagagacaaatcatggagatggctgctggtggctcccaggttggcccagatgggatgagccctctctgtccccaccggccctccttgccaagccattcctgggtgagttcaggcctgcgggagccacacattgatcttcacctggacanttgagccgcatggccagacccctnccaactgatgcggtggtgcgtgtgatttntcaaaagaaagcttttggatgctgttaagat

SEQ ID NO: 45709 - DNA, 2074 bp, Homo sapiens
tttttttttttagtttaatagacatttattccttcagttgaacaacctctacacaattaaaatgtatgacttaagatcttttctttttttgtgaagaaatttaggtctcaagaacttttatgaacttgctatgagtacttcctggaaatcaattaactgagtcttttgaaacccctagagaagataggagaaaattggttcagaacgagcatttaaattaagtcagcaaagtcagaatttaaaattgggcaattccttgtctacattttctttacactcaaattgaccctggacaacagtagtctagtctcctggaagacatggtgcaaacagaaatgcaatgtggtggtatactcatagtcaaagtgggtgcacaagtgatggtccaactttgtggaatggtaaggatttttagggttgtttggccagaacaagagaaataactgcagaaaacacatatggttggaaaccatgcgcttgtgactttttctgtagcctatgggagtggacagagtgggtaacccaagatgtttttaagactgactggactaagaatgacgtacttatagccaactactttccccctaatgtgactgaagggattcataatgatcacaattagcattacggttaagtattttagggttgacgtctaagctcacacttgaaaggtatttatctaatggccactggctcaccagcttcccaccctagcattcattgctagcttaccaatcttaaggctaataattttatcgcacattcaacttcaaaacacaccagtgtttaccattaccactaatcactgaatgcccatgaagccatggcactgaaccaggagctttcaccttttatgtgaatttaaaatggtactgtggaggctgaggcaattttcttcaggctaacccagattttctaaagcccaacttaaaaagtctacacctgccaaactaaaaaaaacgcagccacttgaaaataaaccagcagagcattgccatcactccgataaagctgcaggtttcatcacatgcaccagacaaatctacagggctagtttcagttctctccttttaaagaatttattaagcctgttataccacacagtatgttttatacactgacatacaactccctaataagataaagcaaagacaaaaaagtttatcttattagaaacaagatacaccaccacttattgtcttcaaacattattgcactttaactttcttaatttgacaaagcattcaagaaacatctgcagactagttttaacagacaaataacacctgtaagcagacatgactgtcctaaattgtttattaagtatgaattttacaaactttacttatattagcggtaacggtggagctggagagtattgcgccttctccaagctgcccggcgagagccaccaatagtgtggtggaacttgtggccctttccaaggccacggctctttcggcctgcagatgtcagccccacgcatctccctgtgcttgtggactggtttggtgatccactgggtgtcaggatttcttctgatagctttatggaatgggatcaatgaggataacctcaaaaaatttgtatgtggaatcttcaccaaccccagtaagaattcaggactctcagaagccccacagtggcggtccagcttcgctccctctgcaacggactgaaaggcttcgagcaaacttttagctggttaacaccatgatggacaggcttgccgtaaagttgcacccttaggaactgggcgttttcggccaccacggcgaacacgaatcctatatataacggtaaccttgcttggccttgtagcccagtcggcgcgctttatcaggccgggtggggcggggagccctgtggagagcagagagctggcggtactgccagcagcggaccctcagaagaaagcgcatgacatcagactgcttctttctccatagctcctggatgtacttgtatgcacccatcttggcttacctggatggctgaagaggaagacgatcaaaggcggatggaagagcaaagatcctcaacgcagcctacctgatggctgcccacgcgtccg

SEQ ID NO: 45710 - DNA, 376 bp, Homo sapiens
ggttgcctttgctgaactccaagttagtggattgcagaatggaaacttggcttttgcggcactgggtgagttttagtttgtgtgtgtcttgctggggggtggtgatgattgtctcagcactcacgcactgcacaagatggcagcaggatacagcactgcacaagatggcagctcctctgcagcttcctcctcagcctccctccttgcacccccacaggtttggcttgtggtttttgtcatcagtaacctactgcctgagatcatgatctcttaaaagatgagactctcggaagggttgattgtatgcgtcagtgagccttctatcaccttctggaacaaagtcacttgaaatctcttgatgagattaaggagttta

SEQ ID NO: 45711 - DNA, 1534 bp, Homo sapiens
cttgcgccgcatcttttttttttttttttttttacgcagcttaacagaatgactttaatgcttcttcaagttttccattttcttccacagggctttgtttcgaaaaataacaaaatgaggtaataagttaatgtatgtacacgttataaacactgtgtcagtttacgatggcagcaacggaagttgttacaaagaaagtgactgcggggtggctggagctcagccgcccccccattgagaagattcgtcgtcctgagaagtcgcgtgctggaggtggagtgtgtctagaagcatttgccggtggacgatggaagggccggcctcgtcgtactcctgcttggtgatccacatctgctggaaggtggacagcgaggccaggatggagccgccgatccacaccgagtattttgcgctccggcggggcgatgatcttgatcttcatggtgctgggtgccagcgcggtgatctctttctgcatgcggtcagcgaatcccaggggtacatcgtggtgccccccgacatgacgttgttggcatacaggtccttcctgatgtcgatgtcacacttcatgatgctgttgtaggtggtctcgtgaatgcccgccgactccataccgatgaaggagggctggaagagcgtctccgggcagcggaagcgctcgttgccgatggtgatgacctgcccgtctggcagctcgtagctcttttccagggaggaggaggaggcggccgtcgccatctcgttctcgaagtccagggccacgtagcacagcttctccttgatgttcgcgcacgatctcggcgctcagctgtggtcacgaaggagtagccacgctcagtgaggatcttcatcaggtagtcggtgagagtcgcggcccgccatggtccatggcgcatgatggcgtgcggcagcgcgtagccctcataaatgggcacgttgtgggtgacgccgtcgccggagtccaggcacgatgccggtggtcctccggaggcgtagagggacaggcacggcctggatggccacgtacatggcgggcacgttgaaggtctcaaacatgatctgggtcatcttctcgcggttggccttgggattgaggggggcctcggtgagcagggtggggtgctcctcggaaagccaacgcgaagctcgttgtagaaggtgtggtgccagatcttctccatgtcatcccagttggtgatgatgccgtgctcgatagggtactttcagggtcaggatacctctcttgctctgagcctcgtcgcccacgtaggaatctttctgacccataccgaccatgacgccctggtgtcgggggcggcccacgatggacgggaacacggccctaggggcgtcatccccggcgaagccggctttcaccaggccggagccattgtcgcacacgagggcggtggtctcgtcttcgtcgcacattgtgtctagtttctgggcgggtagctacaactgctactctcggctcgggccctggtcgccgcgggagggaagcgaggcttcacttggcgctgtccgctgcggt

SEQ ID NO: 45712 - DNA, 746 bp, Homo sapiens
gtaatgaagcacatgtgaataaccccttccatcccattcacagcatcgcactcccagtcctttaaggcaaagggaggcagtgctgaagcattggtggtgcagtgtaaagagacaagacctgatcatctgatcacacttgtgccaacttgattcatattgggcattactaacaacccctggtcaaggtaaataggttgaacaatcaataacattatccctgccctgccatacatgtgaaacaaaagcctatagaggacatgcaaattctacagtcattcctcatatgcttttagacagagtgcagctactggaatcttccagattttcagtgttttaaaatcagagctctgaatacacaaaaggaaagagaaatggagcagctgacatattttaagctcacagtgatactcagtgacaggagcacagagctctaatgtccacaggatgttgtagggtagggtctctcagtaaatcaagtcccttacctatgttctgacactgaggctcttggagctatgggttagaaatccaggaggcaatgtctttattctaatgaagtcctcatcttgcactcagaggcccactagtttgcccttctatatattaagtaaaaccaagagaaattaagaggatgatggcttctttctgtcacatgggtgctaaaccttttacaaacacttgatacttctatagagggaccaaggacctcaagtcctgggcagtctccttactgtgctactcactac

SEQ ID NO: 45713 - DNA, 2019 bp, Homo sapiens
cagccaatgccggaacaggatttgctgttgctgagcctcaaatcgcaatgttttgtgggaagttaaatatgcatgtgaacattcagactgggaaatgggaacctgatccaacaggcaccaagagctgctttgaaacaaaagaagaagttcttcagtactgtcaggagatgtatccagagctacagatcacaaatgtgatggaggcaaaccagcgggttagtattgacaactggtgccggagggacaaaaagcaatgcaagagtcgctttgttacacctttcaagtgtctcgtgggtgaatttgtaagtgatgtcctgctagttccagaaaagtgccagtttttccacaaagagcggatggaggtgtgtgagaatcaccagcactggcacacggtagtcaaagaggcatgtctgactcagggaatgaccttatatagctacggcatgctgctcccatgtggggtagaccagttccatggcactgaatatgtgtgctgccctcagacaaagattattggatctgtgtcaaaagaagaggaagaggaagatgaagaggaagaggaagaggaagatgaagaggaagactatgatgtttataaaagtgaatttcctactgaagcagatctggaagacttcacagaagcagctgtggatgaggatgatgaggatgaggaagaaggggaggaagtggtggaggaccgagattactactatgacaccttcaaaggagatgactacaatgaggagaatcctactgaacccggcagcgacggcaccatgtcagacaaggaaattactcatgatgtcaaagttcctccaactcctctgccaaccaatgatgttgatgtgtatttcgagacctctgcagatgataatgagcatgctcgcttccagaaggctaaggagcagctggagattcggcaccgcaaccgaatggacagggtaaagaaggaatgggaagaggcagagcttcaagctaagaacctccccaaagcagagaggcagactctgattcagcacttccaagccatggttaaagctttagagaaggaagcagccagtgagaagcagcagctggtggagacccaccctggcccgagtggaagctatgctgaatgaccgccgtcggatggctctggagaactacctggctgccttgcagtctgacccgccacggcctcatcgcattctccaggccttacggcgttatgtccgtgctgagaacaaagatcgcttacataccatccgtcattaccagcatgtgttggctgttgacccagaaaaggcggcccagatgaaatcccaggtgatgacacatctccacgtgattgaagaaaggaggaaccaaagcctctctctgctctacaaagtaccttatgtagcccaagaaattcaagaggaaattgatgagctccttcaggagcagcgtgcagatatggaccagttcactgcctcaatctcagagacccctgtggacgtccgggtgagctctgaggagagtgaggagatcccaccgttccaccccttccaccccttcccagccctacctgagaacgaagacactcagccggagttgtaccacccaatgaaaaaaggatctggagtgggagagcaggatgggggactgatcggtgccgaagagaaagtgattaacagtaagaataaagtggatgaaaacatggtcattgacgagactctggatgttaaggaaatgattttcaatgccgagagagttggaggcctcgaggaagagcgggaatccgtgggcccactgcgggaggacttcagtctgagtagcagtgctctcattggcctgctggtcatcgcagtggccattgccacggtcatcgtcatcagcctggtgatgctgaggaagaggcagtatggcaccatcagccacgggatcgtggaggttgatccaatgctcaccccagaagagcgtcacctgaacaagatgcagaaccatggctatgagaaccccacctacaaatacctggagcagatgcagatttaggtggca

SEQ ID NO: 45714 - DNA, 3797 bp, Homo sapiens
ctcacctataggggaattttggcccctcgaggcccaagaattcggcacgaggttttttttttttggaagttaaagtatttattgatgtgtttaaactgtgtacattctccacagatcatattaaggagtttgtaggtgaagtttaatctgtgcatagtgggtagagacatgaatagggtcaaaggggaggaaaaaggaaaaaaacaaaacaaaaacagtcacaggaaaataaaaatacaccacaggttaccagaaccttcagatttaaaataaaaagaaagaaaaagcagaagcagtgagcatcgacatcaactgtacaagcattacaaagactcctgtgacgaaaacacaattgttcaaagctttcccacagtgtccacagactcagtttcagggacagcctggactactttccctttcacacaaacaaacctccccgtgttctctcctgggccagcggccgcctccttggtgtggtcttctctgagtgaatgtcacaaggccggtgacaggagggggtggaggtgaggggacaaagtagaggccgagggtcagtgcctttggagaaagtccagagaggaggagcctgcacatctggacatagttggaaggggaagtgaacggtaaaaagctacggtaggtaaacaacagacagtgaagaatgtcaaatataagctacaggctaatctctgtggaagcactgggattccgaaggaaagcagcagcggacaccctcatctgtatacactaagctctctagaagacgctgggaataaaatgccttttaacgtccttggtgacaggactttttatgggagacacacaggtatccagccgtggaaacactggacttcaagaaactggtccctttcacatcattttgcgagggtctctcacgtgcttcagtggccattacagttcccctattccaccccatttctcagcaacttcctgaaagctcatttaaaaagggaatactgccttttttttctttaaataaaagccaggacagtgaatgaggctgaagagttgacttacacaacataaccggaacgacagcctgcatataagtctattattgaaaatcgacatttcccatttattatatattgagagcatgtgtcagacaatacaatggaagtggggtttctgattaatttaaaaaagaaaactacatcaaatatctgcaatagatcatttttttcatttaaggtttatatatcatatattgttatattaccatttttcacccatttaaaagaatggaaattgcagttctacagtagtactttatatagtcctacagtccaggaggtcaggatgtcagacgcagcccctggcagcggctgctgcttgggcagtcgatcggaatcgtgggatcttccggcccacctgcatccctccgccagggctgccgcgctccctgccacctaaatctgcatctgctccaggtatttgtaggtggggttctcatagccatggttctgcatcttgttcaggtgacgctcttctggggtgagcattggatcaacctccacgatcccgtggctgatggtgccatactgcctcttcctcagcatcaccaggctgatgacgatgaccgtggcaatggccactgcgatgaccagcaggccaatgagagcactgctactcagactgaagtcctcccgcagtgggcccacggattcccgctcttcctcgaggcctccaactctctcggcattgaaaatcatttccttaacatccagagtctcgtcaatgaccatgttttcatccactttattcttactgttaatcactttctcttcggcaccgatcagtcccccatcctgctctcccactccagatccttttttcattgggtggtacaactccggctgagtgtcttcgttctcaggtagggctgggaaggggtggaaggggtggaacggtgggatctcctcactctcctcagagctcacccggacgtccacaggggtctctgagattgaggcagtgaactggtccatatctgcacgctgctcctgaaggagctcatcaatttcctcttgaatttcttgggctacataaggtactttgtagagcagagagaggctttggttcctcctttcttcaatcacgtggagatgtgtcatcacctgggatttcatctgggccgccttttctgggtcaacagccaacacatgctggtaatgacggatggtatgtaagcgatctttgttctcagcacggacataacgccgtaaggcctggagaatgcgatgaggccgtggcgggtcagactgcaaggcagccaggtagttctccagagccatccgacggcggtcattcagcatagcttccactcgggccaggtgggtctccaccagctgctgcttctcactggctgcttccttctctaaagctttaaccatggcttggaagtgctgaatcagagtctgcctctctgctttggggaggttcttagcttgaagctctgcctcttcccattccttctttaccctgtccattcggttgcggtgccgaatctccagctgctccttagccttctggaagcgagcatgctcattatcatctgcagaggtctcgaaatacacatcaacatcattggttggcagaggagttggaggaatcatcgctttacacacagccatacaataatcctcagactcaaaattgttcctgttgccgccgcagccaccatatataaagcgcacgcactttcccttggagaggtcgaagtaccaacgaggcatcacggcccggcagggccccgtcatcgcctcctgggagcagacagctttgacatcatgagtaatttccttgtctgacatggtgccgtcgctgccgggttcagtaggattctcctcattgtagtcatctcctttgaaggtgtcatagtagtaatctcggtcctccaccacttcctccccttcttcctcatcctcatcatcctcatccacagctgcttctgtgaagtcttccagatctgcttcagtaggaaattcacttttataaacatcatagtcttcctcttcatcttcctcttcctcttcctcttcatcttcctcttcctcttcttttgacacagatccaataatctttgtctgagggcagcacacatattcagtgccatggaactggtctaccccacatgggagcagcatgccgtagctatataaggtcattccctgagtcagacatgcctctttgactaccgtgtgccagtgctggtgattctcacacacctccatccgctctttgtggaaaaactggcacttttctggaactagcagggacatcacttacaaattcacccacgagacacttgaaaaggtgtaacaaagcgactcttgcattgctttttgtccctccggcaccagttgtcaatactaacccgctggtttgcctccatcacatttgtgatctgtagctctggatacatctcctgacagtactgaagaacttcttcttttgtttcaaagcagctcttggtgcctgttggatcagggttcccatttcccagtctgaatgttcacatgcatatttaacttcccacaaaacattgcgatttgaggctcagcaacagcaaatcctgttccggcattggctgcaagagcctcgatgtagccggccagcgccaaggcaggcgccgtgagccccaccagcagcagaagcaggagcctgcccgtggctgcggcggccgcggtcccggtggccgccatccctcgccgggtcgctctagcgcgcggctctcaagctcacacactcggactcctcgcttagcacaccgcgac

SEQ ID NO: 45715 - DNA, 669 bp, Homo sapiens
ttttttttttttttttgtccgacatcttgacgaggctgcggtgtctgctgctattctccgagcttcgcaatgccgcctaaggacgacaagaagaagaaggacgctggaaagtcggccaagaaagacaaagacccagtgaacaaatccgggggcaaggccaaaaagaagaagtggtccaaaggcaaagttcggggacaagctcaataactttagtcttgtttgacaaagctacctatgataaactctgtaaggaagttcccaactataaacttataaccccagctgtggtctctgagagactgaagattcgaggctcccctggccagggcagcccttcaggagctccttagtaaagcatctcatcgtgctattctctccccctaggacttatcaaactggtttcaaagcacagagctcaagtaatttacaccagaaataccaagggtggagatgctccagctgctggtgaagatgcatgaataggtccaaccagctgtacatttggaaaaataaaacgtcgacgcggccgcgaattccagatctatgaatcgtagatactgaaaaaccccgcaagttcacttcaactgtgcatcgtgcaccatctcaatttctttcatttatacatcggtttgccttcttttatgtaactatactcctctaagtttcaat

SEQ ID NO: 45716 - DNA, 570 bp, Homo sapiens; identical to SEQ ID NO: 22108
  misc_feature (1)...(570): n = a,t,c or g

SEQ ID NO: 45717 - DNA, 3470 bp, Homo sapiens
cgcacctcaggatggcccgtactttggaaccactagcaaagaagatctttaaaggagttttggtagccgaacttgtaggcgtttttggagcatattttttgtttagcaagatgcacacaagccaagatttcaggcaaacaatgagcaagaaatatcccttcatcttggaagttttattacaaatccactgagaagtctggaatgtatggaatcagagagctagatcaaaaaacatggttgaacagcaaaaattagatgtaagtagaattttaatctataatttacattaataactcatttcctttgttttttagttttttgagtggttttaatcctcttctttttaaaatgtttctttttcttgatgatactttttgcatctctgttgtgtagccagtcatcacgttcagcctcccatctaagctgtttgagacttgcattatctttgttagccatggcattcatgccaatgttatcaaacttggatcccatattttcatccaatagatggccaaactcttcagcagatacaaataggctggaatcatttaagtttcttttcttttttcttggcccttgaaatgagccagcaaagtcaaaatcatctgtaccttttctcttgcttttcttagtactgactttggagtggacttcaagttctggaacgctctcactttcatcatctaacacatccatgaatgttcctccatcttcatcaacttcagcaaattcttcatcatccatacttcctaaagaaacttcatcgtcatccaggttaccaagttcatcatcactaccttctgaatcttcatctaatgtgttatccttagctccttttgttctctttttcacgtttccagcaaaatccatatcatcctttccagagctgaaacagttatcatcttcaaatgtgtcaatcagctcttcaaattcttcatcatccacgtcttctatactttcttcatctgcatcccgtttttgtttctctttaacagcaacttttttataatacctgtggaaaaacacttcatccactggtatttggctttcttcttttgcaaggaactccttactgttcacaggaagatgacgaatatccttaataaaatgttttcttttcggctgcatcacaacactatctgtgttttctttgcctttatggggctttggatttcggtatacaaatcgatccaaaaatctcattagagtgaaatcctgcagtgggtcccctgaatactgaatatagtttccctgaaggatggtctttgcaaaaagggccacggagggatgaaaatgcacagataactttttgagttcccaaagacttgtattttcagctccacagaacagagggtttctactgaatggatcgtatttatttaactgtttcccacctttcaaattatcaaagtgcacccaggaagcaacctctggttttttggtttctacatcagtttcaggaactgtttcctctgtctcaagttttttcactatctctgtttctttgtctgcatcagtgaatttttccatgtcttcatcatcatttgcatcaataaaattttcttcatcatcagactccggatgatcatctagttggcttcttaaacctggttttgctttaaggatctcagacacaagatataaagctccacatataaatggtggcatctgttgacaagtaacttgaagtaaccccttcacaaaagccttcacccggcgcaacacaatgtcagctttcagagatttgtagacaaggttaagaaacatagcttgcttggaacacgtcatcaaccctggatccaacatcttcctgtataatgctgtgtaatatcgatccgatattgtctgctgagaattcattacttggaaaagcaacattaaagcctggacactggtattaaaattcacaatatgcaacactttaaacagtgtgtcaatctgctcccttactttgtcatcaccagtctgggaataagggtatgccctattcacacctgttaaaagggcgctaagcatttttgattcaacatctttttttttgacacaagtccgaaaaaagcaaaagtaaacagttattaatttgttagccaattcactttcttcatgggacagagccatttgatttaaaaagcaaattgcataatattgagctttggagctgatatttgagcggaagagtagcctttctacttcaccagacacaactcctttcatattgggatgtttacaaagtaatgtctctaacagatgggatgcttttgtggcaattctgttctgaggatctcccagtttatttaccacttgcacaagaagagccttttcttcctcaggcttgttacaaagcagctcatgagccacggtaagggctcgagttttagtggttactaatgtatcatgacttaaagtttctaagacctgcacaaattcagccactaagtgtttcagctggtgttcaaaataccataatatcagtcttctatctcttgagtccttgttgccactggacaactgttccagtttgtcaaaaggacgctggctgaaaatcctcagcttccgattgtctggcaaaaggtctgtgataagcaactctttgaaagtatccaaggccataaggcactgctgtttgctgcccttctttttaacaaggttcacaagagtttctacaaactgaagtgtgtgaacggcatcatcctgaataagaagaatcatggctgccatcctgtcacctagtgtccccgatgacacaattgccttcatccaggtagaagaggctcccttttgactattcgtcttacttttgaataagttgatttcatgctgatacagcttctgagcaagggttttgtacttagatacaacatcctgaggctggggtttcaaagaatattcattgctgtactccagatcataccatttgcctccaggcctaagtaacaaagtctgtctctcaaaaaattcaaagatgttctgtttatctttctttactttcggtgtggtactgccattctcatcagaatgtggttctggcctattcttatttttcaccttattaactgatgtcctttgactttctgctgtatttttattatttattttaggtatttttacttcttttttgctggaattttctttttcagctggttcatcttcttcaattaaggaagcttttgtatacttcgccaaattaagattttgaataaatgcttccaattcaccttgctgaaggtcatcgattgctccttttttgcctccatctatcacttcctcattctcatccaaagtagccagcataaggtaatcttgcttggtgcctccgagccgtaacacttcctccagggagaacccattctcggcttcactagtattatcctcatcctcctcgtccggatcttctactgcctcctcggggcgccaaggccgcttggcatggaactccaaaggctccttgactgcggccatggcggcaaagc

SEQ ID NO: 45718 - DNA, 822 bp, Homo sapiens
tttttttttttttttttttcgcagcttaacagaatgactttaatgcttcttcaagttttccattttcttccacagggctttgtttcgaaaaataacaaaatgaggtaataagttaatgtatgtacacgttataaacactgtgtcagtttacgatggcagcaacggaagttgttacaaagaaagtgactgcggggtggctggagctcagccgcccccccattgagaagattcgtcgtcctgagaagtcgcgtgctggaggtggagtgtgtctagaagcatttgccggtggacgatggaagggccggcctcgtcgtactcctgcttggtgatccacatctgctggaaggtggacagcgaggccaggatggagccgccgatccacaccgagtatttgcgctccggcggggcgatgatcttgatcttcatggtgctgggtgccagcgcggtgatctctttctgcatgcggtcagcgatcccaggggtacatcgtggtgccccccgacatgacgttgttggcatacaggtccttcctgatgtcgatgtcacacttcatgatgctgttgtaggtggtctcgtgaatgcccgccgactccataccgatgaaggagggctggaagagcgtctccgggcagcggaagcgctcgttgccgatggtgatgacctgcccgtctggcagctcgtagctcttttccagggaggaggaggaggcgccgtcgccatctcgttctcgaagtccagggccacgtagcacagcttctccttgatgtcgcgcacgatctcgcgctcagctgtggtcacgaaggagtagccacgctcagtgag

SEQ ID NO: 45719 - DNA, 756 bp, Homo sapiens
  misc_feature (1)...(756): n = a,t,c or g
aaccattttttttttttttttttttttttaacaactggtcatcaatttattaaaatagttgacttaagcatctgcaatggtgacttccacctcaactcctggctcaatactgatggaagtaatctgcttaacaatctcagaaggactgtgcaagtcaatgagtcgcttgtgaattctcatctgggaaacgatcccacgtcttaagaaccttcaccacaaggagtttttccttgtagtgattctcaaaagtcttggtaggcattcgaactggtcctttcactttgagattcttttcttttgcgcctcttatcaaagtcagcacacaccttttccaaggattttacgttgcggcttgttagggtgattcgaattcggtgaattgccacctccggctccacggggtgtttttccggtatccttaaaaagcctattattagatacatgaaaaagaacaataagccaaaaatggtctgccacttctggagaaaggcagcttccggaagcttcccgcgtttccccaccatttcaggagcgcctttccgcccctacacgccccggcatctgccctcaggagcacgaactcgaanacgggtccccccggcgcccgagccctcgttgcgccgcccgccgccgactgccgcctcaccatggctgttgcgcgcgggcttcctgaccgacttgttcctcggcgagagcgaacagcggtgagtcaggagcaggagcgtgcggaccaaaaatcctcagcccttacgaccg

SEQ ID NO: 45720 - DNA, 2417 bp, Homo sapiens
gcacgaggtaaagcaaagagaaaggaagcaggcccgttggaagtggttgtgacaaccccagcaatgtggagaagcctggggcttgccctggctctctgtctcctcccatcgggaggaacagagagccaggaccaaagctccttatgtaagcaacccccagcctggagcataagagatcaagatccaatgctaaactccaatggttcagtgactgtggttgctcttcttcaagccagctgatacctgtgcatactgcaggcatctaaattagaagacctgcgagtaaaactgaagaaagaaggatattctaatatttcttatattgttgttaatcatcaaggaatctcttctcgattaaaatacacacatcttaagaataaggtttcagagcatattcctgtttatcaacaagaagaaaaccaaacagatgtctgggactcttttaaatggaagcaaagatgacttcctcatatatgatagatgtggccgtcttgtatatcatcttggtttgcctttttccttcctaactttcccatatgtagaagaagccattaagattgcttactgtgaaaagaaatgtggaaactgctctctcacgactctcaaagatgaagacttttgtaaaccgtgtatctttggctactgtggataaaacagttgaaactccatcgcctcattaccatcatgagcatcatcacaatcatgggacatcagcaccttggcagcagtgagctttcagagaatcagcaaccaggagcaccaaatgctcctactcatcctgctcctccaggccttcatcaccaccataagcacaagggtcagcataggcagggtcacccagagaaccgagatatgccagcaagtgaagatttacaagatttacaaaagaagctctgtcgaaagagatgtataaatcaattactctgtaaattgcccacagattcagagttggctcctaggagctgatgctgccattgtcgacatctgatatttgaaaaaacagggtctgcaatcacctgacagtgtaaagaaaacctcccatctttatgtagctgacagggacttcgggcagaggagaacataactgaatcttgtcagtgacgtttgcctccagctgcctgacaaataagtcagcagcttatacccacagaagccagtgccagttgacgctgaaagaatcaggcaaaaaagtgagaatgaccttcaaactaaatatttaaaataggacatactccccaatttagtctagacacaatttcatttccagcatttttataaactaccaaattagtgaaccaaaaatagaaattagatttgtgcaaacatggagaaatctactgaattggcttccagattttaaattttatgtcatagaaatattgactcaaaccatattttttatgatggagcaactgaaaggtgattgcagcttttggttaatatgtctttttttttctttttccagtgttctatttgctttaatgagaatagaaacgtaaactatgacctaggggtttctgttggataattagcagtttagaatggaggaagaacaacaaagacatgctttccatttttttctttacttatctctcaaaacaatattactttgtcttttcaatcttctacttttaactaataaaataagtggattttgtattttaagatccagaaatacttaacacgtgaatattttgctaaaaaagcatatataactattttaaatatccatttatcttttgtatatctaagactcatcctgatttttactatcacacatgaataaagcctttgtatctttctttctctaatgttgtatcatactcttctaaaacttgagtggctgtcttaaaagatataaggggaaagataatattgtctgtctctatattgcttagtaagtatttccatagtcaatgatggtttaataggtaaaccaaaccctataaacctgacctcctttatggttaatactatttaagcaagaatgcagtacagaattggatacagtacgggatttgtccaaataaattcaattctgtactgcattcttgcttaatagtattaaccataaaggaggtcaggtttatagggtttggtttacctattaaaccatcattgactatggaaatacttactaagcaatatagagacagacaatattatctttccccttatatcttttaagacagccactcaagttttagaagagtatgatacaaaggctttattcatgtgtgatagtaaaaatcaggatgagtcttagatatacaaaagataaatggatatttaaaatagttatatatgcttttttagcaaaatattcacgtgttaagtatttctggatcttaaaatacaaaatccacttattttattagttaaaagtagaagattgaaaagacaaagtaatgtcgacg

SEQ ID NO: 45721 - DNA, 4212 bp, Homo sapiens
  misc_feature (1)...(4212): n = a,t,c or g
gtcgacaccacccaaaatagtgccgagcctcttggggggggaggggctgggagtgggggccctgagtgagagcaacgagggtgtgaccagcgccgcccggacccctagtcccctcccccgcacactcttcagctgtcgcagggggcctgagaggacagctgagggtcctggctgggaacgagctggggagggggagctggtggtgcctggggcatgaagaggcctcgctgagaccctcacaaacggtttgcacgtttccacacctcattttctcctcttcggtggcaggcactgtgcacccaattcctaaagcactcctggatttaatgttctgagagccacatagaacgaaagatgcaagaaatctgtttgctcttttttcagggggtggggtctttctgcccagatgtgggatcctctcctaaacccaggtcaacccagggcacgaggcagatggctggtgctgacatgttgaccatcactgctctcttccaaggactcacaaagagttaatgtccctggggctcagcctaggaagattccagtccctgcccaggcccaagatagttgctggcctgattcccctggcattcaggactggaaaggaggaggaggggcacactacgccggctcccatcctccccccaccccgcgtgcctgcttgggattcctgactctgtaccagcttcagagaacaggggtgggggtgggtgccattgggtgtggacagaaagctagtgaaacaagaccatgacaagtcactggccggctcagacgtgtttgtgtctctcttttcttagctcagtgagtactgggtatgtgtcacattgccaaatcccggatcacaagtctccatgaactgctggtgagctaggataataaaacccctgacatcaccattccagaagcttcacaagactgcatatataaggggctggctgtagctgcagctgaaggagctgaccagccagctgacccctcacactcacctaggccaccatgggacatcgccatccaccacccctggatccgccgccccttctttcctttccactcccccagccgcctctttgaccagttcttcggagagcacctgttggagtctgatcttttcccgacgtctacttccctgagtcccttctaccttcgggccacccctccttcctgcgggcacccagctggtttgacactggactctcagaggtgagtctccccacagctaggacgggagagtccttactggaacctcctggaaacttctccatccattttcctttcctaccctgcctaaaccatttttggganatgtgtgtccaaatgtgaagaaaaatgaggaggttgctagtgccttcatcccccatcacctgtttctatttgatagtcctctgtatcccatttattacattttttcatgcactgtcaagtttatcctccgtcccctaacttctctacaggatacccctttctggtttggttcatgacaatctgcagggaaagagctgccttcaaactcctttgcttatctcttccaacaccttggactcttgaccgattttaccatctcaggtttcagagccaggagagagccctgcctcatcctgagctgttcatccccatgggtattttctgcctttctattccctcttctatgattttctgggtttctcagggctacgacagggcgctggcctgggtccaatcaagccctacgaggaaacaatatagggacgcccatttgtcctaagagggtggaagaacagggtgaacaaataaggttgacagagctgtcacagataacactctggtttaaaaatattcaagtgtgagtaaacaggagctgagtgggcaagggctttggaaggacaagcaggaccagcagaacattccagattgggtgggtggaaaactggcaaagagacctgagccagaagaagaggcctttgtctcacagacaaaccacaaagccaggcattggagtcagagaggcagcagatgccaggcttgcacccatccttgcgactggtcccctgggtgatctgtcttcttctctgtccctgtaaataaagtttgggtctgatcaccatgagccttaggtatcactgtggtggctccctgaagcagacagctatgtttatttaaaaaggagattttttaagcagagaagagaaggatgaattacccggacagaaagcagctctgcagaataagacagcacctgtgtaatcagtatttttgccctctttctcccatcccattcccttaccttgctatttctagatgcgcctggagaaggacaggttctctgtcaacctggatgtgaagcacttctccccagaggaactcaaagttaaggtgttgggagatgtgattgaggtgcatggaaaacatgaagagcgccaggtatgtagcttgtttttttgttttctgctcattcattcagtgatactgtaatagtccaggtagtgctatcagctttggaggctggctacattccagtcccaagccataacagtcgggatcaggggttacaaatcaatgtctagaagactaagttaggatagacatattgctgttgttactattatggccagagatgtggcctttgatttgatcgccttagatgggatgatgggatgctgatgccccatttaagccagtggttctgaatctgggccacattagaatcaccaggggaactttcaaaaacctaatgctcgggcatcctccagaccaattagcatatgtgctgccgaagcgagcactactnnnnnnnnnnnnnnnnnnnnnnnnnnnnnnnnnnnnnnnnnnnnnnnnnnnnnnnnnggtaattctaatctacagtcaaggttgagaaccactgattaggtatagggctgtcagacacctagttgctttgcataattacattaactacaggtaccctaaaagcacttgagttgtgacttctcttttagctgtgcaagaatccgtgtctcttctttagcccatcttaatgctgaactacttggtttgtctaaatttcagagctgtgctcagtctttaatcccctacagcccatgtggtaatcagttaacgagagcctgtttggctacatgcttgagagtcagcaggcatacgggttaaggtcatctactctttgggggagttctgacaaatggaacagcttgttatgactttataagagggctttaaaattgcttctcaccatttaacgatagctcagaacctgtgcgtcaaccagtacagtttgtcctcagtaatgtcctcaggctgtttcaattttgcttatatgatttaggtttgggtcatagtctccttggatggagtcatttttttttttttttaatttcagcagcagtcctattgttctggaaccttctgggacattcctgaagagtcaggacaatttcagggcttcctcagggactcagattctaaatgagattccaaattctgtaggcccagccaacattgatctaaacctttgggaaatacccctaaacatatctatgcctcagggtttgaaaaacaatgaagtgttggactgtttcagacttctcagattctcactggtaggagtgactacctaggcaatttcatcttagctgcaaccctgaaacgaagctctatttatttttcctatgttgtcatggcatttggtctcacctaaggggaaatcaggatgcctggagttctgggcaggtgataatagttcctgttcttatctctctgcctctttcctcattcttttgggttaggatgaacatggtttcatctccagggagttccacaggaaataccggatcccagctgatgtagacccctctcaccattacttcatccctgtcatctgatggggtcctcactgtgaatggaccaaggaaacaggtctctggccctgagcgcaccattcccatcacccgtgaagagaagcctgctgtcaccgcagcccccaagaaatagatgccctttcttgaattgcattttttaaaacaagaaagtttccccaccagtgaatgaaagtcttgtgactagtgctgaagcttattaatgctaagggcaggcccaaattatcaagctaataaaatatcattcagcaacagataactgtcttgtgtttgaatattccacacacttttaaataaatatacagataccacagatctatttatgattgcattatgatttagagggctccaaggattttagagt

SEQ ID NO: 45722 - DNA, 210 bp, Homo sapiens
gagccggtgaaggggcagaacaggcagttggaaacaacaaatggcttttgagtccaagagtgatgcaatcacagtgacgcattaaaacggttactccggagacatcagagcactgtggctggaggctgggagcctggccaggaagctgtcgccattgtccaggtgaaaggtgctaaggacctgcttggtggcagtggggacagaaagaag

SEQ ID NO: 45723 - DNA, 4339 bp, Homo sapiens
ggcccgccgccgccatggcagcccctcagcccccgcccgccggcccaacgccgcgcttgacgacagccgcaaagcaccgcgttaccggccgagagagtggcgcgcagccccgggacgcgtaagagccgctgccggctcctttttctctctcccactagggctgcccttccgacgctaaaaaagcagtggagctagggtgaaagccgccctcacgctcacttccggcaggcgcgcctcccgacagtgtcgtgcggggggcgtggcccggcattgctgacaggcggccccgggggcggtggccaaggcggcgaccggagcgcgatggcgggggcggcgggactcacggcagaagtgagctggaaggtcttggagcgaagagctcggaccaagcgctcaggctcagtttatgaacctcttaaaagcattaatcttccaagacctgataatgaaactctctgggataagttggaccattattacagaattgtcaagtcaacattgctgctgtatcaaagtccaactaccggtctctttcccactaaaacatgcggtggtgaccagaaggccaagatccaggacagcctatactgcgctgctggggcctgggctttggctcttgcatacaggcgaattgatgatgacaagggaaggacccatgagctggagcactcagctataaaatgcatgagaggaattctctactgctatatgcgtcaggccgataaggtccagcagtttaagcaggatccacgcccaacaacatgtcttcactctgttttcaatgtgcatacaggagatgagttgctttcctatgaggaatatggtcatcttcagataaatgcagtgtcactttatctcctttaccttgtggaaatgatttcctcaggactccagattatctacaacactgatgaggtctcttttattcaaaaccttgtattttgtgtggaaagagtttaccgtgtgcctgactttggtgtctgggaaagaggaagcaaatataataatggcagcacagagctacattcgagctcggttggtttagcaaaagcagctctagaagcaattaatggattcaacctttttggcaaccagggctgttcgtggtcagttatatttgtggatctcgatgctcacaatcgcaacaggcaaactttgtgctcgctgttacccagagaatcaagatcacataatacagatgctgccctgctcccctgcatcagttatcctgcatttgccctggatgatgaagttctttttagccagacacttgataaagtggttagaaaattaaaaggaaaatatggatttaaacgtttcttgagagatgggtatagaacatcattggaagatcccaacagatgctactacaagccagctgaaattaagctatttgatggcattgaatgtgaatttcccatatttttcctttatatgatgattgatggagtttttagaggcaatcctaagcaagtacaggaatatcaggatcttttgactccagtacttcatcataccacagaaggatatcctgttgtaccaaagtactattatgtgccagctgactttgtagaatatgaaaaaaataaccctggtagtcaaaaacgatttcctagcaactgtggccgtgatggaaaactgtttctttggggacaagcactttatatcatcgcaaaactcctggctgatgaacttattagtcctaaagacattgatcctgtccagcgctatgtcccactaaaggatcaacgtaacgtgagcatgaggttttccaatcagggcccactggaaaatgacttggtagttcatgtggcacttatagcagaaagccaaagacttcaagtttttctgaacacatatggtattcaaactcaaactcctcaacaagtagaacccattcagatatggcctcagcaggagcttgtgaaagcttatttgcagctgggtatcaatgaaaagttaggactctctggaaggccagacaggcccattggctgcctcgggacatcaaagatttatcgcattctaggaaagactgtggtttgttacccgattattttcgacctaagtgatttctacatgtctcaggatgttttcctgctgatagatgacataaagaatgcgctgcagttcattaaacaatattggaaaatgcatggacgtccacttttccttgttctcatccgggaagacaatataagaggtagccggttcaaccccatattagatatgctggcagcccttaaaaaaggaataattggaggagtcaaagttcatgtggatcgtctacagacactaatatctggagctgtggtagaacaacttgatttcctacgaatcagtgacacagaagagcttccagaatttaagagttttgaggaactagaacctcccaaacattcaaaagtcaaacggcaaagcagcacccctagtgctcctgaactgggacagcagccggatgtcaacattagtgaatggaaggacaaacccacccacgaaattcttcaaaaactgaatgattgcagttgtctggctagccaagccatcctgctgggtatactgctcaaaagagaaggccccaacttcatcacaaaggaaggtaccgtttctgatcacattgagagagtctatagaagagctggcagccaaaaactttggtcggttgtacgccgtgcagcaagtcttttaagtaaagtagtggacagcctgggccccatccattactaatgttttagtgcagggcaaacaggtaactctgggtgcctttgggcatgaagaagaagttatctctaatcctttgtctccaagagtgattcaaaacatcatctattataagtgtaacacccatgatgagagggaagcggtcattcagcaagaactggtcatccatattggctggatcatctccaataaccctgagttattcagtggcatgctgaaaatacgaatcgggtggatcatccatgccatggagtatgaacttcagatccgtggcggagacaagccagccttggacttgtatcagctgtcacctagtgaagttaaacagcttctgctggatattctgcagcctcaacagaatggaagatgttggctgaacaggcgtcagatcgatgggtctttgaatagaactcccaccgggttctatgaccgagtgtggcagattctggagcgcacgcccaatgggatcattgttgctgggaagcatttgcctcagcaaccaaccctgtcagatatgaccatgtatgagatgaatttctctctccttgttgaagacacgttgggaaatattgaccagccacagtacagacagatcgttgtagagttacttatggttgtatccattgtactggaaagaaaccccgagctagaatttcaagacaaagtagatctagacagactggtcaaagaagcatttaatgaatttcaaaaagatcagagtcggctaaagggaaattggaaaaacaagatgacatgacttccttttacaacactcctcccctggggaaaaagaggaacatgcagctatttgacaaaggcggtgatgaatctgctgctggaaggagaagtcaagccaaacaatgatgacccgtgtctgattagctagtggggaaggtgtaggaagctctgttgagacacatgttctgaagtgtgttgtgtttcatgttcaagcttaatcaaggcagccattaatatacgaactgagcatgctggggaggtgaatgccacatccttggcggggttatggacctcttgcatgtcatagccaatctaacggtaatggtaaatgcttttaatcaagcaggaaaaagttctcatgattatgccaactataatagtaatcctcactgagtgataaaaatagtttatgaattgaaaatttgccgctgcatgttgtatgatcaaatagttcatcaaaatgaatctttgctctttggactgaattcttaccatactgccattaaaataaatttgccaactagtaatgcatactggaaatcaaaagatactgaaagaatggtgaacttctcttagtggtattgtcatgctaaaagatgttaatatacatcataaaagcaaagtcagccagctgatattttggttctcaaaaactgcattattaataatattttagtatacagagctattctacagtttttacattgtaaacatgactgtggttttgtatttgctaaatataggggttggactaaaatataataaatctgtaccttatcaaacattttctttgagctcctgctaaaaataggacatgtctatgattgttcaaaaatatgttaaatttaggctcagcacagtagctcacacctgaaatctt

SEQ ID NO: 45724 - DNA, 698 bp, Homo sapiens
gaagttaatcctgcctatctgcctctcctaaccttggtcttgttttctggcaggcagaggtggaggagacactgaagcgactgcagagccagaagggagtgcagggaatcatcgtcgtgaacacagaaggcattcccatcaagagcaccatggacaaccccaccaccacccagtatgccagcctcatgcacagcttcatcctgaaggcacggagcaccgtgcgtgacatcgacccccagaacgatctcaccttccttcgaattcgctccaaagaaaaatgaaattatggttgcaccagataaagactatttcctgaattgtgattcaagaatccaaccgaataaggccactctcttgggctccctgtgtcattccttaatttaatgccccccaagaatgttaatgtcaatcatgtcagtggactagcacatggcagtcgcttggaaccccactcacaccaatccagtgaccgtgtgtgggctggcggctcttctcccccaccaacggaacccctgtgtgcaccaaccttccccagagctccggagcgccctctcctcacttccaggttttggagcaagagcttgcaggaagcccgcacccagcttccttctgaccttcagttcactttgtcgcccttggagaaagctgtttttctttaactaaaaataaccaaaatgcttaaaaaaaaaaaaaaaaaa

SEQ ID NO: 45725 - DNA, 749 bp, Homo sapiens
gagccgagaaggcgccaccgcaccccagcccgggagacggaatctcactctgtcagtcacaacaacaacaaaaaaatagagcacagctatgttttgagttcttaagcaagggcaagcttaccaggcacttacagagaaggttgacgaggatgacagggaactaattgggggagggatgccatggttgaaaacatggctggggcagcgagaagttaagatgaagtcccaagagtcgcaagaacatgcagttccaggacgtgattctctgcagggacaaagagagacagcagctacaagtctataggcagtgacaaaggatctgagatcccatcagagtagacttcaagttggagaaaccttttattggcacaggcattccttgttaacttgacagggtgaagctgtaatttttcaaaaacagtaaaagctggtttctccctaaactattttccttgtggtagtagagatcagtgggtcagaaacaactcctgaccacttggtttcccttttgagccgcgtcattaggaggcaatctgtaaaactagcacaggtctcccgctgttccactggctcacccacatgattagcagagtgcacgaaaaaataaaacttctattaaagaatcatgctgagcacaacatcagagaggttgtgacattgcaaactcgatagatgcagggggcctgggagactggcgttctccaaagggctcccaacaccatctctcctctgatttctgtgacaaatgt

SEQ ID NO: 45726 - DNA, 365 bp, Homo sapiens
  misc_feature (1)...(365): n = a,t,c or g
cggacgcgtgggctgaccagcaccatggcggttggcaagaacaagcgccttacgaaaggcggcaaaaagggagccaagaagaaagtgtaagtcgcgactgtcgtggcgtcttgctttttgggggtctgctggaatcggcgggctggtcctagatcgcggcgtaggccggatggcgaggattccagtcggattgtgcgggccgtggcgggttggtgcacccaggaacgcggcctggaggggttgatccattttctaagaaagattggtatgattgaaagccctgctatgntcantntnnnaantattgnanngacctngnnnccangacccanggaaccnnaattgntntgatggnctnangggtc

SEQ ID NO: 45727 - DNA, 5197 bp, Homo sapiens
  misc_feature (1)...(5197): n = a,t,c or g
ttcacaaatagcactttttatttgccactatttgaagtctgaactttaaacagattcttggactggtggttcatatccatcagctcgttcaactttagcacctgtctcgtccccagtggcttttccagaactactgccttcaccatgaagctccatgagctttcccaattcaaacttgggcttcttcagcatttttacttttctaacgaagacatcatggagaggataaatagattggcaagccttttctatgtcttttccaatgctgtctggaatcctgcaaaccagtaacagtaaatttttttctaaaagtcctagttctcagatataagataagccattttctttaaaaagtagagaagccttggaataaacctacacataacacctacctcatttaacctgcataaatcctcctgttaagataagccattatttacctttcacatgtaaaggatagatgatctgaattacatagctagctagtggcaaagttagtagagtcttctgagtccaagccttatgctttttccattacaccctcttagctaactgtatattgcatgggaacatcagaaaaatgttgttatcactggccatcatctgggaccgaaacttttttcatcacttattcccgtgcatcattaatcatgaaaggttttgtctattcagtgtattttttctttgtgtgtgtatatatatatacgtatannnnnnnnnnnnnnnnnnnnnnnnnnnnnnnnnnnnnnnnnnnnnnnnnnnnnnnnnnnnnnnnnnnnnnnnnnnnnnnnnnnnnnnnnnnnnnnnnnnnnnnnnnnnnnnnnnnnnnnnnnnnnnnnnnnnncagtgtattttccaactaggggaaaaacatttcctgtccttcaactccatctactgtgagacagcttcattcaaaataaataaacacgaaaaaactgttatcatttacagagtactggcagatcacctgaagtcaggagttcaagaccagcctggccaacatgatgaaaccccatctctactaaaaatttaaaaaaattagctgggtatggtggcagtcccctgtattcccagatactcaggaggctgaggctcaagaactgcttgaacccaggaagcagtggttacagtgagccaaggaggatcacaatactgcactcgagcctgggcaacagagcaagactctgactcaaataataatagtaataataatcatatttactgagtacttaacactctttcacttaaaaagatatagctagaaggattcacagacaggatttccacagacctttaccttgtctcatatgcgttctctcatctcaggaataatccaatactcaaggttgtgttgtgtgaggaagcaaagaaacacttacaatttattgaccacttctttcaagtcatttgtctgcacctctcgggtcatgatttcccatcatcttcttccggatttggcgggacctgttgggtgctgagcataagaggtcttcccgtatctggattgttgcggttttttagtaaaacccaacacagaacagacgaagcaagtaaccatcggtaagtcttgacattcaacgtgagcttcaatcattgtctggagaaaaaagataccgtcagatttaacaggttttacgttatccatttatccctcaagttctaattttaaaaagctggattgtcaaacactcattattaaatataaagtatcctaacataagtaacatctctttaagtttacagaattaacttccttgaacttaccaagttacccccaaattcttacccaattaaataaccaggtcctctcaactgccctccctcctcctttctaccctccattaacactaccactatcttgacggcatccaaacccacatccattgcatatacatatacccctttaaacagctcataccccctcaagtgtaaaactacaccagaggaaaataggtctgagaggatccatggtattctatggtatgaacatctacagtgattatgtcatttttcaaaaaactgtgttgtaaataggtgactgctataactctaaatgcacactttgaaagacgtcttttatgttccaaactaaagccatgctgatgattaaatacccaatttcagagctaaaatataattaaaaacccctagttagtggtcatattattgcctaaattgaaaaaacaaaaaacatcttgggtagtgatgaaaactgatttaccttgtttgcattttgtaaattttataccttagtataaaaaaaaactaatcaaatacaatttacagctaagggaccttaaaatatttctagaaatgtaaaccataaagccttagaggaatgtcaggataaatataatggtataatcagtatgtatcatttgggactgaaacattttgtcatcattcattcccacatacaaaatattcgaactnnnnnnnnnnnnnnnnnnnnnnnnnnnnnnnnnnnnnnnnnnnnnnnnnnnnnnnnnnnnnnnnnnnnnnnnnnnnnnnnnnnnnnnnnnnnnnnnnnnnnnnnnnnnnnnnnnnnnnnnnnnnnnnnnnnnnnnnnnnnnnnnnnnnnnnnnnnnnnnnnnnnnnnnnnnnnnnnnnnnnnnnnnnnnnnnnnnnnnnnnnnnnnnnnnnnnnnnnnnnnnnnnnnnnnnnnnnnnnnnnnnnnnnnnnnnnnnnnnnnnnnnnnnnactcaatctccaaaaacaaaaaactcccacaaaatattccaactggatagttagccagacacatctgaaatattttcatttcatcctcacaattcaataaaatgacactcttatctgcactttacaaataaagaaaccgaggcttagaaaacaagttactttccaacgagaacacaataggcaaatggagcccagattttaacctcactccagagctctgccacaattatgctctactgccacagttaatcaacattcactcaattctgaggtcaaaaaacatccttaagacaggcaaaaccgcccacctgcacctgcacctaaacgttcctcaaaaaaccactaatctatgcagcaagaaaatctgactttgatgatacaccactattaaatcttagatttaaatagtaagtaaaatatggtgtggcaaccccagagttagcactcaacaacggcaagaaaacaaaaatttaaaatgaactttgtggacatttcactggtctcaataaataaataaaatgaacttgctccttccgatcatcaaaccatgctatccttggtcaaacacccatagctcaaccactctaaggaactttgggtctcacctgccattttttgaccatggaacacattttgtcacgggtaagatccatgccatggaagttagtcaggcagtttttaccctgaacatcttcagtaatcagcttgaattttctaaatgcaacttcatcattctgcaaatcagcaagactcacttcaaacacacgacccttgagaccatcagatgcaatttctacaaaagaaaaaaacaagtatcttaacatttaggaaccatataagcaaagtcaagcctgtaaactgagggtagaaattaagttaatggtaaattataaagaccttaacctttgttatcaaatctatccagacaccagtgacttatcaacagtacttatttgaagctcagaactacccatggcacattttcttaattcaaaaagcaccatcttgcttctctccaagtgctgtactaaaaatgatacccacaggtcgcaaggctgcaaccaagagctgacatttccttaaagtctcccaccacaggaccaacaacagaccaagatgcctgctacaatatacaagcgccaacttaaggaaaatacaaaccaagaataagctacttactggttccttgggtcctggtgacgagcgtctttccaatatttcttatattgaacatagcaggtgctttcacatcataccaatctttcttagaaaatggatcaaccctggattttaagaagatgcttaagttccattgcagatcaattcttactgtatttttcactgttaatggtatttcccattaatattttaaaaagctaaccggcaatttgataccaaagtatatctcacagtgaggtgaggggaacaaacataaatctagctcttcccactgtacgtttcactgcatgcatcagactttgaaaggttatgtccacttcccaccctcatcggtccatccactacacaggcacttagaataacatgcatcggtccttccactacacaggcacgagtaacatgcaatctcattaactttgctggcacgtaatggcatgtactggtaactaagagactgcatggccccaaagcttagcaggagctcgcagattccagcgggaccaagcaaaggcgagattgacgggtcctgaatggatagaagggtgctttcctcaactcctgctgtcgcagtgccatcaaacactcgcagaattgaggcagctcgtgagcccacaaaactaacattccagccgagtcgcgccggcaagccgtcaaacgcgacgcgcaaggaccagaaggcctgggaaaggcagccgacctgccgctactcaacaccgaccctccaggccgcgttcctgggtgcaccaacccgccacggcccgcacaatccgactggaatcctccgcatgcctacgccgcgatctaggaccagcccgccgattccagcagacccccaaaaagcaagacgccacgacagtcgcgacttacactttcttcttggctccctttttgccgcctttcgtaaggcgcttgttcttgccaaccgccatggtgctggtcagagagccaaaagggcggaagtgggagtcgcgcgagaacttaggcgtacgggggcggggcgcgccgtctacgtgacctttgccctgttattcttccggcctcaagaattccgggacagtagagagcgccactctttctactgtggttgcgacatcgccatcgtgtgtggggaggccgcgcggcatgccgcgggctcactggagcgtgcgctgtgtagaccaaggcgtcggtggcctgacgtgcaggcgtctggttacctgtggtttctgtggctgtgacgtcgggaagtaagtttctgtaaaacgagacgcccactcaacatcgttcaaagctgaactcaccgtctaacccccaaaccttgctttttgagagcatt

SEQ ID NO: 45728 - DNA, 6667 bp, Homo sapiens
  misc_feature (1)...(6667): n = a,t,c or g
ctgacaggttgcccacctcccccaacgccaccccgcttcgcagtagacggacagaggagtcgtagcggtcgaggcttttgcggctccggcgtgccgaaagtgcgtatgttatgcataaaagtggataatttacatgataaatgaaaatggccaattctttaagaggagaagtactaaaactttataaaaatctgctgtatcttggacgagactatccaaaaggagcagactattttaaaaagcgtttgaagaacattttccttaaaaacaaagatgtgaagaatccagagaagatcaaagaacttattgcacagggcgaatttgtaatgaaagagctagaagctttgtacttccttagggaaatacagagctatggaaacaacgctattattcagataccaacaaaactaattgatcattactactttaatttagctatcagtgccagctgtttatgtataccagatgttgtaaataattctaacttaaatgggaagatatcatgttgtgtaaaaaatccctgagctgccctactgaactaaataggtttcaacttctgttcatacggagaaagtatcagcaactttatgctcaattttgatacaaacatagcaatttagctatactaccgatcataaattaatgagcacccaattttgaatgaaaatataatacacttaatcctctaacttaataggacttagccaattatttttagcttatttctccattttactgacaagagaatgccatttaccgaacatttaataagcaaaataatttcttacacacttacttctcttaacttttgaaaggaatcccttattttttcacccaatttggtatattaacagcacatactcaaggttcactacaaaacaaacagttcctggtaatgatttaaatgtagttatagaaataaataatatgtatggagtcattacttctgaccttgaaatagcctgctggtgactggcattaacatacataactaactattcaattatttccattattaatgttgctgctgctacctttgggcctaaaaccaagtcacctgttgtgtatcaattaccttctttgataaaaggaaataaataaataatgttatcctatttttttgtcataaaggcagatttgttttgcatctacttctaaatatggaaaattgtttaagcaaacacgcctttacataatatccacagcaccttttagaaaataaaaggatacttctaacaagctgcataaaagattcactggtatactatagtgtctatggcttataaagtatccatatccatttcggggcaaacagttcaaatttgcatgaataaatacacactcatagtcactgtaactatttttattacattacaataattaggagtagtacagttcatgacaaaaatattacaaattttagatcacttcacagcacatactcctataaacatttaaaagttaatttcaattaaaagagtggtcatttttaatgtttgatatgaccaacattcctaggtcagcgcaaccaaatgatggaaaacaactggatcacactgcatatgtcccacaaaagaaagcacaatgtacaaaatgtgcatgtttcagtttacactatacaaaaatagttaaaatacattccaggtaaacatgttacattaagaaatagtactagtaagaaattggcactcaaaggaaaaatgcaaaagtattttcaacatgaaaacacaagacagtggaattggaaactttcggataaaacactgtaacccagttagctctgtgggggtgtggggggagagatgggccctcaacatttctgcagataacttttttttcccctaaattcatctaaattacctatcattatcccaaacaggcacttcaaactattaaactaaaacacagatcttaatctagttatgactattcttcaagaactcatgtgagtatctttctttagaaagaaagtttcattttatgacagctattcaggttcctcaatgcagaattcatgcctatcccagtattaacacagaagttactaaatataaattcagctttaaggtaactgctgggttcctaaaaaacattacctacacaattatccaagaaatcattactttttgacaaatggaaatccttcagatagtttttgctgtctaaaaaaaaatcccctaaaaaaagttatatactgtttgaagaaaaaatgtttagaagaaaaaaaaaatcaatggaatacaaatgagatgaacttgtgcaaactgtaacttaacatgccccacaaagtttctatgtatatattaggacaaaattgtgcaatggtgacaacagttttgataacctataaaagttaggttcctaaattccctatgcagtgtgactcagttaaatagagcctagaatgcctacttgggaacattcactcaaatgatacaatatacgtctgctatattcttccacaaacatgttaatgcctaagtctatgtaatttagctttttttaaaaaaacttcaacaaggatttttgtctttaaggctgtaataattaggtaacatttatttctagaattctccccctttaaaatctctacaaaaacaaatcttttgttaaaccattcaaagttcacataaaggtaattaaccactaccttaaaaaaatgcccatctacatcaaaaattcaagaggcctaaatatcccctcataagcactgcagttcctgaagtatggccatttctttctctgtgtagaaacgaggtactgtgtcaagtcttaacaccctacctaaacagtgttccaaagatctgtagtttcacatagcaattcagaaatcatagtgatttttacatagaagtttcccttgtctgtgaactagttcaggcactgtttatttgtacccagataaaactattaatttttaagtatattttaattacttatgcagagaaaactggaatattacacatttgggtcaatatgaatatctgacatacaccttaatgtgtacagtaattgtcccaaaagaatcacagttatgccaaataaaaaaacaatataatcaagtttattcctttaaaacaatgaagtgatttacataaagtagcttgatcgaagagtttcagtggaatcgtagcaaaacaattatagagctggcacagagaccaaaccccttctttgcaaaactaaaatacgcatcgtgttatctctgggtcgtataccaaaggccttagtaagatattacagaccacactagcactacctaaggaccgggattatgtctcttgtttggggataccatatacccagtgccttgtgcggtgactggcatctggtaggcactcaataaatatttgctgaataaatgagttctgcaaaacaggnnnnnnnnnnnnnnnnnnnnnnnnnnnnnnnnnnnnnnnnnnnnnnnnnnnnnnnnnnnnnnnnnnnnnnnnnnnnnnnnnnnnnnnnnnnnnnnnnnnnnnnnnnnnnnnnnnnnnnnnnnnnnnnnnnnnnnnnnnnnnnnnnnnnnnnnnnnnnnnnnnnnnnnnnnnnnnatggnnnnnnnnnnnnnnnnnnnnnnnnnnnnnnnnnnnnnnnnnnnnnnnnnnnnnnnnnnnnnnnnnnnnnnnnnnnnnnnnngtaagcttcatgaattaaagtatttttcattgcatgaagatttctggttactaaaacaatggaatgtattactgttaccaggagtagtcctagttatagattacctaaggaattctttcagcactatctttattaaattctccttccactggatagggttctgtctattcataccaggtttgaaaaatcctactgtcgctaatggattgggcagcaaagagatgttcaaagcatcagccaccacctgaaaattagtgattaggtcaaatccctttatggtatctgtcagattctcttgagccctgaggaaataagatgtagggcatttctgatgtgactcagtgggaaaacttcatggagatatccacagcagcagtaaatcttatggttaggggaattacaagtattaaaactgcatcaagtcatggggcatgtggaaggtagggaggcaagatgacactaatatggaagaagagtcctaaaacgagaatggatattcaaatataaacttcacctcttgcacaattttgcccaagactggcactgaagatggtgtaacataggttaaaaatttacagattgtgctgagcttgacaaataagtgtatccttatgtaaatggaatataaatcacatagtgtaaaaaaaaaaaactaagagtttgagatgacttcttttaacatgaagaaatggatagtaagtgatgtcctcaaaatcagagtcctaaaagacacctatctagaacctaagtcaccaacaacctagtccagtgatactttcacctcaccatgccatctcacttcatttattttaaaataagtaacattttaaatttatcaaaaggattgtttttatttttattttaaagcattattaaatatggatcagacttgaaaagtgtttatgcaatgttaatttaaccagtgttaagagaactagccaaacctagagattgtaaaactttttcacttcattgtttaaaaaaaaaattaatgtcttggcacaccaccaccccaaaatctcaacttttgagttaatatttaaaagtaatttttaaaaaagagtttgttttcttaagaaacaaaagcaatgctcttgatttgtcagcaggaccaccacagagtgagattgtatcttgttgagctatccaaactgccctagtccctccccattttgactaaccaatgcatgacaacactggatgaccgtggggacacagtccatgctgtgaaactctctatgaaagctcaaaggttcacacagggcctggccttgcaaccttggtctcttcaacacctaataagctataactggcccaaataatcttttaatgtcacaagcagaattaaaactatcttcaaagactcaagttgaagaaaagatttaaagttatactatgaaagagcagtctgacacagggagactacatttaattcctatgagaatttttttatacttgttaaaatcttttcaattattataaaaatttagtagcatgtaaatatagccccaaaatggttgctataataatccccatttcatactgggtctgccttaacaggaaaaagctattaggagtctttatagtaatttatctaatgtgaaaaggaaatggccttataatagtttccattgccttgtaatttttttccatttttttctttttatagaaaaaatataatattttggggagagtgaccatgactaatagcagtggaaaggagacaaaacctttgtgaacagtgtaactttacattcatcagggatgacaaactataggacatgatgcctagaagaatcatcatcaggaagcccataaatttgtgttccctcaatgtttcagtaaaaaccaattagaaggtctcaactgaaattagtaattaatccatttatgtgactagataaaacacagaatagggatgattcaaaagcttcattaatttgtttcacaccaacattcacaattggtaagaaaaataagaagtaatcaactgcatgcaccaaaaaccccaagacagaaatcttaggtattcagtttctttttcacaggcattgctagttcaaaaaccaaaactctgggaatactggcacttcgaggaaaaaaaaacttccactgtcattttaaaataagcatttaaggtaaaagctaacagtctgcatggagcaggaaaaaaattaggtaatgctaaaacaaatgctaataatttagtgtaatgtacaaaaattaccacttgtactagtatgccttaagaaaaaagtacaaattgtatttacataattacacactttgtctttgacttctttttcttctttttaccatctttgctcatcttttctttatgttttcgaatttctcgaactaatgtatagaaggcatcatcaacaccctgtcttgtctttgctgatgtttcaataaaaggaattccataacttcttgctaagtcctgagcctgttttgtgtctactgttctagaaggcaaatcacatttatttcctactaggaccataggtacatcttcagagtccttaactcttttaatttgttctctataatggtgaatatcttcaaatgatttagtattatttatggcaaatacacaaagaaagccctccccagtcctcatgtactggtccctcattgcactgtactcctcttgacctgctgtgtcgagaatatccaagagacaggtttctccatcaattactacttgcttcctgtaggaatcctctattgttggatcatattcgtccacaaaatgattctgaattagctgtatcgtcaaggcactcttgcctacgccaccagctccaactaccacaagtttatattcagtcattttcagcaggcctctctcccgcacctgggagccgctgacgctctggccccgccgccgccttcagtgcctgcgccgcgctcgctcccagtccgaaatggcgggggccgggagtactggccgagccgccgccaccttcgccgccgccactgccgccgccgctgctgcctccgccgccgcggccgccgcctagga

SEQ ID NO: 45729 - DNA, 5577 bp, Homo sapiens
  misc_feature (1)...(5577): n = a,t,c or g
tttcaggtatatgtcctcattttcctcaagacttttggccagagcagagcatggaagattcttttcaaaaagtattactgagaaaatatgaaaaatgtggacatgagaatttacagttaagaaaaggttgtaaaagtgtggatgagtgtaaggtgcacaaagaaggttataataaacttaaccagtgtctcacaactgcccagagcaaagtatttcaatgtgggaaatatttgaaagtcttctataaatttttaaattcaaacagacatacgataagacatactggaaagaaatgcttcaaatgtaaaaaatgtgtcaagtcattttgcatccgtttacacaaaacccaacataaatgcgtttatattacagagaagtcctgtaaatgtaaagaatgtgaaaaaacctttcattggtcctcaacccttactaatcataaggaaattcatactgaagataaaccctacaaatgtgaagaatgtggcaaagcttttaagcagctctcaacccttactacacataaaataatctgtgctaaagagaaaatctacaagtgtgaagaatgtggcaaagcatttctatggtcctcaaccctaactagacataagaggatacacactggaggaaaccctacaaatgtgaagaatgtggcaaagcttttagccattcttcaacccttgctaaacataagagaattcatactggagagaaaccctacaaatgtgaagaatgtggcaaagcctttaggcagtcctcaaaccttactacacataagataattcatactggagagaaaccctacaaatgtgaagaatgtggcaaagcttttaacaagtcctcacaccttactagacataagataattcatactggagaaaaaccctaccagtgtgaaaaatgtggcaaagcttctaaccaatcctcaaaccttactgaacataagaatattcatactgaagagaaaccatacaaatgtgaagaatgtgggaaagcctttaaccagttctcaaaccttactacacataaaagaattcatactggagagaaaccctacaaatgtgaagaatgtggcaaagcttttaaccagtcctcaaccctaactagacataagagaattcatactggagagaaaccctacaaatgtgaagaatgtggcaaagcttttaaccggtcctcaacccttactacacataagataattcatactggagagaaaccctacaaatgtgaagaatgtggcaaagcatttctatggtcctcaacccttactacacataagagaattcatactggagagaaaccctacaaatgtgaagaatgtggcaaagcttttaaccattcttcaaaccttactaaacataagataattcatactggagagaaaccctacaaatgtgaagaatgtgggaaggccttcaaccagtcctcaaaccttattcagcatcagagaattcacactggtgagaaaccctatgaatgtaaggagtgtgggaaagcctttagtagtggttcaactcttactcagcatcagagaattcatactggagagaagccctacaaatgtgaagaatgtggaaaggcctttagtagtggctcaaactttactcaacatcagagaattcatactggtgagaaaccctatgaatgtaaggaatgtggcaaagccttcagagaaaaatcaggacttattatacatcagagaattcatacaggagagaaaccctatgaatgtaatgaatgtgggaaattcttcaggcacaaatcatcactcacagtacatcacagggctcacacaggagagaaatcttgtcaatgtaatgaatgtggaaaaatcttttaccgtaaatcggaacttgctcaacatcagagatcacatacaggggaaaagccctatgaatgtaacacatgcaggaaaactttctctcaaaagtcaaatctcattgtacatcagagaagacatataggagaaaaccttatgaatgaaatggatattagaaatttccagccacaagtcagcctccataatgcctcagagtattcacactgtggagaaagccctgatgacatcctgaatgttcagtaactatccacaaactcaccttatgttactccaaagtaatagtaggggataaacccatagactacaacaattataggacagcttttgttaggaagtgatattctatgtaatatcagatggttaatacgggcataacaccttacagattttttttgaatttgtgaaagtttttggcaaaaatgcaaataaggttatgttagaatttacactgaggagaaaattgtcaatttaagaaatctaaagtgaaaattttgcttagaaataaaatacgacaagttatgttttgagtttgatgccataatagtttttagggcacctaacaataatttatagatgtatattgtggaatgtaaagctttaagaacttaaacaaaggtaataattaaaataacctcacaagaagtttaatgagtagagagaattcccatgtacacttcaccaaacttcctctaaggataatgtataatcatagtatatggtcaagtccaagaaatcgatgttaccttgctggtagatagagacttagtcagattttactatggtttgcatgcactctgtgtgtgtgtgtacgtgtatgtgtgtgtgtgtggttatatcaaacttttacgacttttacatttgagtaaccatcaacacgattagtttacagaactgaaaaggaatctgagatctgtactgtatcaggattacaaaggatttagcctcaagtagttccctttttgtattaataaccacacgctttctgcaaccctatcccttgcatccacttgactatgaagtttttttaaagcacagataaattgaataatcagggcaatagcattaagcacatctgcgaattatccctgaagttcaaaagacttatatatgtataagtggtatgtgatataaatcgtgtgtttcatatgcataatggaatttaacgtaattgtgaataggaagtaggtatcctagtttagtagtggttacattatcaggcccatcccagatgtttgtgatgtcctgaaacaatttaaaaggagacccacagagctaatgtttatccatttaaaaggtataaatcaaaataacaaattatctaaaaaaaatctatcctgtacatgtgaagatctaggctcgcctccatgttactccctttctcttcctacctgtggctcatgccatgccatgaagtgcctagggtacatatgtgaacattccagccttcagcataagtggtagtccaaattttctttaagcagctgctctccaagacagggccctggaaaggcccacacatacagcccagggctgcccagggctgttggactgtcatttcaaggctcattgtccccagacagggatctgggccctcagacttttgagaatatgaagaggagggttgaggctggagcagaaccagaatcaagctggtgtggggcttttattgatagtgtgaagattgtacactatattacatgatcagatcatacaaataatctaagattatacagtctagtgatcctagattacacaagtaatctaagcttccactttaggaaactagaaaaagaagagcaaattaaatccaaagtaacctgaaaaaacattagagtaaaaatcattgaaattgaaaagagaaaatcgataaaacccaaaactggttctttgaaaaggtgggtaaaattgataaacctctagctagattaagaaaaaacagaagacaaatactgctaataccaaaagtgaaagaggccatcatagctgatcctatggtcaccaaaaggattagaaagaaatatggacaactctgtccataaatttgataacttagctaaaatggatcaattccttgcaagatgcattctctcaaagctcataaaaggtagatctcagtaggcatatatatctattaaataaattgaagcagtaattaataaccttccaagaccaggcgcggtggnnnnnnnnnnnnnnnnnnnnnnnnnnnnnnnnnnnnnnnnnnnnnnnnnnnnnnnnnnnnnnnnnnnnnnnnnnnnnnnnnnnnnnnnnnnnnnnnnnnnnnnnnnnnnnnnnnnnnnnnnnnnnnnnnnnnnnnnnnnnnnnnnnnnnnnnnnnnnnnnnnnnnnnnnnnnnnnnnnnnnntaaaaccttccaaaaaaaagtgccggggaccaaatgggattcactgatgtgcatttttccgagatacttaaggtagaaatggatacccaagtctggtactggtctctttccaaaacaaagtgccaggaccagctgggttcactgatgtgtttttgagatacttaaggtagaaatgataccaagtctctaccatctctttcagaaaataaaagcagagataacacttcccaactcattttgtgaggccagtattaccctaatagcaaaaccaggcaaagatattacaagaaaggaaaactacagatcaatatttccattgaacacagatgcagaaatcctcaaaatattagcaaatcaggaatgcaaggcttgttcaacatttgatattcagtgtaatccattgcatgcattagcagctcaaagatgaaatacgatcatatcaataggtacagaaaaagcatttgacaaaatccaatatccattcatgttaaaacctctcaacacagaaggaatacaggagaacttactcaagttggtaaagaacatactacaaaaaaccctacagctaacattatccttgatgtttccaactagacactttcctactaagatcaggaacatggcaaggaacaccacaccactgcttttcagcattgtactggaagtgctatataatgcagtgttaaaaaaaaaagaaataaaatgcacatagatttgaaaggatgaaatacaactttgttcacaagtaacatgattgtctttgtagagaattctaaataacaaaaaccctgctgacattaataagcaattacagcaggattgcaggatacagtcctcaggtagatgataaaaaggaattggacatcaagtcattaaaagacacggagaaaccctaaatgcttattgttaagtgaaaaccaatctgaaaaggctttctattttgtatgattgcaattatatgacattttgggagaggcaaaactattgagccagtgaaaggaccagtggttgctgagagttgaggggaaaggagggatggcaggtagagaggtgatttttaaggcagtgaaagtactctctagggtactgtaatttgtcaaaacgcagagaatggaaaacagtgaacggaaaacacagagtaaaccctaatgtcaactcnnnnnnnnnnnnnnnnnnnnnnnnnnnnnnnnnnnnnnnnnnnnnnnnnnnnnnnnnnnnnnnnnnnnnnnnnnnnnnnnnnnnnngagcctgtggaagatgggaggggaaagggttatatgagaattctctatactttttgctcaactttctgtaaccctaaagctactctaaaaaatgaagtgtatcaagtaaataaataaccaaccaaccaa

SEQ ID NO: 45730 - DNA, 811 bp, Homo sapiens
tttttttttttttttttaagttaattgttactttattgtagaggaaaaatatcctgaaatatttattaaataacaataattcctgacaaaatcattcttcgggatgtgttagccaaacaatctggtcaaatggagtaagctgtccctcaccccagtaataagctccattcatattgccataaaccacaggaaatccaaaagattttctaaatggcttccaaatttctgcacagatgcccttattgagcccagaggtaaatataaacaaattgaaattagagagaaattagaaggatagctgagaggaaaaaaatgttaacaattggtgaatccagaaggaagggtatatgggggttcattataccattctttcttaatttctgagctacttaatttctgagtaacttaatttctgagttacagttgcttttgggtgaccatgttctctttctgacttgcctaaaaaatatgttcagttatttcttttcaaacctgaaatacaaaatcagctctttctcaggtgatgcccccctttctactatctacaaaaacttccaaagctttctagaaagcttaaattaaggggctacagtacactgatatggttttgttgttcttggaaggtgttggactcaaacgctcatcgaaggtctgtgatggtcactgctctgtccacaacagtcacgtggctgcagctacagaacagaggtggatccttgctgtgtggatgaaatcctttctggcgacaggaagaaatctcctctagtccatggtcagttagtttaaagaatccagtttcctggaactttgg

SEQ ID NO: 45731 - DNA, 2949 bp, Homo sapiens
attactgcaggaaaaggtcccggagagctgagcagtcaagatgtgtgacttcaccgaagaccagaccgcaggtaggttatctctgatccctaccgaggtcacccttagggagagggacaccctccccccagcacctatcctctaatcttaatctgtcatctctttagcacccccatgagattaccccctggattattttctcttcttctggatcctccattttcttttctcactttcttcctccctccccttccactctagatctgatcccaagcactgggtgagttttaggtggtgtgggtatgtgaaaaaacttggtcacttaatgcctgctgtgtgtggggtctcgggagggtgtataaagctgcctgctttcctttgtcctttaatcagctacttctgcctcttttctcctcttgtgataactgtccccgccctcccagcttcgagcacgttgtgaagattgtagagcagtgacctgatattgtgtcagatggggcacagacaggggagtttgctaaggataatgactgtagctatacctctggaagttctcttatatactggaggggtgcgaagtggctggttgggatgtccctagtcccaggctgctgctcccacttccttataaggacaggactgagactgggcggtggcgaattccagccctgagaagtgtagtagcagcagtggagattggcaggcctccgcgcaggaagtgcgagttgtgtaaatggatgttaccaggctgccagaaggggaggaagcctctatatagaacactttgagttgggaggaagagaaatagagccctcttaagtagactttggtgtacagtttggtgcagatatctcgtttcctcagcatgatcaaagttgaatgggcacgagagctctgaggtagggtttggattaaccctcaaatcctgtgttgacattcatctgaatcctagagttcaaggaggccttccagctgtttgaccgaacaggtgatggcaagatcctgtacagccagtgtggggatgtgatgagggccctgggccagaaccctaccaacgcggaggtgctcaaggtcctggggaaccccaagagtgatggtgaggggcctaaagaacaactcctcattgtcatgggcccacattcttcagctaagagcttccctttatcttcataggccccaaactcaagcaagtctggattacgaaatcccatggatttccttgcttttagtggggagtcatctgtcatctctctgttcagttgaggtctctataatcccctgtcctgagaacttgtgttacttctctggcctgacacttcacctcctttatggcagagatgaatgtgaaggtgctggactttgagcactttctgcccatgctgcagacagtggccaagaacaaggaccagggcacctatgaggattatgtcgaaggacttcgggtgtttgacaaggaaggaaatggcaccgtcatgggtgctgaaatccggcatgttcttgtcacactgggtaaggttctgtgtccttgtccttgagctgagatggcaccctaggtacctcacttgtcacccaattccaaaaatgctttctttccccctgcaggtgagaagatgacagaggaagaagtagagatgctggtggcagggcatgaggacagcaatggttgtatcaactatgaaggtaagaggtgaactgcgctttctcagagaaagcagccatatggggcaggtcaagtatagtgtctggggctttccctatccctggacttgggctccaaaaagagccaggaggcaaggtgcagggccctgccagcccagcccaggagtgggaggtcagggcggtataacaggaaaggaagggggtagtagtgtagagggtgggaaggaatgagaagtgaaataatggaatgtctgtccccactgcctgacccctcaccccatgtctttgtacttgtcttcaaccattaatgtctcttccttcctgcagcgtttgtgaggcatatcctgtcggggtgacgggcccatggggcggtacggctcctcccagcctctcctctagttgatctccccagtgtttcttttttccccaacctgtgctctttatcccctgcccttaccctactaccatctgacttcctcctggcatgtttctgcatggagctgactagggaggggagggattcctcaaagaggaagacaacctgggggtacagtacctccttacctctagaatgggccctgaggttttacttatgcggccctgggtgctggtgtctgggaactctcaccagcctgtataccagtcttgctttagggtgaccttctggccctggagcatgggtagctggcatagaggggtatgggttgcctgccccattctgctgctatagctgaacagtcctttccccttccctcgctgggcagcttggaggtaccctaacccaaaactctgtcctctcctcccgccagtggctgacagtagctgtaggtgtagtggagaacttttctgcctctgctgtgttcttgctgcttaggtttgggtgggggactaacagctgctgggaggggagctaggggcatggagaactggtcagactcaaggtggctcctctgcaaactgaccccagggttggttgctgtgggcatgttcccgcttatgctacctttgcagtctggtagtcccctggcccttggcgtacccctccacagccctgttccctggctcatcccacctttcctttccacagagctcgtccgcatggtgctgaatggctgaggaccttcccagtctccccagagtccgtgcctttccctgtgtgaattttgtatctagcctaaagtttccctaggctttcttgtctcagcaactttcccatcttgtctctcttggatgatgtttgccgtcagcattcaccaaataaacttgctctctgggccctcaaaaaaaaaa

SEQ ID NO: 45732 - DNA, 913 bp, Homo sapiens
attgtgtttttactaagcatttttattatcttcatgtagtcaaatgtgtcaatattttgttgccactggatatttccaccacgtttccttctgtatttatatggcttcattttcttacatttggatcctggatccagatggagttcattcttcgcatatggtgtgaagtacaggtctaacttcaactttctccaaggggctttccagttggctcagcaccatttattaaagtctgctttgacctgcgattgaagatgccacctttaactcctcatcccccacccctaagaaacctcacggaacatatgacccaagagcagagcagacataaaaagattaactgagctactgagattcggtcaagaatgtgaactaaaaatgaactgttgagaataaggctggaagatccaacagagggaaacggctgtggaggtcattgccaggtgaggtgtcagatccccggcattgggaagtggtcaactcgtgggttggtaaaaagaattcaccaacaacagtataggtttgaaaaaggaaaggtattagaagaatgctgcagaagactgccatggggcacctcgggtgagaggactgaatgtaccacgggtggatttttccttagggatatttatggaccttaaagcgggaccgtggggttgcagtgagtttcagcatggcattccggagatgtacagaaattttagttacttctaaggtttttttcggggaaaagaaatctggaaccagatgcctgctttagataataggaaagtctaattacttttaattttccccaaataaggcgttttgcctctgcatggcctgatagtcaccaggtggtctttgctcccttttaaattcctcagataaaaagattttgtctctgggacctgttcaatggtcactaggtgatttt

SEQ ID NO: 45733 - DNA, 759 bp, Homo sapiens
gtcctcgatcccgtggtgctccgcggcgcgccttgctctcttccggtcgcgggacaccggggtgtagagggcggtcgcggcgggccagtggccggcagaatgttggctaccagggtatttagcctagttggcaagcgagcaatttccacctctgtgtgtgtacgagctcatgaaagtgttgtgaagagcgaagacttttcgctcccagcttatatggatcggcgtgaccaccccttgccggaggtggcccatgtcaagcacctgtctgccagccagaaggcactgaaggagaaggagaaggcctcctggagcagcctctccatggatgagaaaagtcgagttgtatcgcattaaagttcaagggagagctttgctgagatgaacagggggctccgaacggagtggaaagacggttgtgggcggtgccatgttcttcatccggtttcaccgcgctcgttatcatgtggcagaagcactatgtgtacggccccctcccgcaaagctttgacaaagagtgggtggccaagcagaccaagaggatgctggacatgaaggtgaaccccatccagggcttagcctccaagtgggactacgaaaagaacgagtggaagaagtgagagatgctggcctgcgcctgcacctgcgcctggctctgtcaccgccatgcaactccatgcctatttactggaaacctgttatgccaaacagttgtaccactgctaataaatgaccagtttacctgaaaaaaaaaaaaaaaaa

SEQ ID NO: 45734 - DNA, 775 bp, Homo sapiens
tacctagttttattcacttaattgtgcatgcttacataaactttaaactacatttaaaactagcaaatctgcataccaaattatgtataacgtagattgaatttttatgaacttaaagtgagttaattgtataatgtaatattgtttaaaatatgtaaaaaccaagcatttccgcttggtccataattctatttgatattttaaaattctcatttaaaaattatattgctatcattcagcatgtgaaaatttattgataaaatgtgattttaatattttttagatataaactttcaacgtacttccatatgaggattataatagccctgctttattaaagaccataaaatattaactttccccaagatgttatgggttccagttcttctgatcatttgattcctttaattactgtccctcaatttcttcatctttacaatagatatattaacatttacagatcgactatttcctttaacctcctagaagaaagtttttgtggggaaagatgattctgtattattcagtagcatagacattttgcatatcaaagatgttcatttggcactaatgttgattgaaatcaaatccatctgagatgcctagctcgtatttgcattctggaagcctccatcgcaggggagctcggcagggtatgtgagctttgttggaggtgcggtgttttattctgcagctgttgtgaggacagagaggcatggcccacaggcaaaaaaagtcaccacccagaagatgctctgggatagaggaactgctc

SEQ ID NO: 45735 - DNA, 372 bp, Homo sapiens
  misc_feature (1)...(372): n = a,t,c or g
gcgccgtnacacnccgctcttgacngnccgaggatcataaggactgtncatggtgaatggaccaccacattttacagaaagcacagngtttccaagagtaaatattatcantgtcactaacaagggactactgcactccttcgacctcctgaaggcatgnttgccttgaattctcacccaaaaatactgtcctggcaacgnggcagccttacactacttntaaagatggcacagctgggatacccaacctacaactttatgatgtgaaaactgggacatgtttgaaatctttcatccagaaaaaaatgcataattggtgtccatcctggtcagaagatgaaactctttgtgcccgcaatgttaacaatgaaa

SEQ ID NO: 45736 - DNA, 2114 bp, Homo sapiens
caacatggcgccgtccacgccgctcttgacagtccgaggatcagaaggactgtacatggtgaatggaccaccacattttacagaaagcacagtgtttccaagggaatctgggaagaattgcaaagtctgtatctttagtaaggatgggaccttgtttgcctggggcaatggagaaaaagtaaatattatcagtgtcactaacaagggactactgcactccttcgacctcctgaaggcagtttgccttgaattctcacccaaaaatactgtcctggcaacgtggcagccttacagtacttctaaagatggcacagctgggatacccaacctacaactttatgatgtgaaaactgggacatgtttgaaatctttcatccagaaaaaaatgcaaaattggtgtccatcctggtcagaagatgaaactctttgtgcccgcaatgttaacaatgaagttcacttctttgaaaacaacaattttaacacaattgcaaataaattgcatttgcaaaaaattaatgattttgtattatcacctggaccccaaccatacaaggtggctgtctatgttccaggaagtaaaggtgcaccttcatttgttagattatatcagtaccccaactttgctggacctcatgcagctttagctaataaaagtttctttaaggcagataaagttacaatgctgtggaataaaaaagctactgctgtgttggtaatagctagcacagatgttgacaagacaggagcttcctactatgggagaacaaactctacactacattgcaacaaatgggagaaagtgctggtagtgcaattaccaaaaaatggccccatttatggatggtagtttggaattctagttctactgagttttgtgctgtatatggttttatgcctgccaaagcgacaattttcaacttgaaatgtgatcctgtatttgactttggaactggtcctcgtaatgcagcctactatagccctcatggacatatattagtattagctggatttggaaatctgaggggacaaatggaagtgtgggatgtgaaaaactacaaacttatttctaaaccggtggcttctgattctacatattttgcttggtgcccggatggtgagcatattttaacagctacatgtgctcccaggttacgggttaataatggatacaaaatttggcattatactggctctatcttgcacaagtatgatgtgccatcaaatgcagaattatggcaggtttcttggcagccatttttggatggaatatttccagcaaaaacaataacttaccaagcagttccaagtgaagtacccaatgaggaacctaaagttgcaacagcttatagacccccagctttaagaaataaaccaatcaccaattccaaattgcatgaagaggaaccacctcagaatatgaaaccacaatcaggaaacgataagccattatcaaaaacagctcttaaaaatcaaaggaagcatgaagctaagaaagctgcaaagcaggaagcaagaagtgacaagagtccagatttggcacctactcctgccccacagagcacaccacgaaacactgtctctcagtcaatttctggggaccctgagatagacaaaaaaatcaagaacctaaagaagaaactgaaagcaatcgaacaactgaaagaacaagcagcaactggaaaacagctagaaaaaaatcagttggagaaaattcagaaagaaacagcccttctccaggagctggaagatttggaattgggtatttaaagattcacggaaagcaagttgatgaccagaaatcagtgcaaacacatcttctgttaaacccattggtatacacagaatattcctgtgcccacacttaatgtcaatctataattttaaccatttatccaagattctactaagtgtaaaattatttaataatgtctattaaattgatatttatatcttgcatcctatatcatgtcaatatgtgatatagaaaagagatacgtgaattttttagctaagcttgacagattgaaagacaagtgtcatttttttttgtagagggtgatatataccatgtaaatgaataaagacattttaaatttaaaaaaaaaaaaaaaaaa

SEQ ID NO: 45737 - DNA, 1610 bp, Homo sapiens
tatcgagcaagaatctgttaacagttttatttttttttatgttaaataccatgggacaggattgtaaggatgaaaaactcagtcaacaactgcctcacaagggataagaaaaattctgccatgatattagcaaaggtaaaggaggaaaaatttacactgtaagaggcaccatttccccaaggaatacctcttggcatttcctgaatgagtgggattagcaatctaaataaatcatatttcaagaggtaacagcaacagataaaatttaaagggattattaaaataacatttacaagactctgaacaattcttgaactcttattaaaaccacaaagaaagaacaattctttatttatgaatttcataaaggactcaatgtgcaactgacatctgctagtgatgatctggtaatatacaacctgtccagtagccgaacagtttgtttttattgtgttttctaaccgtaagagatcattaaaggcaaagcctatatgacgctgtacacacaaaaaaatggtcaccgtgggccatactaccaatgaaatggtaggtaaacaaatctttttctggtcaagagaaaaaaaaaaaaaagaaacagcactctgcatgcttcactctacaagatgaatttccctagaaagaatccaatgaaaatggctgcaattacaacaagaagtgaaggaagaggactggtgacattatctctgaaggatgcagttgaggttgatccaggtttatccgaatgtgctacctttctgagccttaaaccttcatctctcaggtgccgattttcttctgatagcttcatcatttctccctgaagtcttttacactcttccattagtttccttgtttcggtatcattaagtgaaacactgtgtggttttggcataggtccatcttgcttagatgcattcagtggaacagctttgctaggttccatatcattcaatttatcattttcattgggcatttcaaatacgcatctcaatttggaatccattaattcatcaggttttgcctctttccacacagcttccatatctgaagtgtttggtggagcaaaaattgtctgtaccataaacttgtgtttactcttttcattcggatcatagtcaaagggctgtagcattactgaaacagtcacagttgaccctgggtcaataattccactgttgggcctcacacagtaccggcgaggtgctgtagtcttcactttgaaacacacttttctatccgatggatttcgcaatttaagatttgtagtgactacatctgtgaaggggcctttgaatttgaggtctgtgggcggatcgaggaccaggatctgctcgtgcttcgccatggcccctgaggcggacgccatcggagagacagcgcagagcgggggcgcgccgcggcggcggtttgctgactgggggcgggggacgacggcggcgacggctcggccgagctctaggacgaggccaggctcgcggctcccgagccctaacgcctgccgctgtgtcaccggttcggtgggcgcacccgctgggtcagcagctccgggtcccacaactgactcaatcccacaccagccgcacggccacgcgcacttgcgagcctcggcg

SEQ ID NO: 45738 - DNA, 819 bp, Homo sapiens
tgtagaaaagcattccttaatttctcttcttgcaaattacatgaaagggtgcacagaggagagagcttctgtgaatgtaagcattgtgggaaagcattcatatctgccaagatcctttgaatccatgcaagaacacacagtggagagaaaccctatgaatgtaaagaatgcagaaaagcattcagcttgcctacttcctttcatagacatgaaaagactcacactggaaggaaacactatgaatgcaagcaatgtggcaaagctttcacttcttccagttcttttcaatatcatgaaagaacacactagggagaaaccctatcaatgtaagcattgtgcaaaagcctttatttcttccacttcttttcaatatcatgaaaggactcacatgggagagaaaccctatgagtgtatgccaagtgggaaagccttcatttcctctaagttcccttcaatatcatgaaaggactcacactggagagaagccctatgaatataagcaatgtgggaaagccttcagatcagcctcgcaccttcaaatgcatggaaggactcacactggagaaaaaccctatgaatgtaagcagtatgggaaagcgttcagacctgacaagattctttgaatacagataatgaatgtaaacaattaactgtttataataactgtatactaacaaatgatattctttttaaataagaagctataatatcccattggtgtcatgtattagatcagccttatactgttaaattgttattatttggacattgtgagtcagtataaccatgtggataaaatgccagacatctttttattcg

SEQ ID NO: 45739 - DNA, 484 bp, Homo sapiens
gccgagtcggagccggagcctgagccgcgcgctgtgtctccgctgcgtccgccgaggcccccgagtgtcagggacaaaagcctccgcctgctcccgcagccggggctcatctgccgccgccgccgcgctgaggagagttcgccgccgtcgccgcccgtgaggatctgagagccatgtcggccagcagcctcttggagcagagaccaaaaggtcaaggaaacaaagtacaaaatggatctgtacatcaaaaggatggattaaacgatgatgattttgaaccttacttgagtccacaggcaaggcccaataatgcatatactgccatgtcagattcctacttacccagttactacagtccctccattggcttctcctattctttgggtgaagctgcttggtctacggggggtgacacagccatgccctacttaacttcttatggacagctgagcaacggagagccccacttcctaccagatgcaat

SEQ ID NO: 45740 - DNA, 610 bp, Homo sapiens
  misc_feature (1)...(610): n = a,t,c or g
cggacgcgtgggcggacgcgtggggctcttgttgcttttatattatacctgtaccaagggattgtattttgagtttaaggccactctagaattacaaggctgattttaggacttcctggggaggaggcactggggttttaggggcggtaatgactgtcttttcattggtttggggggctggactttataagattttggtgaatagagcacttagatttgtgttatcttggagtcttaaccaaatgaatcttttgtgcctggagggcagcatgggtgatatgtggattgtcacttcatttggaagcatctcaaatccccagcattttgaatgcctacatgttgctcaaaggaaatgcttgttagagcatnnnnnnnnnnnnnnnnnnnnnnnnnnnnnnnnnnnnnnnnnnnnnnnnnnnnnnnnnnnnnnnnnnntgaggtctgaagcaacagtggcagttcaggggtggtgatcatggtgagttgctatctgaactcttctttcacctcctttgggttcccagtgtcaaaaagagtggtgtccttttttagcttaattaagcaggactgaacaaaaataataaaaaataaaaaaagccttattcaaatt

SEQ ID NO: 45741 - DNA, 580 bp, Homo sapiens
ttttttttttgatgctcaacaggatctcacgtttattgagaagtgattaatggtaaaaagaaaggcaatgccctttcctcattggctgaacaagaaactgaagaaacattcacgacacgttttacagtatttttctcttccaaaatgcatttctgtaaacgagtttttaccactgttctcagctttgaaatcaaattaatcctgacttaatcagtataatgtacaagaacagaacatttcttaggactcctagtactttactttgagtaacaaaaggtcagagaaaatgaaccacccttaaagacacaaccttgggtaacactgttatattctcctagacaaaaattcttcataaaaatgttcttccagttcggaaggataaaatcaaattcccactttctggggtggatgcccaaaaccttcacaactcaagtgttctccaagtgcaaatgtcaaaatgggaggaggaaagggtttaaaaattagagaaaactgtatgcacttacggacttaaaaatccgaaaaacatagtaaaaagacaaaaaaacatagcattatgctctgaaatccctcgtgccga

SEQ ID NO: 45742 - DNA, 815 bp, Homo sapiens
ggacagtctcaggctggttctggatctactccttcagaaccccacccagtgttggagaagcttcggtccattaataactataaccccaaagattttgactggaatctgaaaagcgggcgtgtgttcatcatcaagagctactctgaggacgacatccaccgctccattaagtataatatttggtgcagcacagagcatggtaacaagagactggatgctgcttatcgttccatgaacgggaaaggccccgtttacttacttttcagtgtcaacggcagtggacacttctgtggcgtggcagaaatgaaatctgctgtggactacaacacatgtgcaggtgtgtggtcccaggacaaatggaagggtcgttttgatgtcaggtggatttttgtgaaggacgttcccaatagccaactgcgacacattcgcctagagaacaacgagaataaaccagtgaccaactctagggacactcaggaagtgcctctggaaaaggctaagcaggtgttgaaaattatagccagctacaagcacaccacttccatttttgatgacttctcacactatgagaaacgccaagaggaagaagaaagtgttaaaaaggaacgtcaaggtcgtgggaaataaaaggcagttctacacagactgcagcaacggttgcatctgcatatcctaagaggaaaaaatgaccttcaagagaattaggacttttttcttaatttcactgacttcagagacgattgcagacttgcagtttaagtattggaatttcacaaaagacataggacttaactggaaaatgaaaaaaaaaaaaa

SEQ ID NO: 45743 - DNA, 1261 bp, Homo sapiens
gcggcaagcgcgctgcggttccggtggcgccatgtcgttctgcagcttcttcgggggcgaggttttccagaatcactttgaacctggcgtttacgtgtgtgccaagtgtggctatgagctgttctccagccgctcgaagtatgcacactcgtctccatggccggcgttcaccgagaccattcacgccgacagcgtggccaagcgtccggagcacaatagatctgaagccttgaaggtgtcctgtggcaagtgtggcaatgggttgggccacgagttcctgaacgacggccccaagccggggcagtcccgattctgaatattcagcagctcgctgaagtttgtccctaaaggcaaagaaacttctgcctcccaggggtcactaggcgggcagcccacacccaccccagacggccaccacactgaggccacacgttggccattccaccttggagttggaaccctgggcgtctgagacaggaaggcagggcgcagtggttgaaacatcaggacactcccaaggccccggctctgaacaagaccttttcgtttcttggaaaagagactcatttgctgatggttcatgccttctgctgggacaggcctgggctgtgcagccacactgtcggctgacttagccccctgctcactctaggtgcctccaggaggtgagccctgggtgcagctggtctctgaatgacgttacaccctcaccttcttttcctggccctgtctctggactctcccctgtgaggcccaattccaagacagactctcgtcctcaccgaagcttaggcccacatctcccaggctgcttaggagacagaatggaaacggaggccgcccctgccagccgccctggccctggtcactgcatgatccgctctggtcaaacccttccaggccagccagagtggggatggtctgtgacctgctgggaaggcaggctgatggggcacacccttggcctctcgtccacgaggggagaaacctaaaccctgtttcacaatctgtgcggaagtagcttgcctcacttctgcttaggaaagcggctgttgctccataactctaaccagcacagggctgaggcctgcagtgcacacctgcagggaggcccttcccaaggtgtggtgactgtgccttactgtacatgctcggaggcctggccatataggagggtgggtgatgctgaaatcaccccccatcttaagtaattactttctggagtaatcaggtggaaatccatagacaaatgaaaaaaaaa

SEQ ID NO: 45744 - DNA, 1555 bp, Homo sapiens
ggggaatttcccgcagcccgcgccccccgccgcgattgacatgatgtttccacaaagcaggcattcgggctcctcgcacctaccccagcaactcaaattcaccacctcggactcctgcgaccgcatcaaagacgaatttcagctactgcaagctcagtaccacagcctcaagctcgaatgtgacaagttggccagtgagaagtcagagatgcagcgtcactatgtgatgtactacgagatgtcctacggcttgaacatcgagatgcacaaacaggctgagatcgtcaaaaggctgaacgggatttgtgcccaggtcctgccctacctctcccaagagcaccagcagcaggtcttgggagccattgagagggccaagcaggtcaccgctcccgagctgaactctatcatccgacagcagctccaagcccaccagctgtcccagctgcaggccctggggcctgcccttgaccccactacccgtggggctgcagccgccttcgctgccggcggtcagcgcaggcaccggcctcctctcgctgtccgcgctgggttcccaggcccacctctccaaggaagacaagaacgggcacgatggtgacacccaccaggaggatgatggcgagaagtcggattagcagggggccgggacagggaggttgggaggggggacagaggggagacagaggcacggagagaaaggaatgtttagcacaagacacagcggagctcgggattggctaaactcccatagtatttatggtggcgccggcgggggccccagcccagcttgcaggccacctctagctttcttcctaccccattcccggcttccctcctcctcccctgcagcctggttaggtggatacctgccctgacatgtgaggcaagctaaggcctggagggtcagatgggagaccaggtcccaagggagcaagacctcgcgaagcgcagcagccccggcccttcccccgttttgaacatgtgtaaccgacagtctgcctgggccacagccctctcaccctggtactgcatgcacgcaatgctagctgcccctttcccgtcctgggcaccccgagtctcccccgaccccgggtcccaggtatgctcccacctccacctgccccactcaccacctctgctagttccagacacctccacgcccacctggtcctctcccatcgcccacaaaagggggggcacgagggacgagcttagctgagctgggaggagcagggtgagggtgggcgacccaggattccccctccccttcccaaataaagatgagggtactaaagttgtcttggtttttattttattattatttttttctttttccagtatactagcttgtcttttaagaaaggggatattaaaaaaaaaaaaaagacaaaagtgtttttaaaaaaaagcaacacccacacctgtgtctgtatatagtcagcttatctcgtgttcaatcgtctgatctctacagagagaagtggaaaatgctgtatcaagggtgggcttagctgtgcctttccaataaagatgtgagaagcttcaaaaaaaaaaa

SEQ ID NO: 45745 - DNA, 418 bp, Homo sapiens
cccgccaccaaaatgcagattttcgtgaaaaccctcggatacgatagaaaatgtaaaggccaagatccaggataaggaaggaattcctcctgatcagcagagactgatctttgctggcaagcagctggaagatggacgtactttgtctgactacaatattcaaaaggagtctactcttcatcttgtgttgagacttcgtggtggtgctaagaaaaggaagaagaagtcttacaccactcccaagaagaataagcacaagagaaagaaggttaagctggctgtcctgaaatattataaggtggatgagaatggcaaaattagtcgccttcgtcgagagtgcccttctgatgaatgtggtgctggggtgtttatggcaagtcactttgacagacattattgtggcaaatgttgtctgact

SEQ ID NO: 45746 - DNA, 978 bp, Homo sapiens
gctatgcccggacagaggatcgcctcgctggcctactctctcctcccgtacggcgccggaatcccagctccacttaccaggccgcggctaccccgccgtcccccccgactcccgccaccccgctctctcaggctcttcaggatccaagtccgtaggccctttaaggggtctagttgccgtttgcgaggccctgggactttggtcccagacagcggggatccggatggcttccgtgcggatccgagaggccaaggagggagactgtggagatatcctgaggctgattcgggtgaagactgcaggccggagctagccgaattcgaaaaactctcggatcaggtgaagatcagtgaagaagccctgagagcagatggctttggagacaatcctttctatcactgtttggtagcagagattcttccagcgcccgggaagctactggggccctgcgtggtgggctatgggatatactatttcatctacagtacatggaagggacgcaccatttatctggaggatatctatgtgatgccggaatatcggggtcaagggattggttccaaaataatcaaaaaggtggctgaaggtggccttggataagggctgctcccaattccgcctggccgtcctggactggaaccagagggccatggacttgtacaaggccctaggagcccaagatctgacggaagctgagggctggcacttcttctgctttcaaggagaggcaacgagaaagttggcaggaaagtgacgccatccctaggaggatctctgtcttgagtttctccttccccatcagctgaagcactcttcagagactacgtccacagacactgatgctgaggcctccctggaggaaggagggttaggggtgcctatcctcaagtattggaagagcagaattgagggagagacctttcttccttgttgagggtgaaaaataaataagaattacatgtcaaaaaaaaaaaaaaa

SEQ ID NO: 45747 - DNA, 630 bp, Homo sapiens
aacaaaccagaagacaagtaactgtatgagttaataaaagacatgaactcatacagttacttgtcttctggtttgttgaaacagtaagtcagacaacatttgccacaataatgtctgtcaaagtgacttgccataaacaccccagcaccacattcatcagaaggggcactctcgacgaaggcgactaaattttgccattctcatccaccttataatatttcaggacagccagcttaaccttctttctcttgtgcttattcttcttgggagtggtgtaaagacttcttcttccttttcttaagcaccaccacggaagtctcaacacaaggatgaaggagtagactcctttttgaatattgtagtcagacaaagtacggtccatcttcccagctgcttgcccagcaaagatcagtctctgctgatcaggaggaattccttccttatcctggatcttggcctttacattttctatcgtatccgagggttcaacctcgagggtgatggtcttccccgtaagggttttcacgaaaatctgcattttggtggcggctccacctgaggttgaggaaaaggaagagacaggttaggtcagggatcacaagagaaggcaccatagggtgctaacccgag

SEQ ID NO: 45748 - DNA, 645 bp, Homo sapiens
tgaatatgtgcctgtcattgcaaagctgacattctcaccctgaaggaacgggaaccggctgaagaaaagattctggatgaaattgaagaacataacctcaaaatctatcacctacctgatgcagaatcagatgaagatgaagattttaaagagcagactagacttctcaaggctagcatcccattctctgtggttggatccaatcagttgattgaagccaaaggaaagaaggtcagaggccgcctctacccctggggtgttgtggaagtggagaacccagagcacaatgactttctgaagctgagaaccatgctcatcacccacatgcaggatctccaggaggtgacccaggaccttcattatgaaaacttccgttctgagagactcaagagaggcggcaggtcatcacactgtgcccctttctctgtattgtgtcaccctgagccacaatgttcctcctcctctatgtgttcagctcagccttcttgaccattaagcaacatggtttggtttcctactcaaaagttattataaaagagttgttaatttaatcaaattatgctcttttagcctttttaagaaaaagtacatttaatgatatgcacgtaaaaactttaggccaggcacggtggctcatgcctgtaa

SEQ ID NO: 45749 - DNA, 3472 bp, Homo sapiens
cccagctcggtgctgccgccatcttcttggaggacaggaggagaggcgaaggctccccctccccgtgatcgctccgcactcccgccaccacctgccctcccgcgaccgcctctctcctcctcagtgggcacttgtctccttctaacaaacggccttccccccactccagttacccaccgcaaggcgaagattctcattacctgttccactcttataagcataagaaaaccgagctcataagacgaagcttcacaaaagatgtctaagcaacagccaactcagtttataaatccagaaacacctggctatgttggatttgcaaacctccccaatcaagttcaccgaaaatcagtgaaaaaaggttttgagttcacactgatggtggtcggtgaatcaggtctaggaaaatcgactctcataaacagcctattcctaactgatctgtacccagaaagagtcatacctggagcagcagaaaaaattgaaagaacttgtccagattgaggcttcaactgttgaaattgaagagcgaggggtcaagctacgcctgacagtggtagatacccctgggctatggtgacgctatcaactgcagagattgttttaagacaattatctcctatattgatgagcaatttgagaggtacctgcatgacgagagcggcttgaacaggcggcacatcattgataatagggtgcattgttgcttttactttatttcaccttttggacatggacttaagcccttagatgtggcgtttatgaaggcaatacacaacaaggtgaatattgtgcctgtcattgcaaagctgacactctcaccctgaaggaacgggagcggctgaagaaaaggattctggatgaaattgaagaacataacatcaaaatctatcacttacctgatgcagaatcagatgaagatgaagattttaaagagcagactagacttctcaaggctagcatcccattctctgtggttggatccaatcagttgattgaagccaaaggaaagaaggtcagaggccgcctctacccctggggtgttgtggaagtggagaacccagagcacaatgactttctgaagctgagaaccatgctcatcacccacatgcaggatctccaggaggtgacccaggaccttcattatgaaaacttccgttctgagagactcaagagaggcggcaggaaagtggagaatgaggacatgaataaagaccagatcttgctggaaaaagaagctgagctccgccgcatgcaagagatgattgcaaggatgcaggcgcagatgcagatgcagatgcagggcggggatggcgatggcggggctctcgggcaccacgtgtaaggtgatgtgcacatatcaagaagtcagagaaaacactttcctggataaaaaagaaaacattccagatgcatgatccagctgtgtgttttcaatccttgggagggtgccatccacattttaacagtacctgtgcctgagaatttaatttttaaaagactttgatgtgtttttgtatgaagtacttttaacgtatgtatttcattgctgtgtcacactctgtgttttgtgaggtgaatgtcttccttttctttctccctaaccactaatgttagaattgatttccaagaatcggcatgtatacttaatactgaatttctttgatttaactgacttaacaactgactaaccattgatgagcactcctgatttttatctagaacattcagatttaccataatgttccttagtggtagaggtgtgtgcctagtgatgtagaaagatacactgacttggtgcaaggccatctgcttaccacatcacaccacttggagatctttgcttccttgcttttatgtttgtacacaacacctaaaaccagttttgctgctataattctatactgttgattcgtctgcgattttatctgttaaccaaataaaacataatagaatttcctaatgaggatatatctttatacttaaacagcttttttagaggtgagttttaaagaagtctcttaattctgatgctaggttgtttttaaaaccactatggcaaaggaactcaccacaagccaccttttgtaggtgttctccacttaatactgggttatcctgtggctacagaggaaaatgcaaaggcaggtcataaggctccagttttcgtattggcaaataagactcttacctacaaaatgagattcagtgaactaatttggtttttactcaaccaaattaaaaatttttttaaggaaaattagcagttggtctattcagaatcaaacctttttatattttatactgcactttagtgtattttctgtcactgtaggtatagaagatctgcctcccctgtggaaattggggtctgttggtgggcgtgcccctgaagcctggcttgggttgaaaagtgttcccgccctaaggccttggtgccctgaacctctgatgcctaccgggttctcctgatttgagtttcctttaaatactccctttttgagtaattttctgatgggaggaaagtagcagtcatcatctttttgtgtgcaggctgtctcatttatttttagccattgtcgtttcattcattttgtgtaatataaaccgtgtgtcatgtcaaagtgaaagacatttcaaatctgtagcataggctagtgggcaggtccgcacagtcgaagccacacctggtctgttttctgtgcactgtagccttagtgtcacctttcttcttgtgtctccttatggtacactccagcggttgccttttttatcatttctactgaagttgggaaattcaaccccagaaattgacagatgaaaggagacaatggttgtgtaggggagatggagaaaatgcttaatctgaggatgagacagggttttttcatttttgtgggggctagaaaaaacataaaatgaggcagttaaataataatagttaatgaaggtgtgctacagaaaataatctggtgttcttgctaactttgcccttcactgttgcttaattgtgaacagccaaaagctatatggttatggcttattgtgtgaaggtaactaaggaagtgggtgttccatgacttcagagtacatccatgcggagtccattatttgagtttgacatttaataactttgctgggaaaatctgtaaaaaagaaaaacaagtttgctagtgactaagccccgcatatgtgagtgaaagtacttcaggcacgctgcctcctggtaacagctatgcagggagggaggacccacactgctacacttctgatcccctttggttttactacccaaatctaaatagatacttttgataatagataactgctcttttactaagacatagtctctacctatagaaatgtattttgaaaacacttattttacacagcaattttgtatccatttaaactaaccttttatcaataaagcactattgtttagatattaaaaaaaaaaaaaaaaaaactc

SEQ ID NO: 45750 - DNA, 854 bp, Homo sapiens
tgggagaagagccggcgcctggggaagagcctaccccaaagaaaagggtgtctaaaatgttcacggttccttcttttgcctcaaaaagtgacatttattcaaagaaaaaaaatgacaagatgtccatcccttggctcccttccctcccccctcctgctgctcctcagcccccagagattgagccctggctggggctgggtggcaggacagcccctcagatgaggtcagcaacattgaggggcatttcctcaatggaggtgttgtagaaggtctcaatgtctcgaagagtcctcttgtcttcttctgtcaccatgttaatagccacacctttacgggccaaaccgtccacctcgaccgattctggaaaacaaggaaggggatgaggaatatcaggagctttaagcccagggagggccaggtgtgaaggggtaggggagtgttccagatctacgcttacctgtggatatagttttccctgttggtgggaaggtcatagttgatgactaaagaaacctgctgcacatcaatgcctctggcctacgtcaagaaagacaactcttcagcatgtgcacggaggacactctatcccggagggaagacacttaggcatccatgtgggcagccaaggaaggcagaggaaataagcatcccagttccccaaaggccttaggcatgccagattctattccaagctgctactttcctgagaggcactgatgtccccttggagagggaatcaccttggatcctcccttctgcctttgctatcagttccctctactcaccagcaggtcagtggtaatcaaaactctgctagagccagaacgaaactccctcataatcacgtctcgttc

SEQ ID NO: 45751 - DNA, 1837 bp, Homo sapiens
accagctatgacatgattacgaatttaatacgactcactatagggaatttggccctcgaggccaagaattcggcacgaggatcatgtctgcgagccaggattcccgatccagagacaatggccccgatgggattggagcccgaaggcgtcatcgagagtaactggaatgagattgttgacagctttgatgacatgaacctctcggagtcccttctccgtggcatctacgcctatggttttgagaagccctctgccatccagcagcgagccattctaccttgtatcaagggttatgatgtgattgctcaagcccaatctgggactgggaaaacggccacatttgccatatcaattctgcagcagattgaattagatctaaaagccacccaggccttggtcctagcacccactcgagaattggctcagcagatacagaaggtggtcatggcactaggagactacatgggcgcctcctgtcacgcctgtatcgggggcaccaacgtgcgtgctgaggtgcagaaactgcagatggaagctccccacatcatcgtgggtacccctggccgtgtgtttgatatgcttaaccggagatacctgtcccccaaatacatcaagatgtttgtactggatgaagctgacgaaatgttaagccgtggattcaaggaccagatctatgacatattccaaaagctcaacagcaacacccaggtagttttgctgtcagccacaatgccttctgatgtgcttgaggtgaccaagaagttcatgagggaccccattcggattcttgtcaagaaggaagagttgaccctggagggtatccgccagttctacatcaacgtggaacgagaggagtggaagctggacacactatgtgacttgtatgaaaccctgaccatcacccaggcagtcatcttcatcaacacccggaggaaggtggactggctcaccgagaagatgcatgctcgagatttcactgtatccgccatgcatggagatatggaccaaaaggaacgagacgtgattatgagggagtttcgttctggctctagcagagttttgattaccactgacctgctggccagaggcattgatgtgcagcaggtttctttagtcatcaactatgaccttcccaccaacagggaaaactatatccacagaatcggtcgaggtggacggtttggcccgtaaaggtgtggctattaacatggtgacagaagaagacaagaggactcttcgagacattgagaccttctacaacacctccattgaggaaatgcccctcaatgttgctgacctcatctgaggggctgtcctgccacccagccccagccagggctcaatctctgggggctgaggagcagcaggaggggggagggaagggagccaagggatggacatcttgtcattttttttctttgaataaatgtcactttttgaggcaaaagaaggaaccgtgaacattttagacacccttttctttggggtaggctcttgccccaggcgccggctcttctcccaaaaaaaaaaaaaaaaacactaatccatttccctaacctagtaacctccagatcccagaggctctcctcacctcagctgagctcctttgaaagtgattcaagggactatgtcactcagcctcatttgctggaccaaatctggagggagaacccctaaaacccctaagtgaggttgcccagggggttgtccccagggtggggggaagcaggggagagaaaatggtagccatttttacattgttttgtatagtatttattgattcaggaaacaaacacaaaattctgaataaaatgacttggaaactgaaaaaaaaaaa

SEQ ID NO: 45752 - DNA, 487 bp, Homo sapiens
ttttttttagatttcctttgtggcaccataatagaatgttccaggttcatctcatatttctccatcccaggagccattattactctacttttgagtatgtcctcaaaactggtctaacaagtcatttcagaaaataatttcacttcaacaatacactgtttgttgattcaacacaaactgcatgggctgcttagatcaatttacacttggttcatcgccatctttggctgtttcaaacatacactgctaaaaaaaaaaaagattgtcattaagaatattacaatagaaatggaagttttgaggaggaagaaaatcccccaaaatgtaagcaatggtaataatgcatttaaagtatagtctcacaaagtctcacttaagagagcagcacacccaggacacacatattgatctgctgacaccacttctttactatacttcatatagatgtcctcacatcttggatttacatgggttataactgcttaaa

SEQ ID NO: 45753 - DNA, 472 bp, Homo sapiens
  misc_feature (1)...(472): n = a,t,c or g
tttgnaanccccngctttgacatgattacgaatttaatacgactcactatagggaatttggccctcgaggccaagaattcggcacgagcaaagacacacccaagctcggtctcctcttggtgattctgggtgtcatcttcatgaatggcaaccgtgccagtgaggctgtcctctgggaggcactacgcaagatgggactgcgtcctggggtgagacatcccctccttggagatctaaggaaacttctcacctatgagtttgtaaagcagaaatacctggactacagacgagtgcccaacagcaaccccccggagtatgagttcctctgnnnnnnnngttcctaccatgagactagcaaggatgaaagtgctgagattcattgcagaggntcagaaagagacccttcgtgactggactgccaagttcatggaggcttganatnaggccttgatgcttggatctnttgaactga

SEQ ID NO: 45754 - DNA, 552 bp, Homo sapiens
ctgataccaaaacttgacagcacacaaggggaaaaaaagcagtagacaaggaacagcaaataaatttatcttgcatgccactttcagtcaacaggatgtggctctctagatagctgtgtttagaaggaatctgaggcttcagctcaccacaggggaaagactactgcgattgatagcaatatctgtgaacataagaaagaagaagtaaaaaaatcaatgatatatatcaaataataaggaatatacataccaaagagtgctgccccatactttcctcatctccctacaatgagtttcctaatacttctaggctcatgcacataaatacaaccccatgggaccctatatcccccagagaccgtaactgcccaatccaaagtgatgtacctacccaacatctcactcaacccagaagaaaccaatggcaccaaagttggcagcgaagttggcactggctgtaccaccaggaccaataatgggaccggcaaaggtctgagggaatctggagcgggcattctggtggtatctggcccagaaggtaaatggaattcc

SEQ ID NO: 45755 - DNA, 749 bp, Homo sapiens
gcccaacagcaacccacctgagtatgaattcctctggggcctgcgagcccgccatgagaccagcaagatgagggtcctgagattcatcgcccagaatcagaaccgagacccccgggaatggaaggctcatttcttggaggctgtggatgatgctttcaagacaatggatgtggatatggccgaggaacatgccagggcccagatgagggcccagatgaatatcggggatgaagcgctgattggacggtggagctgggatgacatacaagtcgagctcctgacctgggatgaggacggagattttggcgatgcctgggccaggatcccctttgctttctgggccagataccatcagtacattctgaatagcaaccgtgccaacaggagggccacgtggagagctggcgtcagcagtggcaccaatggaggggccagcaccagcgtcctagatggccccagcaccagctccaccatccggaccagaaatgctgccagagctggcgccagcttcttctcctggatccagcaccgttgacgaactgcagcgatcttactggccaagccagagcgcctcctctcagattccttctcgacacagcaccctaggcggcttcttcctgtcagtcggaggtggcatgcaagatgaagctctctttgctcttcctgctttcattttgtgcttttccttgtgttttcatgttttgggtatcagtgttacattaaagttgcaaaattaaaaaaaaaaaaaa

SEQ ID NO: 45756 - DNA, 1413 bp, Homo sapiens
  misc_feature (1)...(1413): n = a,t,c or g
attcggcacaggcgaatccctgcttaaaggccttgctttcttgtctaacgccgcaaccagtcctctgagttgccaacgtctttcttcttgtctcgacgccccgtntccggccacagcgattctctgcttagcaggatcggtccacagcgggacgtgagctttttcctcctcgcggcttaccgtcttctctccgcctagtgccaggtgctaataaagttgttgtttcaaatgcggccaggaacatcgcgagcggggaccaatcagagagtagctttgcctctataacggcgcgagagtgagacgtcatcggtgagcgactaacgctagaaacagtggtgcgcggagaggagaggcctcgggatgtctctggcagatgagctcttagctgatctcgaagaggcagcagaagaggaggaaggaggaagctatggggaggaagaagaggagccagcgatcgaggatgtgcaggaggagacacagctggatctttccggggattcagtcaagaccatcgccaagctatgggatagtaagatgtttgctgagattatgatgaagattgaggagtatatcagcaagcaagccaaagcttcagaagtgatgggaccagtggaggccgcgcctgaataccgcgtcatcgtggatgccaacaacctgaccgtggagatcgaaaacgagctgaacatcatccataagttcatccgggataagtactcaaagagattccctgaactggagtccttggtccccaatgcactggattacatcccgcacggtcaaggagctgggcaacagcctggacaagtgcaagaacaatgagaacctgcagcagatcctcaccaatgccaccatcatggtcgtcagcgtcaccgcctccaccacccaggggcagcagctgtcggaggaggagctggagcggctggaggaggcctgcgacatggcgctggagctgaacgcctccaagcaccgcatctacgagtatgtggagtcccggatgtccttcatcgcacccaacctgtccatcattatcggggcatccacggccgccaagatcatgggtgtggccggcggcctgaccaacctctccaagatgcccgcctgcaacatcatgctgctcggggcccagcgcaagacgctgtcgggcttctcgtctacctcagtgctgccccacaccggctacatctaccacagtgacatcgtgcagtccctgccaccggatctgcggcggaaagcggcccggctggtggccgccaagtgcacactggcagcccgtgtggacagtttccacgagagcacagaagggaaggtgggctacgaactgaaggatgagatcgagcgcaaattcgacaagtggcaggagccgccgcctgtgaagcaggtgaagccgctgcctgcgcccctggatggacagcg

SEQ ID NO: 45757 - DNA, 619 bp, Homo sapiens
  misc_feature (1)...(619): n = a,t,c or g
ggacgcaccatttatctggaggatatctatgtgatgccggaatatcggggtactgggcagaagctgaggctggggtgggagcaaagcaccccacagaccccactgttatcccctgtccccagagcccagccggtgtcattttctgatccccttcagctcaaagaatagctattttttgcctctttctctccacaacaggtcaagggattggttccaaaataatcaaaaaggtggctgaggtggccttggataagggctgctcccaattccgcctggccgtcctggactggaaccagagggccatggacttgtacaaggccctaggagcccaagatctgacggaagctgagggctggcacttcttctgctttcaaggagaggcaacgagaaagttggcaggaaagtgacgccatccctaggaggatctctgtcttgagtttctccttccccatcagctgaancactcttcagagactacgtccncanacactgatgctgangcctcccnggagnaaggagggntnggggtgcctatcctcaagtntnggaagagcagaattgagggngngacctttcttccttgttgangctgaaanntanataagaattncctgtccac

SEQ ID NO: 45758 - DNA, 2730 bp, Homo sapiens
  misc_feature (1)...(2730): n = a,t,c or g
ttttttttttttttttttcactttgcaatttcaatgtttatttctgataccaaaacttgacagcacacaaggggaaaaaaagcagtagacaaggaacagcaaataaatttatcttgcatgccactttcagtcaacaggatgtggctctctagatagctgtgtttagaaggaatctgaggcttcagcctcacacaggggaaagactactgcgattgatagcaatatccaacatctcactcaacccagaagaaaccaatggcaccaaagttggcagcgaagttggcactggctgtaccaccaggaccaataatgggaccggcaaaggtctgagggaatctggagcgggcattctggtggtatctggcccagaaggtaaatggaattctggaccagggatctccaaaatctccttcctcatcccaggtcagcagctcaaactcaatgtcatcccagctccagggcccagacacagcctcatctccaattcccatgcgggttcttgcttcagcccgggcttcggcctcagctgcagcagcatccagagcatccaaggcctcatctgcagcctccatgaactgtgcagtccagtcacgagggtctcttttctgaacctctgcaatgaatctcagcactttcatcttgctagtctcatggtaggaacggaggccccagaggaactcatactccggggggttgctgttgggcactcgtctgtagtccaggtatttctgctttacaaactcataggtgagaagtttccttagatctccaaggaggggatgtctcaccccagggacgcagtccccatcttgcgtagtgccctcccagaggacagcctcactggcacggttgcccattcatgaagatgacacccagaatcaccaagaggagaccgagcttgggtgtgtctttggtcggttcccagtatgccagccagggactcgggggtactgatgagaatatacaggtgttcttctttgtcaatttctttcagttgaatcccaaatttcttctctaggacaaagcatgcacgttcaatgatttctggataaacatcagtgtattcacggatgatatctctcagcatttctgagcgcttgatgggcacctttgtgtagtccttaagcatcaagtacttgaccaacttatttgctctttcctgaagaagggccacatctcggggctgtgcagcacctgggttctgtgaggcacgcgagttgggagaagggcgcaggttaggcgaggggcgcaggttctgccagtcaggtggaattggccaatcagcggggatccagtcaggtggtagtggccagtcagtgggaagtggccaatcaggtggcagtggccagtcgggtggtagcggccagtcaggaggaccttgccagtctggaggaccctgccagcccggtggggtctgccatccaggtggagtctgccatccaggtggattctgcccaggccagtggattcggccagacaacagggccgggcccagacaatggggtttggccaagatcactgggttctgccagattactgggtttggccaaatcactgggttctgccaagcgactgggttctgccaaggctgggtggggttctgcctaagctggaagggctctgacgtgctggtggggtctgccctggctgtctggttttgcccagcctgaggggttctgccaagccaatggcgtctgccagagcacattggggggtgcgccaggtgggttctgagtggtcactggaactggtgcagacctcccaggtccctgcagccagtggggcccgcctctgatccccactgctgttctcttcaacattcaagttattaatcttgcgggtcctcttgccccgaattattgtccgggactccagattctgagcctgggaaccatctgctgatgtctgtgcagttgcaccgtcaggttcagagatacctgggtcggtctctatgtcagcctgggaagtggccattttggcctgatttacattctgggtctgggtatcagctgttggggccttagtggtatcattccaagccttgaaaggggtcttaggcctgctgttggccaggtcattggcattgagagactgagagaaattgtaggtggcatttgggcccactttagtagtggcattctgggccttgaaggccatctcagacttgttagcagctaactcaccagtggttgctgcctgggaaaaatcataggcagcatttggaccctttggggtagcattttgggacttaaaggctgccttgggctgcgtgttgggcacatccttggcattatgagcctgagagaaatcatagacaccatttgggccttttgtggtggcattctggactttaaaggctgacttaggcctagcggcagctgctgaaacctgaatgtcagccatctcattggcagttgggggctgtgaactctggggactagcagctgcggtggcctggttagtaggtggagcctctgagatctggatggcctccatcaaggtctgcataagcaaggcgctgtcttctacggaggcctcagcctggaagccgaggaggcccgcaccacagtccattttctgagccatggctcctgtccctctggcaagagcggagcctgggggcttgcctcaggccccaaccccaaccccctcgctgcctcccttcttcacgactcagaggatcgggattgctgggctcggctntcagcagccgcactctctccttgtccc

SEQ ID NO: 45759 - DNA, 2232 bp, Homo sapiens
tttcagaaatggcaaatagatttaatgcagagtgtcaacttcaattgattgatagtggctgcctagagtgctgtgttgagtaggtttctgaggatgcaccctggcttgaagagaaagactggcaggattaacaatatctgaaaacacaagtaagagaaaataaaagggtcaattgacatccagcaaacagaaaggaataaaatgccaaaagcagtgtcttggcacactctccacatcattctccaacttgggccttcctagaatcatccagctcctcatcccagccccataagccccagatgtccccactgaaaccaaggcagatacctaaaatctcacttgtaggagaaaccacaggcaccagagctgccactggtgctggcaccagctccaccaaggccagcgaagagcccaaatgtgagagtggcggtcaggctggcaccagcactgaagccaccactggtgctggcactggcactggcactgttattggtactggtacttggcaccagtgctggcactgccactctcttgggctttggctttagcttctgctcccgcctggatccgggctttggcccagggtccgatatcagcttcgtcccagttgcagggcccggcagcattctccgagccgagcccaatgcccattcgagctctaatctcggccctagccttggcttcagctgcagcctcagctgcagccttcaaatccgcttccatcgcctctcggtactgagctgcccattccttgggatccttcttttgtaccttgcaggcaaacttgaggactttcatcttgctggtctcatagtaagagcgcaggccccagaagaactcatattcagggggattgctattggggactctggcatagtccaggtacttctgcttcacaaactcatcagtgatgagcttcttcacgtccccaaagagtgaatgatgtatcccagggcgcagccccaacttgcgcagcacctcccagatgacagcctcactggaccgatttccattcatgaagatgatgctaagaagcaccatgagcagacccagcttgggtgagtccttagtcgttcccagtatgcctgcatcagtgggctctaaggtgctgagaagaatgtacaagtggtcattcttatcaatttccttcaattgaatcccaaataccttctccaaggaatagcctgctcgttcaatgatttcggggtacacatcagtgtattctttgatgatgtccttcagcatgtccgagcgcttgatgggaatcttcgtctggtctttagccaaaaggtacttcaccaaatcatttgccctcccttgcaaaagggccacatcccgaggtggtggtgcttcaggctcttgggatgactggagcttggcagctctacggcgagccttgcccctacgggctttaggtgatctcagggagagcaaggctctccgggcccaagcagccaaccgagtccttgatgccctgcgggcccaaaaggctatgggaccccttgaagccctgcgggccattgaggccattagggcctttgagacccttcggccacctgtggttccagaagcctgactctgatcactgctgccatcctcttccccatccagatgcttcacctttcgggctttcttggctttgaccttgggccgagtatcctgattctcctgagactgggcagctgcactctcaggctcaggttcatctgctggggcctgagagggtgcagcctcagtctcctgagcctttgtattgaccttcgtatcagccacatggctgacctttttggtctcagtggcaggcattgtcacagcctgcgggtcagcattctgtttcttggtgtcagctgctagactcttgttttcagctgccagaacctgggtatcagtcagctgagtagtagacgaggcctgggtggcaggtgcctcccgagcctctggggtctttgagacctctgtggcctttgagaccccagaggcttttgagaccttcacatcctctgagacctccagtgcctttgaggccttcggtgtctctgggacctccacattctgggtcactgtcaacagagtctgcatcatcgagctactgtccttttctgaagcttcagcctggaagcgagttagacctgcaccactctcgcttgtgtcagacatgtctcaatttggcctggcaagagctgagcctcgtcctcctacaattaccgagtgcgtccactcactccaagcccc

SEQ ID NO: 45760 - DNA, 575 bp, Homo sapiens
acgcccaaggccccctggcccacagcatacatgcattccggaatggcagtatggtagagggataaatagggggcggggagggatagtcatggatccaagaagtccttagaaatagtggcagggaacaggtgtggaagctcatgcctgtaattataaccttcagctactaagacaggtgtggtggctcacgcctgtgattataatcttcagttactaagacagagtccatgagagtgttaatgggacattttctttagataagatgttttatatgaagaaactgtatcaaagggggaagaaaatgtatttaacaggtgaatcaaatcatgcgtgacctgggaatctcagagaagtaaagaactgactcctaatatggcaacttgtcaggaatattcaaagttttccgttattgtccacagatcctgagactggacataaattttctccaaaagagctagacacaatccctttgtgccgtgttatctgatgccagaacactgtttagctgttcaccccacaggccaaaactgctatttgctacctcatgaatgcagctacaggttatccccacatat

SEQ ID NO: 45761 - DNA, 1167 bp, Homo sapiens
  misc_feature (1)...(1167): n = a,t,c or g
ctgcggctcgcaggatggatcccgtacccgggacagactcggcgccgctggctggcctggcctggtcgtcggcctctgcacccccgccgcgcgtntcgagcgcgatctcctgcaccgtcgagggggcacccgccagctttggcaagagcttcgcgcagaaatctggctacttcctgtgccttagttctctgggcagcctagagaacccgcaggagaacgtggtggccgatatccagatcgtggtggacaagagccccctgccgctgggcttctcccccggtctgcgaccccatggattccaaggcctctgtgtccaagaagaaacgcatgtgtgtgaagctgttgcccctgggagccacggacacggctgtgtttgatgtccggctgagtgggaagaccaagacagtgcctggataccttcgaataggggacatgggcggctttgccatctggtgcaagaaggccaaggccccgaggccagtgcccaagccccgaggtctcagccgggacatgcagggcctctctctggatgcagccagccagccaagtaagggcggcctcctggagcggacagcgtcaaggctgggctctcgggcatccactctgcggaggaatgactccatctacgaggcctccagcctctatggcatctcagccatggatggggttcccttcacactccacccacgatttgagggcaagagctgcagccccctggccttctctgcttttggggacctgaccatcaagtctctggcggacattgaggaggagtataactacggcttcgtggtggagaagaccgcggctgcccgcctgccccccagcgtctcatagtccctcacccttccgcggaaagagcccccttactccacctccccgccagcctggggccaccccccctcactgcatcctggggccaccccccctcactgcatcctgggaaccttcgccctgcaaggcgtttgctatcttcagccactgggcggagctgcagccctggaggagggggcgggtcgaggctgcgtggtgatgggtctccgcccaccaacgtgccgggcagggctggagctggacagaagccagtgcctttaagtcatttgtgtcaaaaccctctggggtccggaggctgtgcgggtgtcctcctggcaataaacactacccggt

SEQ ID NO: 45762 - DNA, 450 bp, Homo sapiens
  misc_feature (1)...(450): n = a,t,c or g
gactgcagctcgacaggaatggtcaaagaaaacaattatcggggacatggggatagtgtggaccagctttgttggcatccaagtaatcctgacctatttgttacggcgtccggagataaaaccattcgcatctgggatgtgaggactacaaaatgcattgccactgtgaacactaaagctacccagaactgaagcctgtgcagtccatcaacgcccatccttccaactgcatctgtatcaagtttgaccccatggggaagtactttgccacaggaagtgcagatgctttggtcagcctctgggatgtggatgagttagtgtgtgttcggtgcttttccaggctggattggcctgtaagaaccctcagtttcagccatgatgggaaaatgctggcgtcagcatcggaagatcattttattgcattgcttaagtggagaanggggaccaact

SEQ ID NO: 45763 - DNA, 4899 bp, Homo sapiens
atgggcaaaggagatcctaagaagccgagaggcaaaatgtcatcatatgcattttttgtgcaaacttgtcgggaggagcataagaagaagcacccagatgcttcagtcaacttctcagagttttctaagaagtgctcagagaggtggaaggtaagagggcttaaaacatgctaacaaggtaattaaaagacagtttccaattgaggatgcaaaaaaaagcctagttggcattctcgtagtgggacgctattacatagcaaaagacattggttttgaggataatttacttaaatgttacaacttaaacttacaaattaattattttgtagaccatgtctgctaaagagaaaggaaaatttgaagatatggcaaaagcggacaaggcccgttatgaaagagaaatgaaaacctatatccctcccaaaggggagacaaaaaagaagttcaaggatcccaatgcacccaagaggcctccgtgagtatcttgcctgtttttacttcccagacacgttttacagtagaatctgagagaaatttagcaagctactttgtcagtttagagtgtaaatgtacaatcaaagtttcttagctaatacttgttcatattggttatatttaaatagtataaaattcctgttgggtgggagtgttcccagagcatttgaattagacatttggtctcctttgcccagtgtatctccttttgatctttttatttcttgaaaaatactatccctttgaaatagtgtaattgtagaatgttcatctagggttctagctagtataaattaaatagttgtaaattaagctttggttgtgaaggatatttagtatattatagtatttgcaccctgtccaatgcatcacagaaattcacaggcagctttaaatagcaatgcagtgtacacctgatagtatttgtttttgtgatctgttaacttaaaatcctaaaattaattttttttttagttcggccttcttcctcttctgctctgagtatcgcccaaaaatcaaaggagaacatcctggcctgtccattggtgatgttgcgaagaaactgggagagatgtggaataacactgctgcagatgacaagcagccttatgaaaagaaggctgcgaagctgaaggaaaaatacgaaaaggtaagaagtgtgggtttgcttggtaaaatgatgacaagtacgccagatgtatgattgtacttagtttgaggtgtaataagtttttagggtaacagctacattaagtatggtgttgatataagtcctcatccttcaaagaatgcagaggaccaaataaattagggtttttttgactaaaatgtaatcagactcagacaaaggctgtgtacatttatgttggttttgttattccccagtatcttgaagttcatgaaaatgttggtagtcacttcaagtcaaaaatgagcattttcaaatggcttggcatacagtacaaaaacaggctagacaaagtaatataggctatatttttcttagtcatatcctgaaacatttatgttcttttcctttagatactcaaaaaaccacagcatcactaagttaaattacaagtctgctgctctgtccagtacattaataagattaaggaaatctataactcttatagttcagtaaattgaaatattaaatacttaattttcagctttagtcattctgaaaagtgtttatttctagatgtttcttaacctaattgcatttttattgacaaattaccttttttttttaagaccacatttcctactaaggattaaggtctgacagtgtaaacctgtagagtgcttttttgcattcagagaggtggcagtgtctaccctttaatcaaagtctctacattctggttttaatagagttaggatctggtagataattgcacctcaatgaggcataactttgcaaatattagactatgccatttcatgagttatagattgttataatgatcttgtatttttatgttcatttattgaagttctagttatttctggagttgctgtggatctacagatacgtgatattttggtataactagaatcttgatttctttcataaagttctgccatgttctatttctttccttaatctttttttcttccctactgttttatcctccctttgctttggaaggatattgctgcatatcgagctaaaggaaagcctgatgcagcaaaaaagggagttgtcaaggctgaaaaaagcaagaaaaagaaggaagaggaggaagatgaggaagatgaagaggatgaggaggaggaggaagatgaagaagatgaagatgaagaagaagatgatgatgatgaataagttggttctagcgcagtttttttttttcttgtctataaagcatttaacccccctgtacacaactcactccttttaaagaaaaaaattgaaatgtaaggctgtgtaagatttgtttttaaactgtacagtgtctttttttgtatagttaacacactaccgaatgtgtctttagatagccctgtcctggtggtattttcaatagccactaaccttgcctggtacagtatgggggttgtaaattggcatggaaatttaaagcaggttcttgttggtgcacagcacaaattagttatatatggggatggtagttttttcatcttcagttgtctctgatgcagcttatacgaaataattgttgttctgttaactgaataccactctgtaattgcaaaaaaaaaaaaaaagttgcagctgttttgttgacattctgaatgcttctaagtaaatacaattttttttattagtattgttgtccttttcataggtctgaaatttttcttcttgaggggaagctagtcttttgcttttgcccattttgaatcacatgaattattacagtgtttatcctttcatatagttagctaataaaaagcttttgtctacacaccctgcatatcataatgggggtaaagttaagttgagatagttttcatccataactgaacatccaaaatcttgatcagttaagaaatttcacatagcccacttacatttacaaactgaagagtaatcaatctactcaaagcatgggattattagaatcaaacattttgaaagtctgtccttgaaggactaatagaaaagtatgttctaacctttacatgaggactctattctttaactcccattaccatgtaatggcagttatattttgcagttcccacattaaagaagacctgagaatgtatccccaaaagcgtgagcttaaaatacaagactgccatattaaattttttgttgacattagtctcagtgaagactatgaaaatgctgggctatagatgtcttttcccatttatctaaatatggactgctcaggaaacgagactttccattacaagtatttttaattaattgggccagcttttcaaacaaagatgccacattcaaaatagggtatattttcctatattacggtttgcccctttataaatccaagtagataggaagaaagaagacaaactttgcatctcagtatgaattattcaatttatttgaatgatttttctttacaaaacaaactcattcattagtcatgtttatctgcttaggagtttagggaacaatttggcaattttgtggttttcgagattatcgttttcttaaagtgccagtattttaaaatagcgttcttgtaattttacacgcttttgtgatggagtgctgttttgttatataatttagacttggattctttccatttgcatttgtttatgtaatttcaggaggaatactgaacatctgagtcctggatgatactaataaactaataattgcagaggttttaaatactagttaaatggctttcacttaagaacttaagattttgttacatatttttaaatcttgtttctaataatacctcttagcagtaccttttaaataagtataagggatggcaaagtttttccctttaaaaatactcactttatgcttataaataggttaatgggctgataaaaggttttgtcaaacattgcaagtattcggtgctatatataaaggaggaaaaactagttttactttcagaatgatttaaacaagatttttaaaaacaagatacatgcaagcgaacagcagggttagtgataggctgcaattgtgtcgaacatcagattttttgttaagaggagcaaatgactcaatctgatttagatggaagtttctactgtatagaaatcaccattaattcaccaacattaataattctgatccatttaaaatgaattctggctcaagggagaatttgtaactttagtaggtacgtcatgacaactaccatttttttaagatgttgagaatgggaacagtttttttagggtttattcttgaccacagatcttaagaaaatggacaaaacccctcttcaatctgaagattagtatggtttggtgttctaacagtatcccctagaagttggatgtctaaaactcaagtaaatggaagtgggaggcaatttagataagtgtaaagccttgtaactgaagatgattttttttagaaagtgtatagaaactattttaatgccaagatagttacagtgctgtggggtttaaagactttgttgacatcaagaaaagactaaatctataattaattgggccaacttttaaaatgaagatgctttttaaaactaatgaactaagatgtataaatcttagtttttttgtattttaaagataggcatatggcatattgattaacgagtcaaatttcctaactttgctgtgcaaaggttgagagctattgctgattagttaccacagttctgatgatcgtcccatcacagtgttgttaatgtttgctgtatttattaattttcttaaagtgaaatctgaaaaatgaaaaaaaaa

SEQ ID NO: 45764 - DNA, 470 bp, Homo sapiens
aaagttcctgtatacccttcacccagccctaacccccaggtcaacatcttaacatcaaccatggtacatctgtcaaaaccaagagactgaaattggtatattaactaaaattcagacttttttcagatttccaattttcccactaatgtcctgtttttgttccaagacccaatccaggatgccacattgcactgaagacactctcccttttcaattctattactggtcacctcagtcaactttcccggggaaagagaatgcatgggaaaagctcttgtccttattattgaactggagaaactgaggcttaaaagtgccgagtgaccaagttcccttagagggcagtgagaacaaggcctgccttactctgttccctttccccagggactcttggttttcagaagcccctctggaatgtcctacctggcctaaccccataccagcagtgcagacaaggaggcactcctact

SEQ ID NO: 45765 - DNA, 3257 bp, Homo sapiens
acgccattaccgccggagccgccgagagccttagccgacggaaactggacactggaccggcagcgcattgagactcctcccccgcttgctgctgcttctcttactcgtgttccctgccactgtcttgttccgaggcggccccagaggctcgttagcagtggcacaagatcttacagaggatgaagaaacagtagaagattccataattgaggatgaagatgatgaagccgaggtagaagaagatgaacccacagatttggtagaagataaagaggaagaagatgtgtctggtgaacctgaagcttcaccgagtgcagatacaactatactgtttgtaaaaggagaagattttccagcaaataacattgtgaagttcctggtaggctttaccaacaagggtacagaagattttattgttgaatccttagatgcctcattccgttatcctcaggactaccagttttatatccagaatttcacagctcttcctctgaacactgtagtgccaccccagagacaggcaacttttgagtactctttcattcctgcagagcccatgggcggacgaccatttggtttggtcatcaatctgaactacaaagatttgaacggcaatgtattccaagatgcagtcttcaatcaaacagttacagttattgaaagagaggatgggttagatggagaaacaatctttatgtatatgttccttgctggtcttgggcttctggttattgttggccttcatcaactcctagaatctagaaagcgtaagagacccatacagaaagtagaaatgggtacatcaagtcagaatgatgttgacatgagttggattcctcaggaaacattgaatcaaatcaataaagcttcaccaagaaggttgcccaggaaacgggcacagaagagatcagtgggatctgatgagtaaatgttcctttgtgcaacaattcggtctttacttaacctgccctaatatttttcggcctgatgggaattagtgcagagaagccatgtcaccatagaaggcaactcctacttgtgtgtggactgagcaatcagagtctgtggcgataatattgctgaaaatgcactgcattcatttttctaaagtaacaaatttggtttttttttaaaccattaaaatctatgtgtgtgcgtgtgtatgtatgtgagcagttggtcttaccagaatcattgttgaactacctgaaacaagtctttagaatactaaatataatgctgttgtctcttcctttttgacattttctgattttttcccccaaaactcagttaatatttacccactatgattattgatgtcctgccttgaacagttttaaagaaaacaatttttggaatagctcaaatttcaattgatggcacaaatcagcattttgttgttgttactgtattacaattagtattctaaaggcagaagcagaagtagctgctttttagcaatagaattgtttcagtattttgctgctgtttaatgcgcatcttcagaaaacttcccagtggcttcaaggaatttggggatctctctggcaacaaattgtgaaacatgaaatttctgctgactttaatatatgaaacctaatcctacccccttttttaacaaaaagaaactagtacatttgtgaaaattgtgttgtgttgtccattgttgctctagttctgaccccagaggtagctctggagtgattttagacctactcactcagttgtgtgtaggtttttttgttttgttttgagagagaatttttctctccttaatagaagcatcctttttaaagagaagttgccttggtccacacactaagcagaaaacccaagttatcaggacagagatatttcccagttactcctaatcaatgaagaaagtgagttggatatttttaaagcagttaactaattttttcttacctaatcttttgggagttttgcttgttgatataacctttttagttaacctgaaagattccaaaaattgttcttaagtgcttgagactggaaccaaaattaaattgtacttcataaaatcctcttatagagttactcttgccctagattgtaaattaagtttggcattattgtcagactggatggagggtgaagtaaaatagtatgaacaattaagaggctctccccctcttgtctttaagccatattctcctacatgtattttataagaaaatgttaagtcaaattttagtggctctttaattcctgacctcttcattctccttttcagtataacctcccctatgctcatgcccacacagacaaaaaaacaaaacgaaatacacacagaaaaaagtctttccaaactgtttaagtatttaaacatctgagccaaagcagatagaagttattgtataattgttaatcactttgcaaataggggctatcagattacctatattggcattgctggattataaactctatatctgtaatataaagtgtttgagtttttaattgggctgttatgatcagtagttgattttgagaaagctctatgagctctaagtaactgcatggttttttgtttaatgtaatataggagacccttcacattcccaaggaatatattccaaaacatttttgtggaatatctaagtttgtgaaactactagggcatgatacagtaaggtgtaattacagaatttacgaaatgtaaatgacctctacagagttttatggaatacctgggtactaacgtaggcagctgcaaaaccacactgagttacagctgtcagccctcctcattcctaaataacttgccttacatatcagccctcccacttctgaagttcaaattagtgcctcggaaatgtagaatttattatttgtcattttttttttttttagcatagattgagaacagttgaactcttaaatcctcagatgccaggggtctgctctagcatcagtaagtatttagcagaaactaactccgtaatgaatggaattcaattccacacatggtttgttcaagcacacttaataagtagcctattttttaaatgtctttttaaaatgtaaatatttggatgaagtttttctttgttttgatatattcatttgctacaccaactatgttttcagaattcatcttttgaacaacttggtttcagaatatgtaaaatgactttaaggatcttgtgtatcaaacctatccccggatgtgtgagaataatgtgttcataaagcatggatctcgctttggtaaaaaaaaaaaaaaaaaaaaaaaa

SEQ ID NO: 45766 - DNA, 1104 bp, Homo sapiens
tttaatgataggtgtcatatataggacggagaatctgtttacattctgttcttctcgatgcactcacaagcgggtaactaggtgacaagaaaacaaagatcttattcaaaagaggtcttacagcaacccaacgtctcatcttcccatagtaaagatgacggcgccttgaggtaagctacaggcaacaccacttccgcgtttctcttgcgccctggtccaagatggcggatgaagccacgcgacgtgttgtgtctgagatcccggtgctgaagactaacgccggaccccgagatcgtgagttgtgggtgcagcgactgaaggaggaatatcagtcccttatccggtatgtgggagaacaacaagaatgcttgacaacgattggttccgactggagtccaacaaggaaggaactcggtggtttggaaaatgctggtatatccatggacctcctgaaatatgagtttgacatcgagtttgacattcctatcacatatcctactactgccccagaaattgcagttcctgagctggatgggaaagacagcaaagatgtacaggggtgggcaaaatatgcctgacggatcattttcaaacctttgtgggccaggaatgtgcccaaatttggactagctcatctcatggctctggggctgggtccatggctggcagtggaaatccctgatctgattcagaagggcgtcatccaacacaaagagaaatgcaaccaatgaagaatcaagccactgaggcagggcagagggacctttgataggctacgatactattttcctgtgcatcacacttaactcatcttaactgcttccccggacaccctccacctctagttgttactaagtagctgcagtaggcattgctggggaagaaacaaacacacaccaaacagtactgctacttagtttctaaggctgcacagggaagggaaagactgggctttggacaatctagaggtaatttatatccgcccccaggtggagcaacatgcgattctggaggcacgggggtaactgaaagtgagtacatatagtctttctggtttctggagataacccatcaataaaagctgcttcctctggtaaaaaaaaa

SEQ ID NO: 45767 - DNA, 389 bp, Homo sapiens
gtgtcccactgctcaaagggcaacaactttaagaacagaagcaaagagtggtggtgtggaacccaagattcttggcgactagggaatttaaaggttggggaggaggaattcaatgatttgacaagaaatactttataaaaatttgctccatgtattggctaagaaaaatataataaaattttggtagtgaaaattgtatcactaatgtttaccaatattactagtatgaataatacacataaggtagtgacttggaagctgctcaatactttgttgctataacaaaatgcaatattttgttgtaaagcatcttaactacacatataagtttgctgaacttgaatacatcccggtaatggcaaacttcattttattcttggttttcattt

SEQ ID NO: 45768 - DNA, 1083 bp, Homo sapiens
  misc_feature (1)...(1083): n = a,t,c or g
agcggttactcgacgtttcgggcggcgcggaaacgggcgggtctggcggcccaaccccctgctgccagtcagggcgcacaaaccccaggagagaaggcggaanagcaagcgactctaaaggcagcccaggctggcctaaaacggttcctggtatggaaacctaggcccgcgaagtgcccgggccaagccgncntaagttcaggaagcggctcagccccagggcagcacatcagagacaccatggaacacagccattcctctgccgtcgtgctgggaccagtctttcctgaccaatatcaccttcttgaaggttcttctctggttggtcctgctgggactgtttgtggaactggaatttggcctggcatattttgtcctgtccttgttctattggatgtacgtcgggacacgaggccctgaagagaagaaagagggagagaagagcgcctactctgtgttcaatccaggctgtgaagccatccagggcaccctgactgcagagcagttggagcgcgagttacagttgagacccctggcagggagataggacccagctgtgctgtcatgcagctaacctctgatgtggtcttcctcaccattggctatggatttgatttcaggtgtataggactaagggcagcttgcgggttagctctgtgactgcatagtttttctaccttctttccctgatcttttgctgccatttgatctttgatagttttggtgaaactctctaaaatacattcactgtgggtccgacgcaatttataaaaattatgtactcaagaagggagacctgtttgtttcatttctcatctgtttgggagatgattttagagcactagaaaggcactggggagattctcagcttaaaacatccagcagtttgaagtatgattaggtacatcagggctgcattgtcaatgttctctttaagtcttttaacatttatagcaattttttttttcccggagagtttaggttgcaagttttgggtttcttgtttgtttttgttttgcttcctgctttaattctttaattttcagtcattactggtattgaaaaataaaatatctttaaaac

SEQ ID NO: 45769 - DNA, 250 bp, Homo sapiens
gggaaacaagcatccccacaggctgtatatgaagatgcaaatttgttaaacatctgtccagatttaaaaggcagataccctttgacccagccatttcccttttaggaacttaacagataggaatttgcaaaaataaaaaagcaatgactggataaggatttccattatagcgctgtttataataacatcaaaacaaaataaaacaaaactgggctgggcgtgatggtcacgcctgtaatcccagcacttt

SEQ ID NO: 45770 - DNA, 520 bp, Homo sapiens
gcggcagagcagggcggcggcgactcgatccttttgtgacacgcctggcccctcagccacagtcaaaagcagggtaccaccatcttaaggacagaaaagctacaggactctaggaggccaccgtcctgatttgggaagtccaacttactttggccagacagcagctaagctggttcatcccatcagcctggattggtgaaactgaatcacaggagatatttccaggtttgctgggatgggaaacctgctcaaagtccttaccagggaaattgaaaactatccacactttttcctggattttgaaaatgctcagccctacagaaggagagagagaaatctggaaccagatcagcgcccgtccttcaggattctgagagccatccttgcagacctgcaggcttacaaaggcgcaggcccaagaagatcccgaagatgcaattcaaaatcccaatggacattcaagcttcaagaaaaagcttggaatgcggtgtgcctctttgttgtgaggctaaagaggggg

SEQ ID NO: 45771 - DNA, 772 bp, Homo sapiens
cttctcccgagccgagcacgaaggtttcagaggaagccgagtcccagcagcagtgggatacttcaaaaggagaacaagtttcccaaaacggtttgccagctgaacagggatctccacgggttagttaccgctctcaaacctaccaaaactacaaaaactttaatagcagacggacagccagtgaccagccatggtctggactgtgaagttcactaccatttgtcaagaatcaccctttccaaatcctctgggttttgactttttggcttccacttcacccaaaatgttaaaatttttacttaattcatagccttccttggtttcatatttgtttgcatttaattcatgtttgagtctcttaactgatggatgcccacttgccttaaagcagcatacttattttttgtttatttattgtgagctttttactttattaagattttacagcgaaacccttacatgagtaattgaaatgaaattaaatgagattacagcataatgaagaagaaaactagaatctaacaggtatgacacattcagttattctaacagggcacagtactgtgctatatgtagccgcctttacagatgttattaacctatagtagtttactattaactaggaagactggtgtatgaggagggagacattctgtaataagattaaaacctaaagtcagctgtgtaacattccatgaaagatgcattcatttattgaagatgacaaaaaagggagtcagatatattctggaagctattttaattttaggct

SEQ ID NO: 45772 - DNA, 969 bp, Homo sapiens
gcggccagcgcgtggtttttagcggctctctgggtagcagggtggtgtgatagcggcagcgaggggctcggagaggtgctcggattctcgtagctgtgccgggacttaaccaccaccatgtcgagcaaaagaacaaagaccaagaccaagaagcgccctcagcgtgcaacatccaatgtgtttgctatgtttgaccagtcacagattcaggagttcaaagaggccttcaacatgattgatcagaacagagatggtttcatcgacaaggaagatttgcatgatatgcttgcttcattggggaagaatccaactgatgagtatctagatgccatgatgaatgaggctccaggccccatcaatttcaccatgttcctcaccatgtttggtgagaagtttaaatggcacagatcctgaagatgtcatcagaaatgcctttgcttgctttgatgaagaagcaactggcaccatacaggaagattacttgagagagctgctgacaaccatggggggatcggtttacagatgaggaagtggatgagctgtacagagaagcacctattgataaaaaggggaatttcaattacatccgagttcacacgcatcctgaaacatgggagcccaaagacaaagatgactgaaataacttcaaattccagccaaacgttccttgttgccactttgggtattctgagattttctcttgcatgcccttagctttacagcttttgcatttcctgttgtatttattctcagccattttgggcatatgtatctttataatcagactggaaacgggactttctattaatatcattttcagaataaaaaataggataatttaacctaccagcccttctcccccaataactgtggtctatacagagtcaatatattttttcagagaaagttattcgctcgattttttctgaatcataattaaactttatgataaaataaaaaaaaaaaaaa

SEQ ID NO: 45773 - DNA, 1397 bp, Homo sapiens
  misc_feature (1)...(1397): n = a,t,c or g
ccactccgaagtgtgtgggttgctagaaacccacccggctttgcttttgttgaatttgaagatccccgagatgcagctgatgcagtccgagagctagatggaagaacactatgtggctgccgtgtaagagtggaactgtcgaatggtgaaaaaagaagtagaaatcgtggcccacctccctcttggggtcgtcgccctcgagatgattatcgtaggaggagtcctccacctcgtcgcagagtcaccatcatgtctcttctcaccaccctctgaatctgcattagccagtcaactagccctttcagcgtcatgtgaccagcgcgccccattcagcttggctggtcgtcgtttcacatgacccaggctggccagtcgtcaggttgcaccgccctttggttcccgagcatgctgttttctctcagccttctctccaaccttaaccaaatcggcagcagccacctcgaccgcccacacattcctggccaatcagctcagctgtttatttaccaaatgtcttcacaacaactacagcagcagccttcggctaacaaaaaaagcaggaaaaatccacaacacccccttcgccaaccaactaaatccaacgcaacatctggcaaaaccttttcagcaaattcttcctggccgtcagtccggcagcctcacctcaccatttctagcttgttgaaacccaaaactagtaagtttttcctgcttatacagtttactgctggttaaaataaggagtaagcggcttaaagtaattcttttttctggatcaaaggctggctgtgcataattgaatggtaacgtacatatatattgcttgaaaaacttttaagggtgatagggaactcgtaatgtaactaggccttcaagtgaaacttatttgcatgtgcaagatgccaaactaaaaattttaatatctctaacagattagcttttctggcaaaaatttgttgaatcctatcacctttaaatggttttactaacagtttcaaaatttaaaattttggggttgaagtgtgggccaagctaaggtaattttggtaagcctaaacacactcttaaatgtgacgatcacaaatgcagttctaatgtagcacttaatggcatcaatatttacacctaccgcgttttcacaaaattacactatccacctggtacctaagtcttgtcatggacttacaggtttgcatgggttccaaatactggtttatggtactgtttttggaactactngtgggacnatattttggtgtggtgtttgggtagtgaagttagtttgacatgnagttttgcattggacagatctgctgtgaagcattctttgttaaagtgaatccatggttggaatacctgcttttcacttgagctttttgattcttaatccttctgtg

SEQ ID NO: 45774 - DNA, 5517 bp, Homo sapiens
  misc_feature (1)...(5517): n = a,t,c or g
ctcctccccatcctctccctctgtccctctgtccctctgaccctgcactgtcccagcaccatgggacccacctcaggtcccagcctgctgctcctgctactaacccacctccccctggctctggggagtcccatgtactctatcatcacccccaacatcttgcggctggagagcgaggagaccatggtgctggaggcccacgacgcgcaaggggatgttccagtcactgttactgtccacgacttcccaggcaaaaaactagtgctgtccagtgagaagactgtgctgacccctgccaccaaccacatgggcaacgtcaccttcacgatcccagccaacagggagttcaagtcagaaaaggggcgcaacaagttcgtgaccgtgcaggccaccttcgggacccaagtggtggagaaggtggtgctggtcagcctgcagagcgggtacctcttcatccagacagacaagaccatctacacccctggctccacagttctctatcggatcttcaccgtcaaccacaagctgctacccgtgggccggacggtcatggtcaacattgagaacccggaaggcatcccggtcaagcaggactccttgtcttctcagaaccagcttggcgtcttgcccttgtcttgggacattccggaactcgtcaacatgggccagtggaagatccgagcctactatgaaaactcaccacagcaggtcttctccactgagtttgaggtgaaggagtacgtgctgcccagtttcgaggtcatagtggagcctacagagaaattctactacatctataacgagaagggcctggaggtcaccatcaccgccaggttcctctacgggaagaaagtggagggaactgcctttgtcatcttcgggatccaggatggcgaacagaggatttccctgcctgaatccctcaagcgcattccgattgaggatggctcgggggaggttgtgctgagccggaaggtactgctggacggggtgcagaacctccgagcagaagacctggtggggaagtctttgtacgtgtctgccaccgtcatcttgcactcaggcagtgacatggtgcaggcagagcgcagcgggatccccatcgtgacctctccctaccagatccacttcaccaagacacccaagtacttcaaaccaggaatgccctttgacctcatggtgttcgtgacgaaccctgatgctctccagcctaccgagtccccgtggcagtccagggcgaggacactgtgcagtctctaacccagggagatgcgtggccaaactcagcatcaacacacaccccagccagaagcccttgagcatcacggtgcgcacgaagaagcaggagctctcggaggcagagcaggctaccaggaccatgcaggctctgccctacagcaccgtgggcaactccaacaattacctgcatctctcagtgctacgtacagagctcagacccggggagaccctcaacgtcaacttcctcctgcgaatggaccgcgcccacgaggccaagatccgctactacacctacctgatcatgaacaagggcaggctgttgaaggcgggacgccaggtgcgagagcccggccaggacctggtggtgctgcccctgtccatcaccaccgacttcatcccttccttccgcctggtggcgtactacacgctgatcggtgccagcggccagagggaggtggtggccgactccgtgtgggtggacgtcaaggactcctgcgtgggctcgctggtggtaaaaagcggccagtcagaagaccggcagcctgtacctgggcagcagatgaccctgaagatagagggtgaccacggggcccgggtggtactggtggccgtggacaagggcgtgttcgtgctgaataagaagaacaaactgacgcagagtaagatctgggacgtggtggagaaggcagacatcggctgcaccccgggcagtgggaaggattacgccggtgtcttctccgacgcagggctgaccttcacgagcagcagtggccagcagaccgcccagagggcagaacttcagtgcccgcagccagccgcccgccgacgccgttccgtgcagctcacggagaagcgaatggacaaagtcggcaagtaccccaaggaagctgcgcaagtgctgcgaggacggcatgcgggagaaccccatgaggttctcgtgccagcgccggacccgtttcatctccctgggcgaggcgtgcaagaaggtcttcctggactgctgcaactacatcacagagctgcggcggcagcacgcgcgggccagccacctgggcctggccaggagtaacctggatgaggacatcattgcagaagagaacatcggtttcccgaagtgagttcccagagagctggctgtggaacgttgaggacttgaaagagccaccgaaaaatggaatctctacgaagctcatgaatatatttttgaaagactccatcaccacgtgggagattctggctgtcagcatgtcggacaagaaagggatctgtgtggcagaccccttcgaggtcacagtaatgcaggacttcttcatcgacctgcggctaccctactctgttgttcgaaacgagcaggtggaaatccgagccgttctctacaattaccggcagaaccaagagctcaaggtgagggtggaactactccacaatccagccttctgcagcctggccaccaccaagaggcgtcaccagcagaccgtaaccatcccccccaagtcctcgttgtccgttccatatgtcatcgtgccgctaaagaccggcctgcaggaagtggaagtcaaggctgccgtctaccatcatttcatcagtgacggtgtcaggaagtccctgaaggtcgtgccggaaggaatcagaatgaacaaaactgtggctgttcgcaccctggatccagaacgcctgggccgtgaaggagtgcagaaagaggacatcccacctgcagacctcagtgaccaagtcccggacaccgagtctgagaccagaattctcctgcaagggaccccagtggcccagatgacagaggatgccgtcgacgcggaacggctgaagcacctcattgtgaccccctcgggctgcggggaacagaacatgatcggcatgacgcccacggtcatcgctgtgcattacctggatgaaacggagcagtgggagaagttcggcctagagaagcggcagggggccttggagctcatcaagaaggggtacacccagcagctggccttcagacaacccagctctgcctttgcggccttcgtgaaacgggcacccagcacctggctgaccgcctacgtggtcaaggtcttctctctggctgtcaacctcatcgccatcgactcccaagtcctctgcggggctgttaaatggctgatcctggagaagcagaagcccgacggggtcttccaggaggatgcgcccgtgatacaccaagaaatgattggtggattacggaacaacaacgagaaagacatggccctcacggcctttgttctcatctcgctgcaggaggctaaagatatttgcgaggagcaggtcaacagcctgccaggcagcatcactaaagcaggagacttccttgaagccaactacatgaacctacagagatcctacactgtgggccattgctggctatgctctggcccagatgggcaggctgaaggggcctcttcttaacaaatttctgaccacagccaaagataagaaccgctgggaggaccctgggtaagcagctctacaacgtgggaggccacatcctatgccctcttggccctactgcagctaaaagactttgactttgtgcctcccgtcgtgcgttggctcaatgaacagagatactacggtggtggctatggctctacccaggccaccttcatggtgttccaagccttggctcaataccaaaaggacgcccctgaccaccaggaactgaaccttgatgtgtccctccaactgcccagccgcagctccaagatcacccaccgtatccactgggaatctgccagcctcctgcgatcagaagagaccaaggaaaatgagggtttcacagtcacagctgaaggaaaaggccaaggcaccttgtcggtggtgacaatgtaccatgctaaggccaaagatcaactcacctgtaataaattcgacctcaaggtcaccattaaaaccagcaccggaaacagaaaagaggcctcaggatgccaagaacactatggatccttgagatctgtaccagggtaccgggggagaccagggatgccactatgtctatattgggacatatccatgatgactgggctttgttccaaatacagatgacctgaagcagcctgggccaatggtgttgacagatacatctccaagtatgagctggacaaagctttctccgataggaacaccctcatcatctacctggacaaggtctcacactctgaggatgactgtctagctttcaaagttcaccaatactttaatgtagagcttatccagcctggagcagtcaaggtctacgcctattacaacctggaggaaagctgtacccggttctaccatccggaaaaggaggatggaaagctgaacaagctctgccgtgatgaactgtgccgctgtgctgagggtgagttccctgaggagaattgcttcatacaaaagtcggatgacaaggtcacccctggaagaacggctggacaaggcctgtgagccagggagtggactatgtgtacaagaccccgactggtcaaaggttcagctgtccaatgactttgacgagtacatcatggccattgagcagacccatcaagtcaggctcggatgaggtgcaggttggacagcagcgcacgttcatcagccccatcaagtgcagagaagccctgaagctggaggagaagaaacactacctcatgtggggtctctcctccgatttctggggagagaagcccaacctcagctacatcatcgggaaggacacttgggtggagcactggcctgaggaggacgaatnnnnnnnnnnnnnnnnnnnnnnnnnnnnnnnnnnnnnnnnnnnnnnnnnnnnnnnnnnnnnnnnnctgataaactagcctgcaccctcctcccactgcaatgtctagttaactttgtaatcccacaggttttcttttcgctccattgagaaagccacttttaatattttaaagttgctctctgtaccacccccaccttccccccatgcctcctaaggaatcaaagttcaaaccagactctgagtgggggatgggtgagattatcagaccaagttagttctttagattgcttagaggcccagaagggtttcaagccctttgaaggggtatttgggtggcacctggcatcctttgtttctggcaacagagtgcactcggcactcctggggggcaagggcttcctcccatccttggcttatggaaagccatcccagatcaggccccccaactctccagaacaggctacaaacatgcaaattagaattcttttaatataaaaaaaagtactaaaataaaa

SEQ ID NO: 45775 - DNA, 413 bp, Homo sapiens
  misc_feature (1)...(413): n = a,t,c or g
ataagacatcggctatctaagcgtgtgggtgccccctttctgccagcagttctggttcttacgaaaatcaccatatatcagacatgaaaattctggctttgtgcagataaaaaagtgtgtatcaagtatgacggtgccccaatgtggacacacttggttcctcaaaaagccaagcccactgcaactgccacattcctggacacactcgnttnntcacangnnncaancccgctgcaaantgtcacntcnntggacanacttggnttctcacnatnccgngnncantnnagctgncanatcnntnancctanggtgcnactngngnnttantnngtanaggcatcatgnggattnnancacggcnnannagtnacacatngnnanctnnagcncngnngnantactgntnaagc

SEQ ID NO: 45776 - DNA, 862 bp, Homo sapiens
tgaccccctaacagctatgacatgattacgaatttaatacgactcactatagggaatttggccctcgaggccaagaattcggcacgagggcactgatggacttcaagatgtgggctggatgtggtaaactgctgcctccatcaggtgctcattggagttcaacgcactggaccgtgtgttcagttgtgatgtagcaggacaagccacagacaaaacccctcagacaccgagttaaagaaggaagggctttatttggctgggggcatcagcaagactcacgtctccaaaaactgagctccccaagtgagcaattcctgtcccttttaaaggttcacaactctaaggggatgtgtgtgagagggtcatgattgattgagcaagcagggggtacatgactggggggctgcatgcacctgcaccggtaattagaatggaacagaacaggacagggattttcacagtgcttttctatacaatgtctggaatctatagataacataactgattaggtcaggggtcgatctttaactaccaggcccagggtgtggcgctgggctgtctgcctgtggatttcatttctgccttttagtttttacttcttctttctttggaagcagaaattgggcataagacaatatgaggggtggtctcctcccttagaccagaccggcttttttttttaaatctaaaatggatactttcaacttctcttttcttcttttaatatactcctaggagtgtgttgaattttaaagatatctgatcttccatgtcaaggctacaaagtctcgtgccgaattcttggcctcgagggccaaattccctatagtgagtcgtattaaattcgtaatcatgtcatagc

SEQ ID NO: 45777 - DNA, 636 bp, Homo sapiens
ttttttttaacaggctgatatccatttaatagtttttgaagattttttcctgtaaaatggcttgtatttccacaggtacaatagtgaagaaataaacttttcaatttgacatgaaatataaaacaacaattttacaaacatattcataaaatttaactgctaataacacaatacatggtaaatgtgaccatccccttaacttctagactatttaatacagagaagcaatctgtcatctcagctaaaaagaaacatctttcctttcattgagtttatttttgtttgtttagaaactgtcaagcaaaactggaaaatacttattttccttatcttcctctagggattcttcatgagggcaaagacttatttgaaaggatgtaagttatactaaaaagaaaatactgaaccttttttttgtgttactgcttcaatgatgcttagattattttaaaaagatgctgaagtcgtctcattggtcgcacagaaggaggcgcatcataacctaagccacaaaggctaaactactgggacagaagattgacagtaaagggatggagatggatttggcttaaaatcaaagtcctgtggtttgtctatcagaaattccactgttatgaggcaaggctgcaagaagat

SEQ ID NO: 45778 - DNA, 406 bp, Homo sapiens
cgtctatatttttagatgccactacttttttcttaaatattcattttgagactgtcatgagttagaccagtggttgagattagtagatggctcactagacatgtttttgttttgcagacattatatccattccagtcctctgcactgtacactgcagcagtgtgcaaactatgggacttagagggtttctgccatctttccatgtgtgaagtagcttggtttcctctgcctgtgcatttggatgtttgtgctatgtccacctcctaaactggctactgagaaaatcatcttcagccctgtcagattgtctctggcagtagctcctaataattatttatgtttttggaattttttttttcaacttttaaaaaaccttctatccatttcaatttgaattatttgattt

SEQ ID NO: 45779 - DNA, 2505 bp, Homo sapiens
gaggagtatagttacataaaagaaggcaaaacgatgtataaatgaaagaaattgagatggtgcacgatgcacagttgaagtgaacttgcggggtttttcagtatctacgattcatagatctggaattcgcggccgcgtcgacgccagaacacaggtgtcgtgaaaactacccctaaaagccaaaatgggaaaggaaaagactcatatcaacattgtcgtcattggacacgtagattcgggcaagtccaccactactggccatctgatctataaatgcggtggcatcgacaaaagaaccattgaaaaatttgagaaggaggctgctgagatgggaaagggctccttcaagtatgcctgggtcttggataaactgaaagctgagcgtgaacgtggtatcaccattgatatctccttgtggaaatttgagaccagcaagtactatgtgactatcattgatgccccaggacacagagactttatcaaaaacatgattacagggacatctcaggctgactgtgctgtcctgattgttgctgctggtgttggtgaatttgaagctggtatctccaagaatgggcagacccgagagcatgcccttctggcttacacactgggtgtgaaacaactaattgtcggtgttaacaaaatggattccactgagccaccctacagccagaagagatatgaggaaattgttaaggaagtcagcacttacattaagaaaattggctacaaccccgacacagtagcatttgtgccaatttctggttggaatggtgacaacatgctggagccaagtgctaacatgccttggttcaagggatggaaagtcacccgtaaggatggcaatgccagtggaaccacgctgcttgaggctctggactgcatcctaccaccaactcgtccaactgacaagcccttgcgcctgcctctccaggatgtctacaaaattggtggtattggtactgttcctgttggccgagtggagactggtgttctcaaacccggtatggtggtcacctttgctccagtcaacgttacaacggaagtaaaatctgtcgaaatgcaccatgaagctttgagtgaagctcttcctggggacaatgtgggcttcaatgtcaagaatgtgtctgtcaaggatgttcgtcgtggcaacgttgctggtgacagcaaaaatgacccaccaatggaagcagctggcttcactgctcaggtgattatcctgaaccatccaggccaaataagcgccggctatgcccctgtattggattgccacacggctcacattgcatgcaagtttgctgagctgaaggaaaagattgatcgccgttctggtaaaaagctggaagatggccctaaattcttgaagtctggtgatgctgccattgttgatatggttcctggcaagcccatgtgtgttgagagcttctcagactatccacctttgggtcgctttgctgttcgtgatatgagacagacagttgcggtgggtgtcatcaaagcagtggacaagaaggctgctggagctggcaaggtcaccaagtctgcccagaaagctcagaaggctaaatgaatattatccctaatacctgccaccccactcttaatcagtggtggaagaacggtctcagaactgtttgtttcaattggccatttaagtttagtagtaaaagactggttaatgataacaatgcatcgtaaaaccttcagaaggaaaggagaatgttttgtggaccactttggttttcttttttgcgtgtggcagttttaagttattagtttttaaaatcagtactttttaatggaaacaacttgaccaaaaatttgtcacagaattttgagacccattaaaaaagttaaatgagaaacctgtgtgttcctttggtcaacaccgagacatttaggtgaaagacatctaattctggttttacgaatctggaaacttcttgaaaatgtaattcttgagttaacacttctgggtggagaatagggttgttttccccccacataattggaaggggaaggaatatcatttaaagctatgggagggttgctttgattacaacactggagagaaatgcagcatgttgctgattgcctgtcactaaaacaggccaaaaactgagtccttgtgttgcatagaaagcttcatgttgctaaaccaatgttaagtgaatctttggaaacaaaatgtttccaaattactgggatgtgcatgttgaaacgtgggttaaaatgactgggcagtgaaagttgactatttgccatgacataagaaataagtgtagtggctagtgtacaccctatgagtggaagggtccattttgaagtcagtggagtaagctttatgccagtttgatggtttcacaagttctattgagtgctattcagaataggaacaaggttctaatagaaaaagatggcaatttgaagtagctataaaattagactaatctacattgcttttctcctgcagagtctaataccttttatgctttgataatt

SEQ ID NO: 45780 - DNA, 1617 bp, Homo sapiens
ccggaaatcccggaagtgacagctttgggggtttgctgctggctctgactcccgtcctgcgatgggttgcgacgggggaacaatccccaagaggcatgaactggtgaaggggccgaagaaggttgagaaggtcgacaaagatgctgaattagtggcccaatggaactattgtactctaagtcaggaaatattaagacgaccaatagttgcctgtgaacttggcagactttataacaaagatgccgtcattgaatttctcttggacaaatctgcagaaaaggctcttgggaaggcagcatctcacattaaaagcattaagaatgtgacagagctgaagctttctgataatcctgcctgggaaggagataaagggaacaccaagggcgacaagcatgatgacctccagagagcgcggttcatctgccctgtggtgggcctggagatgaatggccggcacaggttttgcttcctccgatgctgcggttgtgtgttttctgaacgcgccttgaaggagataaaagctgaagtgtgtcacacgtgtggggctgccttccaggaggaggacatcattgtgctcaatggcaccaaggaggatgtggagatgctgaagaagaggatggaggagagaaggctgagagcgaagctggaaaagaaaacaaagaaacccaaggcagcagagtctgtttcaaaaccagatgtcagtgaagaagccccagggccatcaaaagttaagacagggaagcctgaagaagccagccttgattctagagagaagaaaaccaacttggctcccaaaagcacagcaatgaatgagagctcttctggaaaagctgggaagcctccgtgtggagccacaaagaggtccatcgctgacagtgaagaatcggaggcctacaagtccctctttaccactcacagctccgccaagcgctccaaggaggagtctgcccactgggtcacccacacgtcctactgcttctgaaagcccgcactgccaccgctcctgccccagaaggttgtttagtttccacgtaggcaggtcgctttgtgcctctgagtgcgctgctgtgtgttctctctatagttctgtgtcataaagctgtcctggccagccttcaagctggtgtggccactcttgatgtgaggcgtgtcggttccaggggggacatgggaggggctgcacagtggcccgaggtcatgcttgcttccacctgcaggtgcatttgggtcctttccatggccaggaagccctgtgggctgcactttttatgcttgcagtaacaagagactccagagtcctcaccggtgcagagttggcacatattaattaactaaaattctaatgatcttgctaccagcaataaatcaagtaggccaagtgaaactgggctttaaaaaggatggatttcaaatacactgtgcccactagaagcttcgaagggcctcgtccctctgctacagccctgggaggagccaggatccttgttggtctagctaaatactgttaggggagtgtgccccatctcatcatttcgaagatagcagagtcatagttgggcacccggtgattgggttcaaaaataaagctggtctgcctcttctcaaaaaaaaaaaaaa

SEQ ID NO: 45781 - DNA, 1220 bp, Homo sapiens
  misc_feature (1)...(1220): n = a,t,c or g
atttgctattttgttaaccactcaagtttcagatggtgatttgagggcagaatacaggcagaaacgactgtaagctgtcaggccatccttggccctctggggagcactggagtgtggcctctgctcatcctgttagggtttcaagtacctgtattatgtggaaaggtcacaaggccagagacccagcacctagatgtgcaaatggggagaagaagcagggaagaaatgctggcttgcttttggctagggccaaataatctggcacattgaccaatccctgcctgtcttctggaagaaggtgcatttcaaaagcactttaaagaacttcagaaaccttaggaagttcagtgcagagaggctgtgacagaggtaaggtggagagattaccgtgttataaagaactttgggatatttttcaaaattaacctgaccattcttttgaaaccagagtccttaacaagcattgagatatatttctccatgaaggcttaacagtgaaaattggagattttggtttggcaacagtaaagtcacgctggagtggttctcagcaggttgaacaacctactggctctgtcctctggatggtgagaatctgggctcccaccagcagtctctggtatagggcaaaaggaatgccttggagatttatgtgcaaacttaaagcgtttctgtacatttccccgaaatccacatgacccctagtgacagccagcctcagggcaattgtagattttcttgaggaagctgttgatcagaaccactgtgaagcttagtgtggagaggagttaataagctgggtgacagaaatgctgggtcttggtcctttaaagacaaggattcctgagctgttttaaccagtgcctgagttggagtcctttgggggaaaagctatgtggggactgaagaatggactcattcataactaatgaaagggacagcctggccccctagatgtctgtgaggcctgtcatatggtgataaatgcacttttgtcatatggtgatacatgtaggccccagaggtgatccgaatgcaggataacaacccattcagtttccagtcggatgtctactcctatggcatcgtattgtatgaactgatgacgggggagcttccttattctcacatcaacaaccgagatcaggtaagtctgtgctgggtgcgaaaggacccaactcgtgggagcccnctggcctccgccagcctaagcagctaga

SEQ ID NO: 45782 - DNA, 1119 bp, Homo sapiens
ttttttttttttttccaaataagtttatttctaaaagacattttaattacattgatttattagaagcatttgtagtccttcatggtttcagaaaatcaattgttcagacctttttgaacatatctgattgtgatattcatactgtgtaactctgaatttaaatcaagttcagtggaaattaagatatgatgtattattttttagtgtatgtttcgtatctgaatttttgatgcagttaaaaaagccttaagaaaacgacaaaaaagctagagtgcagacaacctaaaatctctattttaaaacatcattttcctgaggccatgcagactcatatctaagtttttttcatttaaatagacttaattctaacaaatacttactttcataatgaaaaactttttaaaggtgggacagacatactagttacgaaatgaaagttttcaatcacagatcaggaagtataatgagattacatcaaatgtgaatttgtgtgcctaaagaattctcttcacttaagtcttattacttgcctgtcgaagaggcaagggcagaagacatcagtaccttgttgaaaccccggccgtgtagaacaggcctggccctctgccagggtaatatgggagacagacgtcctcggtgagcttggttgtaaaggcatctgctgcagctcaggaagcaatgaagagccgagacccaaggcctcatccacttccaggagggctccctttatgggctcttggcgactgtaacactgtttagcacagaaattttgaaagtggtaacaggtacataggtaaccaaagtatatagcttatttggtgaatcttcatcctcattacgttttctggacagccgcacacggattcggtatggcacattccttattcctttggcccagacagctttgttgagcctggtgtcaatgcgcacatctggagttcccatctccttcatggcaaatttccgaatctctttgagtgcccgaggtgcacgcttcttgaagcccactccatggatgcgcttgtgaatgttgatggtgtattctcgggttaccacttcgttgatggcagaacggccctttttcttctcgccacccttctttgcgggagccattctgca

SEQ ID NO: 45783 - DNA, 1497 bp, Homo sapiens
tttttttgaaggcaattttataactttatttgatctgacgatcagcgattagttctcatccacattgactgtctgtagatctgtaaaggaagtaacagtcaatttccatacccacatcacatttcatatttcaactctaaaaaccttttgtagacgggtctgggcattctattttccacaacctttttacatcccagatatggatcagttttgcattctttagcatcttcccacaccaacaatttaaaaagggtacaatgacgtgtgtcacccctagcttaacagatgaattcacattttaagaggtaaggacatttttctaatgaatttaaatggctttatgggatggagaacttacttttgaaagtggtaacaggtacataggtaaccaaagtatatagcttatttggtgaatcttcatcctcattacgttttctggacagccgcacacggattcggtatggcacattccttattcctttggcccagacagctttgttgagcctggtgtcaatgcgcacatctggagttcccatctccttcatggcaaatttccgaatctctttgagtgcccgaggtgcacgcttcttgaagcccactccatggatgcgcttgtgaatgttgatggtgtattctcgggttaccaaagagattcgggaaatttgcccatgaaggagatgggaactccagatgtgcgcattgacacccaggctcaacaaagctgtctgggccaaaggaataaggtgctaaagttatctgtattcgaaggaatgtgccataccgaatccgtgtgcggctgtccagaaaacgtaatgaggatgaagattcaccaaataagctatatactttggttacctatgtacctgttaccactttcaaaaatctacagacagtcaatgtggatgagaactaatcgctgatcgtcagatcaaataaagttataaaattgccttcatgtttttgttctttttagttgcaacataatgtacttgtataccctatcctaattatgggatcatttgaagagcttttcccaaattgatggcctgtgctgccttctccccatcccctggggttttaaagtgatttcaaactgcaacctagttttagaaccactgttctgggtagttgggatactgaaggcatattgttaattattctacttgtatgttttgctaattctaagataagcatttttccagaaaccaggatgtagaatccagttgccattgacatcttaacattttaggaaacaactttaaaatgatatactatctatctatctatctgtagcatcttaaaggtaatgaaattaatgtggcagtaggtcttttaagcttctgcctacatccatattgagtatagttgttgtcttctaaaataattaattgatttttggtgagataaccagattcatattttaagccttttgtaatggccccgtggtacctggagtcaaggttcagaagtaaaaagttccttaaggtatcaataaca

SEQ ID NO: 45784 - DNA, 1157 bp, Homo sapiens
  misc_feature (1)...(1157): n = a,t,c or g
tttttggttttttttttaaaatccaaggcctttaatttagtttttggtaatgaccataaatgccttcacaaaacctctttttcactgtaaatagaaggcactaggcattacataatacccttaaagcagtgattcctcctgatgctggtagagataaaacatttaatgtcagggtttacatagtaacaaattcttcttaaaaaaaaaaaagacaaatctaaaaatcacgcaccaaaaattatcagtcactctttcccaggttcccagtgcaaatttacatcatttttacaagtacatagtttgaaattaagagataaactaggtatgatatggttttcaacatgtgttaggtttcagttaaatacagtaaaaatgaagacaccattatcatgctaattggcatcttttgctactgtttagctgtgcaaaatagacttgaaatggatacatcctgtagtggcataatttaaaagatccttgatatgacaccaacaacttacaaattctggtcacaaactgtatataaattgtacaattattaaaatatacctttttgaaaaataataagatgaccatttatacctaaataaggtttcccagaaagttatgaaatacttttagcatataaaagtagttgctccttttctgaaaagtcagctgttgtttcacaaaataactcatatgatccaaggcaaacgatttctttcaaatgccatattctctctatgactttgaggtatgcttcaagagactgtatccataagaacagggcacatttgggtattagaccacagttacaaacgcaaggagtctttcttgggtcaggaatgcccttaagagttatatcgacagagaacaaaagatagcttctgaagccatatcctttacaaatacatacaactaaatttggttatttagaggataattcaagacacagctattaaccacatgctgtgtcatgtgtgcctattttagttagtgnnnnnnnnnnnnnnnnnnnnnnnnnnnnnnnnnnnnnnnnnnnnnnnnntaaattagtaaagggtaagagaaaataaactcttccatcattaatactagatgccttcttgtctttggagaaactggtaacattaaattttgaaaatggaagggaaataatgaaatctatatacaac

SEQ ID NO: 45785 - DNA, 28439 bp, Homo sapiens
  misc_feature (1)...(28439): n = a,t,c or g
gatctatctggtccagaccatcctttgaaccaagtggacttagtggggctgaaggaggtgtggggacaaagaacctatggcagggcaaccggccctcctgtctgcagcctggcttcctcaattttgtgttcctaacctaagagctgccattcagtgagggcccacagtgtgtctgctgtgtgtagactctgcttgtgcaatctctaatggcctgagtagccctggaaacaaaatgtggctatccccatgttacagatgacaaaactggctcaaagcaattatatgactgacgtagaccacacagctagaaaatggaatcactgggtttcaaagtggatttttgtgactgactccaaagctgaccagagtgctcatcctgtatgcttctgaggcctctggccctccagaccggtcactccccacaaagtctcccttttggtgagttgtgtccctccaaacactccctgaaggcaagatcaacctgccctaactaccccaaagtgaactaggccagccccaagcctgtctccggccctccatctctctctttgttcacatccatcagaaagcagagacctagagtagggaatgagagggggtgcacaagtacaaaagattttgaagcagcaggaagacgaaagaagtacaagaaggagcagctgtttgtaaaagggaaaatctgagacaggcagaaagctcagctccctaatcctaggctcgtgtggagccagggcagggtcccccaaggtcagggattctgggggcaggcggatgggagagtcagcctccactcctgggtggctcccctctgccctgtgcacaaacaacgagtgcctcattcctcccctgcaccaagtgccctgcctcttcctgccccgtttcttccttccctttgggtaccggatcttttttctgattcccctctctccatgctgacatcgcttctaattcgccctggtgtctccctccctcacaattactgggagtaattttagcaacttttcctctgaactaccgctggcgtgttcacagcaaatggcccctgttttggcttgacacttgatcagggtggtgacagagtgcagacaaagccggcacaatgcggggaggggaggaccggggcagatcaccttcctttcacttcagggccttatttggtctaccttgccgaagcggccctccttccagcctctctttatttatagcattttgcttgctctcctttatcttgctatcacttgtagcacactctgcacaatccccacccaccccagcatggtggggcccctggctcactctccccacaaggaatgtgcatgtgtgcaaagggtaggcctggatgccatttctacaaacagttgactaaagcagtccagagcagggatctttctttgggtcattgttatgtccttattgaccnnnnnnnnnnnnnnnnnnnnnnnnnnnnnnnnnnnnnnnnnnnnnnnnnnnnnnnnctgcaaagctgctcagtcttcagacagcagcaagcagcaggaagagaatcatgatgtaaccaagagcaggtgctggaggagctagggagtgagtggggatctttaaggacagcaggccctctgatctgtctgagcgtgtgagcaaagcctagttagggaggtgagttctatctgcaatgagagggggcatgggtggagacagataacaccaacaccaacagaccagacctcccaaacccgaaaggagagacaaagtgtgattgatttcccaaatgcagaaaagactacccaagtccccagccaagaagaatcgctggcctgtggatgaagacactggctttgaaatggctcaactacgtcccaagcaccctttgtgcatcttaattgccctgggaaatcagggaggggtggcagtttggagcttggaaagctggaaggtggggacgaaaggagtttttgcccctcatcgccaatccttgaggttcctacagggaacctcagacaacagctgtcttaggggtttccttccagctccaagcagctgtattatctatagctttgagagggtctgtctctgtcaatggggctgattcctcagcacctggcagggcctgggggggactgccagagtctgttctgccgggcatgttagtagcacagactactgggataacctcagcaactgtataccttagcactgcagagctgcggtgttgtcagacacaggcccttgcagttcgtggtctacccccacttgcctgcaccccccttatagctgctcaatgtcctcagactgtaccttagtgccttggttaccaagcaacccccacagaggccctcctcctggattttcccttccctgctatgcccaccccaccttcaaaatgtacctgctgcacccatcccccaggcctgcctcactccttccaagctgacagctaatcagatggactaatcgcatgcgcggaagagctgtgctcgggaagaagggggagatttcacaccaaatcgtgcagtggttgcctagacacggagccagtcaagcttgcatgccccgttgctagaagagcatggcatcggttgtgttctgtgctcgtaggctgggccccagctccctttcctcccctcctttgtggctgttcctcaggcctgcagaggggaagatttttcctgtcctgttactctgcctcacttgccagaacactagtcgcctccagctctggataaagctgaggctgggtgggccagacaacagctgtcttaggggtctccttccagctccaagtagttgtattatctatagctctgagagggtctgtctctgggctcaggcctttagtacctgtggggcagagccaggaacgtgagtcaggcaaaccgctccaaactaggaccaatgcagctgggtcctgctctctgcgcatagggggtccccacatctttggaatcccagcccacctttccaggctaccctccacaggccgggctccactcccatctgctgaggtttcccaccttgaatcctgctgccccgattagctgtataaccttaaagaatgcactgtccctctccattaaatgaagtgcttggatggattgctaaaggcctgtctggctcggaggcttggtgcctcaacacattgcctgctggtccaaggaaatcagtgcctgagccagagtccccatctctaagctccatggttattgttcttgccacctggctaggaaatgtccttccagctgccccagtctagctgcctcaccctggggccatgccccaactctgtcctacccttctctgctgctgacactcagccccttcccagcttccagttggatacaggacctgggccaggagagcagggaggacactgtggaaatgcggccaggccatcaggggcctcgcagcaggggactggagggggagcagtgtccagggccagaagtgccctgcgggagagccaggacattggctgcctgtggtcttggtggtcgtggtcagttccctctcctgccagctgtggaatgtgaggcctggcctgggagatatttttgctgcactttgagccaccccgccccctggaactcagaccctgcacagtccatgccataacaatgacgaccacttccaattgtttcctagctggagaggcggggaggggagcactgtttgggaagggggggagcctgggggaaatgcttctagtgacaacagccctttctaaatccggctagggactgggtgccgttgggggtgggggtgccctgctgccccatatatacagcccctgagaccaggtctggctccacagctctgtcctgctctgtgtctttccctgctgctctcaggtaggagcgggagctggaggctttactctgggataagggggctccaggcttaggaagggattcctcttggaatagcaagcttcatgcaggacttcatgcagagtaccaggtccagtcactgggcacacatgtgcaggtctaaacatgggcgtatgtgccacaggagttccataggggcagatatctgcatctgagcatatgggaccaatatgcattacannnnnnnnnnnnnnnnnnnnnnnnnnnnnnnnnnnnnnnagcctgcatagtctgaatgtgagaaagggtatgtacctcactgactgatacagaaatatcaagtgggagatgtgggtgtatgatcacgtctgtgaacgaggaggttcctttgcagggagggagaaagaatggtggagaaggattctaggaagtgtgtatgccttcatgtgattctgtgaggcctggaatgtgtagctacccctgtccatgcatgcagaggttcttgtctatgcctccacgagtaatgactgttatagtatctgtaccctctgcagaaggaactcacaggcacgggggtgtaggatgttccaggtctttgtgtactgaagaacacgcagatgtgatctacttacgtggcacacatcctcaaatgtgcacatttgctgttgaggcatatatggcaccctggggttggggtgcggattgaggtatgggaaggaagcctgtcctcatgtgagaggcatgcccaagcagcaggcatgagtgttcatcagagggcttgtggagggtgtttggctatgtgatgggtgtgtctgtgagaggaagcccacagtgtcttctctctgagaatgtccacaaagtctgacaacaaaatggggacaggatggaaaagaagtctctttagagtcatcagacttgcattcaagtcttggctctcccacttgttgtcatgggctcttggccaagcaagccatttaacctcgatttcctcatctgtcaaatggggtgaagactgagtaggagaaagtgcattgaagtgcttttagactggaaagtgccgaacaaatgtgaccattagttgtctctcagatggctcaaagaaaggtaccactagatgggtacaggcaggggtgggaccatctcgcaggagtgaagaggattagggttcaggttgagttgacacaggaagctgttagaactagttcttgaggaaaaagggaatagggtttgaaaaacaagaaggatgggttgggccagagaagctgaccaccctttccaccttgttttggaagagggtggatgctgaagaacagagccagggagaagcaggaaggtgggactggtcaggtgggcacagcctgccctgacacagcctcttccctctctccaggtcccctgcaggccttggcccctttcctcatctgtagacacacttgagtagcccaggtaagaaaagctgaagctagagcgttgaaaatctagtaagactgggcattagagccccaaagccagcctatggaactctagtttctgccatgtgctggagagaatatcttggctatcaagagctacttacctgtgaccagggggtccagggatagatgagggtcagagatggaaatagttagatttctgctcctacaggggacctgcagggagctcagaatgctcttccttcccctaggagagccccagcttgaacaatagttagttgttccttttaccctggcaggtttgctaggctgctcctctggttaaggggtaacctcaaaaggaagggactcactggtaactcctcttgactcttgagcatggtgctaggttttggggctcccactgaaggggagagcccagggagggaagggaagaatgggcagatgggagggcagccagcttctgctcactccaggcacagccatgggagattcggagatggcagtctttggggctgccgccccctacctgcgcaagtcagagaaggagcggctagaagcgcagaccaggccttttgacctcaagaaggatgtcttcgtgcctgatgacaaacaggagtttgtcaaggccaagatcgtgtctcgagagggtggcaaagtcactgccgagactgagtatggcaaggtgggtgtcaggctgatgtgagagtccaccctggccacctgtacacctgggtggacagagaggggtacacccatgccccatgcccatgcagacctgaggatggtcccattctccttccctttgggaagaatccagaccctccaaagagccctctccttcccaatatcccttctgtcttccctgtgagatcctggttccttctctcttgagcactattgccctgtcactcaccaactcctaaccctcttgaggaaggagggaaagcccaggctgacaggagggcttgggtgggggctcttgcagacagtgaccgtgaaggaggaccaggtgatgcagcagaacccacccaagttcgacaaaatcgaggacatggccatgctgaccttcctgcatgagcccgcggtgctctacaacctcaaggatcgctacggctcctggatgatctacgtgagtgctgcacctggccctacgttgggatctctgttcttgctccatccatgtccaccccaggagccaagagtgtcttctgtttgtgtctaggcagggttacactctaacctcgtcccaacatccttggttcaattccaacactctggggactggcattactcagattgagtgcatgcagaggttttcctttctcttctttctctcctgggatctttctctaactcccaaaatcaccagccctcccccttcgcaactggcaagtcactgctccttttctatccccagacctactcgggcctcttctgtgtcaccgtcaacccttacaagtggctgccggtgtacactcctgaggtggtggctgcctaccggggcaagaagaggagcgaggccccgccccacatcttctccatctccgacaacgcctatcagtacatgctgacaggtgagaggccctggaaggtcttcctgaagggaactgggataggccgggagggagagggagaaggaagggagaagccccacgagagcatcctgtgcagctcctgacctttcctccccaccctctccccacagacagagaaaaccagtccatcctgatcacgtgagtgtagctgctactgtattccctttcagaatctccctgatcccagcctccagccccatcaggtgtcccaggccccgaggcatagactcagcctctttccccccaacctcgtgcccatctccttcttctctgaccattaccctgacccctctctttgctctccctcttcctttctgctttccatccccttcatgtttttcctctcccacctccttcacccactctccaactcatcacgcgtttatccagaagctcattatcgccatgtcttcacctctgcattttctttcccttcagaaacatttcccattcttccagccctaccaacttttcccaaaacagcccaggcccatctcccctgtttactttgcccagccaagcacaggtcagcctgcccaaaccagtgccttctggtggcatccttcctggtgccagccctgacctctgtgcatcagaagacagttgtggattttgggtgtagataacctggcagcttcttgcccagggctcctactctcgggtaggcccaggcattctctcctgatttgaggcttgctggtctccagtagtattgttcactgcccaataagcccctgtcttcacagcggagaatccggagcagggaagacagtcaacaccaagagggtcatccagtactttgctgttattgcagccattggggaccgcagcaagaaggaccagagcccgggcaaggtaggcctgctgccctccaaggtcctgtaccgcagaagggagggagaagagctctcacctgcctccttcttggcctctgcagggcaccctggaggaccagatcatccaggccaaccctgctctggaggcctttggcaatgccaagaccgtccggaacgacaactcctcccgcttcgtgagtggtccctgaccttggccttgggacttggactggtggaggaatggtctcagatatgagccttcccccaactcatcaccactctcttccatctctccaggggaaattcattcgaattcattttggggcaacaggaaagttggcatctgcagacatagagacctgtgagtgccatgaatctgctaggctcagcctaagctcacccttgctctagaccatctggtcttgacctctctctctctcccctccctccctctgtttttctcctctttaagtctctgtctgtaggtgtctctgtcttcaggtctacatatctgtctctctctgagacttcctctgcatctttctccatttctgtctctgcatggctaggtgtctttctctgggatttctctctgagactatttctctccttctgggtctctgtttccatctctctgtgtgatctctttgtgtctgtccaactagtctctctggctcttcccttccctctgccttttgcttgctacatttatcattaattttccttgtgcccaaaccctaacttttctttctctccttcttctccccacctgttcacagatcttctggaaaaatccagagttattttccagctgaaagcagagagagattatcacattttctaccaaatcctgtctaacaaaaagcctgagctgctgggtgagtcagagccaccgactgagaccaactatctccatggcaacctggtcccctctgcttgtggctggactcagctggcatgccctgggtttcatggcactgctggattcaattcagctgggatgtggggccaagccaagccctgtcctgtgctgcttcctcaggccatgtgctgtggcgagcagcctccatgagagccgggggcttgtgtcccaccctaaccatgttttttcccctagacatgctgctgatcaccaacaacccctacgattatgcattcatctcccaaggagagaccaccgtggcctccattgatgacgctgaggagctcatggccactgatgtgagtgtgtgaggacccagccagggggtgggaggattggcagtgaggggcaaacaggggtccaaaagcagagctaagactctggccattggttgtttaaagtggtatggacctcctgagagccagaatgtgccctgtgatcagggtgtactggggaatggatgaggtgagacaggactggccagtatctggtgttctatcaaaccaggaagagctgaaagccatgagacagagagacacacaagccaagaaacaagcatcaccgagggagcaggacgaggagggaaggccatgcagacggcatggggctggaggggctgttaggtgaacagatgcagacaggtatggaaggccaggcaggaagcaagtgtagggccaggaagcataagtgggtaactcagaaaagctgtggccactgacactggggctgcggccaactgacgtctgctctgctcttgcatcttacatcctttgttttggagttccctgcatcttacatcctttgttttggagctccccactgggtatgggagtctcagaacccacagggattaaggagacaagttttctctccaacttacaagggatctcacttacccatcatacttctttttctggggtccgccaatatggggcctccctacagaacgcttttgatgtgctgggcttcacttcagaggagaaaaactccatgtataagctgacaggcgccatcatgcactttggaaacatgaagttcaagctgaagcagcgggaggagcaggcggagccagacggcactgaaggtgggaggcaggattcttggggcagctgtaagtcatgaggcagtctgctcagcagtannnnnnnnnnnnnnnnnnnnnnnnnnnnnnnnnnnnnnnnnnnnnnnnnnnnnnnnnnnnnnnnnnnnnnnnnnnnnnnnnnnnnnnnnnnnnnnnnnnnnnnnnnnnnnnnnnnnnnnnnnnnnnnnnnnnnnnnnnnnnnnnnnnnnnnnnnnnnnnnnnnnnnnnnnnnnnnnnnnnnnnnnnnnnnnnnnnnnnnnnnnnnnnnnnnnnnnnnnnnnnnnnnnnnnnnnnnnnnnnnnnnnnnnnnnnnnnnnnnnnnnnnnnnnnnnnnnnnnnnnnnnnnnnnnnnnnnnnnnnnnnnnnnnnnnnnnnngcagtcatctctttaccaactttgctacttgccttttccttccagaggctgacaagtctgcctacctcatggggctgaactcagccgacctgctcaaggggctgtgccaccctcgggtgaaagtgggcaatgagtacgtcaccaaggggcagaatgtccagcaggtgggtccatcttcagatgataatgggtgggcagggtagggagactggcatggtgggatgagagttttcaagttcactcttcccaacaaccctgctcaatatgggtctctcctccaccttgcaggtgatatatgccactggggcactggccaaggcagtgtatgagaggatgttcaactggatggtgacgcgcatcaatgccaccctggagaccaagcagccacgccagtacttcataggagtcctggacatcgctggcttcgagatcttcgatgtgagttgggacccctgggagtgggagaacaatcactcactcgctcccacattcaacagctatttgcttagagccagctgtggaccagacatgggaaggcagtggggactgtgtggtgacagaggcagtcattttctctgtcttcaggggaagccctccttcactgccttgacatggaggggaccagccacgccctgctgggctcaggcacagtggacgggcacagccccaatggccactcacacccactttctgactgctcccacccctcatgccccctgcagttcaacagctttgagcagctctgcatcaacttcaccaacgagaagctgcagcagttcttcaaccaccacatgtttgtgctggagcaggaggagtacaagaaggagggcatcgagtggacattcattgactttggcatggacctgcaggcctgcattgacctcatcgagaaggtgcctctttggccttaccacctgaattctccctgcacacccaacaagaacaccatagacaaaatagcagcccctctcccttctggggaatataaaaatagaaggggctgaaggatccgagcccttggttccagagcctatgttgtgctgagcacccaggacagggtggcaccagggacagctgatttcccaggggcttgaaagtggacacatggaggatgggcacctgcatgatgacctcccacacctgcatgtttattgggcctggtttatgcatccaaggatcaggaagtgtgagggtggtgtaggggatcataagagtgcacctattttcaaccctagcatctcaggcatctgggtcgtggagtggtgtgtacagcatcgatagaatccatattcccagactttcacaaagtccttctgtcatcagacaaaatnctccaccttgaaccggttccagtcagtagataactgtactcagagctgagcctactaccttaacacccaacatggcacctccacgagcaagtatattgaccatagagcagaatccatgtccacctgtgtgaaggacactcagtgatgctctctcctgcttcctcagcccatgggcatcatgtccatcctggaagaggagtgcatgttccccaaggccaccgacatgaccttcaaggccaagctgtttgacaaccacctgggcaaatccgccaacttccagaagccacgcaatatcaaggggaagcctgaagcccacttctccctgatccactatgccggcatcgtggactacaacatcattggctggctgcagaagaacaaggatcctctcaatgagactgtcgtgggcttgtatcagaagtcttccctcaagctgctcagcaccctgtttgccaactatgctggggctgatgcgcgtaagtagggactgaggctcccggtacagaggagcagggattctgccaaggttctgagccaggtcaattgctacaccccaccacttcaatgtcaggttgtaccccaaggtttacagactcagtgggatggaactgggtgaagaaactgaggcagccacattgaaggcctaccaggggcaaatgccagcaaggatgtaaagaggggctgtgatcttactcacaccctacctccccacactgatgcttcttttgttgactctccttcctgcagctattgagaagggcaaaggcaaggccaagaaaggctcgtcctttcagactgtgtcagctctgcacagggtgagtgggacacagccccagccaacttggctccccatctgcccaaccccacccagccccacccttccctgccttgttcatcccctactcctcccgttccctgtctccttggtgcattcgggaccattttcactctgtcttctcttcccgtcatctcctggcctcttcacttatttacttcccatctcccttctctcctctttcccttctgtctcccaccctctctccttatccctgtctcccccagggccccttcatctctgtgacttctcgaattctctccatctctcttttccttccttcttctcctctcttcttcctgcatctctttctggcattttctttacttttctctattgcatttttggccacaggaaaatctgaacaagctgatgaccaacttgcgctccacccatccccactttgtacgttgtatcatccctaatgagacaaagtctccaggtgaggccacaaactagggccaacccactgctgggcatacaccgccctgggaacaggacctcctaggacatctccctacctaccaccacagtggtttccaaaccacattcttctcctcccatcccgcatgaggcctcccagggtacctccctctcagcgctaccttgcacttgcagtgtgtaatgagggtgatgtgtaaggcactctgatggacattacctcatcagtggccctacaaccccctgnnnnnnnnnnnnnnnnnnnnnnnnnnnnnnnnnnnnnnnnnnnnnnnnnnnnnnnnnnnnnnngcccccaatgagacatattcaaattgttaatccatttttggctaattaggagacagaggctcagggacctgggttcaagacctggctctgttcttgatcagcttagtgaacttggcctgtcccgtaacccctctgggcttaatttactcatctagaacattggatatatctgttctggctaccacctatgataataggtgtgaatcatataaaaaaggaatgtgaaagccttttagttaaaaatgtggctagaagaaaatgaaacaaatgattattactaactgacttgctaagattacaagctaatcagtgacaaagccaggatcagaacccagaacttcagtccagtgttctcacagactcctcctacttccttcttgccacaggcgtgatggacaaccccctggtcatgcaccagctgcgctgcaatggtgtgctggagggcatccgcatctgcaggaaaggcttccccaaccgcatcctctacggggacttccggcagaggtgggtatgagggtgcaccagagctcatagaacagggggagccaggctgccctgatgggaatgggatctgcaggtgaccctagaattctatgggcagagcagatcactgcagagcatgggtgactctggacacttccctcctcaggtatcgcatcctgaacccagcggccatccctgagggacagttcattgatagcaggaagggggcagagaagctgctcagctccctggacattgatcacaaccagtacaagtttggccacaccaaggtgaggaaaggagactaattaattaaaggaagacatctcttttccattgactcctctgatgcttttcctgttgtaatcatcttagcaaaatctcttacctgtatgctacccctcccagtggaacatctagcaccactcccctcatcccagctccagctgccattgacctcctccctgcaatccttttctaggctgttacccttcctaaggtaatccccaccatctctttccctcgtacccctccctagtcatggccaacacacaccttgcctgcaggtgttcttcaaggccgggctgctggggctgctggaggaaatgagggacgagaggctgagccgcatcatcacgcgtatccaggcccagtcccgaggtgtgctcgccagaatggagtacaaaaagctgctggaacgtaggtgagagatctcaagaggaggtttcccgcttctctgaggcccaggctggttcaggggcagtgtcaggaaaaaaagctcagcagatcttcaaacacagagacctgcaggaggggctcatatgaacacactgcagtcacagggtcagaggcctcaggaagggtgggagggatgaaggaaatgggatattcccaaggtttcaggacctcaggtaggaaggaggcagaggctcagcactcctttcaatgggcccctgcagagactccctgctggtaatccagtggaacattcgggccttcatgggggtcaagaattggccctggatgaagctctacttcaagatcaagccgctgctgaagagtgcagaaagagagaaggagatggcctccatgaaggaggagttcacacgcctcaaagaggcgctagagaagtccgaggctcgccgcaaggagctggaggagaagatggtgtccctgctgcaggagaagaatgacctgcagctccaagtgcaggcggtgaggctcctgggctactgttggctcttccaccctgctctgccttcacttcccacaaccctgcacctccctgcacaggggctcactgtcttgttccttcagtcagaggactctgggatcaacacttctaaagacctccaaagaggtccctcaggaggaggaaagggcagagggaaaagagctgacttttaaaagcacaggctttctacttgggttcaacctagatacacagcttaattattttgtgaccttgggcagaccatgcatcatctttgagcctcaatttcctctagacagggaataaagctgtccatttcattaagccatcatacataagtgcttggcatcagcaaatgcaattcccacccttcgatggaggagaccagaggaagaggtccagatgaagatttctggttcctttcctctctgctcccctccccagtgttcccaagttatactatcctgaaactcttcccctccccatacttctgaagctcttgccaagtggggatatcctagagttaccctcctatttgagtgatgtgcctctccttccctctacctgcaagaatgaggaccttaccccctgaacagcctcccctctgttcctcaccttcaggaacaagacaacctggcagatgctgaggagcgctgtgatcagctgatcaaaaacaagattcagctggaggctaaggtgaaggagatgaacgagaggctggaggatgaggaggagatgaatgctgagctcactgccaagaagcgcaagttggaagatgagtgctcagagctcaaaagggacatcgatgatctggagctgacactggccaaagtggagaaggagaaacacgcaacagagaacaaggtaagggcagctccctttggctccagcccgggtctcatcaggactctcagaccatactgaccttgacccaggctagccactcgcatccagagagcagcatggaccttgatcatggagctccccacagatggcaccaagctggtgacctttgaccctaaaggagatgggattcttggtcggcaggtgaaaaacctgacagaggagatggctgggctggatgagatcattgccaagctgaccaaggagaagaaagctctgcaagaggcccaccaacaggctctggatgaccttcaggccgaggaggacaaggtcaacaccctgactaaggccaaagtcaagctggagcagcaagtggatgatgtgagtagattgagagttgtggggcctagatatgccatgtctatctgtgcccagagctnnnnnnnnnnnnnnnnnnnnnnnnnnnnnnnnnnnnnnnnnnnnnnnnnnnnnnnnnnnnnnnnnnnnnnnnagggttagaggatgttaacttttctgatatctttctagaaaggagctggggaatgaaaagtcagaggtggtgatcaattctgaattatgtatctaatctcactggtatgatcaataatagagatgagttttcttatttaatttaagtgcaatcccatatatctctgcctttgacacaagatttagagggtcatctcataagaacatgataaatttctttggaaattttgtgaggctccccaagtagaatttttgaaattccaatatttaaggcagaatctgatcattgttccctctgatgcacatatgtctgttgactcacttatcactctgtattttaattatttaagcttctatctcagccataagactacaagcttcctttagataggaacttagatctattcaatttggggactgcagtgcttagcaagagcctgatgcccagtaggtgtttataggatgctgaaagaatgaatacgcgcggccannnnnnnnnnnnnnnnnnnnnnnnnnnnnnnnnnnnnnnnnnnnnnnnnnnnnnnnnnnnnnnnnnnnnnnnnnnnnnnnnnnnnnnnnnnnnnnnnnnnnnnnnnnnnnnnnnnnnnnnnnnnnnnnnnnnnnnnnnnnnnnnnnnnnnnnnnnnnnnnnnnnnnnnnnnnnnnnnnnnnnnnnnnnnnnnnnnnnnnnnnnnnnnnnnnnnnnnnnnnnnnnnnnnnnnnnnnnnnnnnnnnnnnnnnnnnnnnnnnnnnnnnnnnnnnnnnnnnnnnnnnnnnnnnggaggaaggaaggaaggaaggagagaaagaaaggagagaaagaaagaaagaaagaaagggaaagaaagaaagaatacggctttggggtttcatcccacagtcatttattcctttatctataaaatattgattcagcatcccctatatctaggcaatctcacagtcccctaataacatttggcccactctggggaaggtttcccaagtcctgaacacaaagatttaccaagtcctgaggtaactgaacaacaaaatcaccaagtcaggatgctttgcctcactgggcctggctccttctctctaccagctggaaggatccctggagcaagagaagaaggtgcgcatggacctggagcgagcgaagcggaagctggagggcgacctgaagctgacccaggagagcatcatggacctggagaatgacaagcagcagctggatgagcggctgaaaaagtactgtgtcccctccctgctgcccttcctcctccccagcccataacagtacaagcagacccaagacagccatcctctgaggcaacaacctcacgcagcctccacaagtggaggcgcaaaccatgggaaaaggcctcccaggcaagggctttcctcccctagtcccagatatcagggttagttagatggtcctccctggcaaaaagtccattgtatcccatgagacctttcttcttgttaggcactcagtgggaatgaaaataacagccttcccccttcatacacatctctctttggagaccagttccttgacatggaggaaggctccacatgagagcctcttaggaaagtccctttgtggcttttcacagagagcccacagggcaccaagaaatgccctcacattaaagaagtcaggggatcagggccatttctttgttttgcttaacttgtggttccaattcttagtgtaagttcttccaaaatgtatagactttccagacttggtaaacagtgagcttgcagaacatattttgataattgaaggtcttatggtgtttcaggctcaggactttgaaaggctttgagaatcatcataatctacatcctcatcaagtttgtgtttgcacaggaatcttcataccttcccaggcacagaatgtgttgaataaatgaataaatacacgatcctatttgattctcaaaacaccttttaaggatggtatctttaatttcactttaccaaagaggaaaataagtttcagaaaggttagctgagttacccaaagcaatagtgacaaaattaaagaccatcagagctaaaaaggacctttgaaacaatctagtccgaccccctcattttacattatgagaaaacaaggaccaaagatgggaatgtcctgtagagcccaggccccatcaccctgtctacagcactcctcccattacattcttgttggatttcaatctaccgcaggtgttacacttccagggatcctacatcacccccagaagctgtttttctaatgaaatcctactctttacctgtatcattaccattttcaaccactggtggaccctcctgaggccccacgagtctcccttacctcaccatccctccttccccacagaaaagactttgagctgaatgctctcaacgcaaggattgaggatgaacaggccctcggcagccagctgcagaagaagctcaaggagcttcaggtgaggtctggacacccacgcgggatgctgagtccctgggctggttctgtttcccctgccccctcctctagggtgtcctgttcacagcattacaggaactgattatgtgtccatggaggcaggcacgcagctatcacagtgtgcccatggatacatccaaaaggggtcaggtgatccacagagaccctgaaaaggtgcacaggcctggagggcagaattcctggcttcctgtctcagctctgccttagttgggtgacctctgggagcccactccagatctctgggtctccatgccctcccctgttacatggaggtttttaagagtccttcgactctgatggcatgactttcctccttactctagagcagaagctgtgttaggtctttagttgtctggtcagacaaatacggctctctcattttcaacttttgttatttttttatgactaaactgcttaaaatatccccagaacacaggtctctttgtccatctttaagagcaagtttcaaccactttccttccaataaagagccatgtagactgtcaggccctcgcctaaaggaaggctcttcaaactatcttccccaaatcctttaattcccacctctccagtggaagagctaaactgacttgctgttccagagaagccgagagccttttagagccggggggattccagtggaggggtccaggcggtgggtctgagccctttgtgtctgaccaggcacgcatcgaggagctggaggaggagctggagtccgagcgcaccgccagggctaaggtggagaagctgcgctcagacctgtctcgggagctggaggagatcagcgagcggctggaagaggccggcggggccacgtccgtgcagatcgagatgaacaagaagcgcgaggccgagttccagaagatgcggcgggacctggaggaggccacgctgcagcacgaggccactgccgcggccctgcgcaagaagcacgccgacagcgtggccgagctgggcgagcagatcgacaacctgcagcgggtgaagcagaagctggagaaggagaagagcgagttcaagctggagctggatgacgtcacctccaacatggagcagatcatcaaggccaaggcaggctctgctcggcctcccctcctccaacttcctcctcccacctcccctttctgtccatgtagtgtctcttccttcatggttcattttcccacttcccttcctctgcctggttctcagatcccctccttcttttcacaccttccctcttcttttctccttcagttgcacctcttacaccccttcattccccccgcccccaacatccatcatataactctccttcccttctcaggctaacctggagaagatgtgccggaccttggaagaccagatgaatgagcaccggagcaaggcggaggagacccagcgttctgtcaacgacctcaccagccagcgggccaagttgcaaaccgagaatggtgagcctagagcaggggctccatggttcccaccacagtctccccaacctcctgagccactccagcctcgggcacaagccaatacacgcacacacagacacagagtctctccagaaaatggggcctgagggctagaggaggaggtggggatagagaggagtgctgatctagaatggtgcttccccaggtgagctgtcccggcagctggatgagaaggaggcactgatctcccagctgacccgaggcaagctcacctacacccagcagctggaggacctcaagaggcagctggaggaggaggttaaggtaagggctagactcgggccacctggcccaagcaaggagcacactgactagccttgcatcaaatcacttcccttcccagcaataaggctggctgtggaccaacagttctccaagaattctaaaaagaaatcacagcccaaaccctgccacatgccatctactccccaggctgaggccctctgcttctgctgcatccctggacgggaggcagggtgtgagaaggaggagagaaaatgaactagggaggcacgagatggccttgcccgggcacggctaggggatgtagggactgcacaaatgggtcctggattgctagggccaccctgaaaactggagaaagaaattcaactggagcctattcctagcactttgctggactcatgaaaaaggagaaagaacatgatttttaaaaaactccagggttcatactaacctgcctcttatagctcagtgatcttaggttagggaagtcccctaacctttctgagcctgtttccctctccccagccaggtaaaatggcggtgatgatgaccatgtctggtgtggggaggagctcagggccaatggccatgaagcttttcttaaatagttcactgctgtattggcattctttgttatcagcaaacagtaaaccatgacaggtccactgggggtttggacatagatgaggccaagggatgatgttgagattggggtgaggagaagggcaagggtggggttgctttatggagaaagctgaacccacctcctggtgcccacccctccccaggcgaagaacgccctggcccacgcactgcagtcggcccggcatgactgcgacctgctgcgggagcagtacgaggaggagacggaggccaaggccgagctgcagcgcgtcctttccaaggccaactcggaggtggcccagtggaggaccaagtatgagacggacgccattcagcggactgaggagctcgaggaggccaagtgagttctgagcagcctgacttctggctgaggcccctttgcaggcaggactcagcccagccccagcctcagcagatcccacacaggcgatgcttagctagtgtttgacaacacaggaggactctgccccggccccacctccttctcctctcagggaagctttttgctcgaattatgtttctgatccgaatataagacgaacaaaaggtttgtctgagggcagagtgcttccgtctggggcagggcactgtggcagggaaaggcagtggggagggctgcagaagcccatacctcctcaatgtccatagcgcagaggctgggccagggtcagagggtgcctgggtctccacgccctgctgggatcctctgcctgatgttctcggcccctgggacctgtcctcaggcttctccagctacacttctgaggtttcaaggattgtctttgagaaggttcatgttgtttacctcttgtccccatccacaccctccatcctccccaccctctgccacctcccctgggcaggaagaagctggcccagcggctgcaggaagctgaggaggccgtggaggctgttaatgccaagtgctcctcgctggagaagaccaagcaccggctacagaatgagatcgaggacttgatggtggacgtagagcgctccaatgctgctgctgcagccctggacaagaagcagaggaacttcgacaaggtgggccctgggtgggggccgcagccagcatgcagggcaagggggcatgaggggttcagtgagaggccagagccatcctccttggaggtgggggaggagggctgagcccaggcaggtcctgagacagaccctggacatggggctgaggctggggggctgaagagtgagccttgtccccgggcagatcctggccgagtggaagcagaagtatgaggagtcgcagtcggagctggagtcctcgcagaaggaggctcgctccctcagcacagagctcttcaaactcaagaacgcctatgaggagtccctggaacatctggagaccttcaagcgggagaacaaaaacctgcagggtgtgctgggggcccaagaggctggggaggggctgcactggcagtgttcccatatggtgccacccaagggctccaagaggcgtctgggcaaagaggcgtgtccctccaactccactggacctcagcagccctcaaccgagttaccgtgttccccacacagaggagatctccgacttgactgagcagttgggttccagcggaaagactatccatgagctggagaaggtccgaaagcagctggaggccgagaagatggagctgcagtcagccctggaggaggccgaggtgtgtgtgtgtgcagggcacggggtgcagggagctgagctccaggattttggctccctgttctcatcccccgctttgtcnnnnnnnnnnnnnnnnnnnnnnnnnnnnnnnnnnnnnnnnnnnnnnnnnnnnnnnnnnnnnnnnnnnnnnnnnnnnnnnnnnnnnnnnccagtcactgaactctcttcacataggcattttacccattgcatcttagctgagcttcccatttccacatacctcccggttcccacctctgcctccctctgttttcttttatactctatacctgattgcctctgtttccttggcaacacttttttcttcattttcctccttatcttcatagctggctctcccctgtgagggcctgaatcactttctcttaggcttatttttattttctcttagattctcttttcctccaccttctgcttctttgaaccacttacaccactcttgaagtcacttcgtatccatgattagtgagcaggcccccaccctgccctgtgccctgactgtctgcctgcatcccctcccccaaccccttcccaggcctccctggagcacgaggagggcaagatcctccgggcccagctggagttcaaccagatcaaggcagagatcgagcggaagctggcagagaaggacgaggagatggaacaggccaagcgcaaccacctgcgggtggtggactcgctgcagacctccctggacgcagagacacgcagccgcaacgaggccctgagggtgaagaagaagatggaaggagacctcaatgagatggagatccagctcagccacgcccaaccgcatggccgccgaggcccagaagcaagtcaagagcctccagagcttgttgaaggtactcacccagaggggactggcctccacgtggcctggcgaagcagtagtgtcttgatacaggcaccagattcctcctgcccctaggttactgcagggacctctgacaggtgcctttagtgaagggaaccgaggctggctccctgctcatgcccactctcctgatcctcaggacacccagattcagctggacgatgcagtccgtgccaacgacgacctgaaggagaacatcgccatcgtggagcggcgcaacaacctgctgcaggctgagctggaggagttgcgtgccgtggtggagcagacagagcggtcccggaagctggcggagcaggagctgattgagactagtgagcgggtgcagctgctgcattcccaggtgagcagctcccctgctcattcctgaagggagcacaggctggggctcagcaagcaaggcttgagagctatgcatagatgctcaatgcttttcctgctctgcccaaccctcccccaacccagaacaccagcctcatcaaccagaagaagaagatggatgctgacctgtcccagctccagactgaagtggaggaggcagtgcaggagtgcaggaatgctgaggagaaggccaagaaggccatcacggatgtaagtcccccactccaccgacccgatccagaccagtgtctctccgtgggctgggcagcaagtgtgtgaggacttgaccagaccatgtgccacctctctcctgcacacaggccgccatgatggcagaggagctgaagaaggagcaggacaccagcgcccacctggagcgcatgaagaagaacatggaacagaccattaaggacctgcagcaccggctggacgaagccgagcagatcgccctcaagggcggcaagaagcagctgcagaagctggaagcgcgggtgcgggagctggagaatgagctggaggccgagcagaagcgcaacgcagagtcggtgaagggcatgaggaagagcgagcggcgcatcaaggagctcacctaccaggtgcgacgggcggtgactccaggcagagccctggcaccatagccacagtgacaaccagctgaggagaatgaagagtttgctcttagcctcttccagggcgaggatgggaatgcagcccccgtttaaactttgcctagccctgccccactctgaatgtcccctagctcagaggtcagtctctgagcctcctggcctgggagctccatctcaacacccactcttagcccatgcgccaggggacacacacagaattccagacaaagctcacccagtacagctcaccagaaagcaaatatgtagccagggtcacccccaaaagacaccaaaaacacacccatcccattcaaacaagcataaaaactttttcattgcccagggcagtgtggactctagctttctgaggtgttttctagaatcagactctgaattagaatttgtttcttttccaatccaggatgtcactatctctctaagcacactttgtccttaacttagattaagtcagtgttttcctggcctgcattgcagcccaggaaattccatcacactcatagccccaaagtcactcccagcatgtgccgaggtccagagcaggggacttcatcccgcatggggtccccggaccctgaaaaacctgctccctggagcactgcacacacacaattttgtgcataatttcaggagtcccactagttctttggactctttcctggtacagatcatttaaaatatttacacatatttggtaagaaattataaggagaattcaagtgtttagtgaggatcagaaagtagaattgggtcaggatatcagatgaagcagggcagggcggaggggatgctaccttctatgactgtgccatcttcaccccctgcctaccctctggcccccagacggaggaggacaggaaaaacctgctgcggctgcaggacctggtagacaagctgcagctaaaggtcaaggcctacaagcgccaggccgaggaggcggtgagtgaccctgctggggactaggcccaggggaggcataggagagctcgtcccccaagccaggagtctgagaacccaggccccctctcacctcatgctcccacctcccgcaggaggagcaagccaacaccaacctgtccaagttccgcaaggtgcagcacgagctggatgaggcagaggagcgggcggacatcgccgagtcccaggtcaacaagctgcgggccaagagccgtgacattggcacgaaggtgggtccctcttttgggctttgctagtcacccccacagcaggcatacccagacagagcaccctcaaacccgggatgcttccttttcatttattccacacacttgagccacatggccccagaggccaaggtaatgcagttctctgtgatttcaaggattcttccagctctaannnnnnnnnnnnnnnnnnnnnnnnnnnnnnnnnnnnnnnnnnnnnnnnnnnnnnnnnnnnnnnnnnnnnnnnnnnnnnnnnnnnnnnnnnnnnnnnnnnnnnnnnnnnnnnnnnnnnnnnnnnnnnnnnnnnnnnnnnnnnnnnnnnnnnnnnnnnnnnnnnnnnnnnnnnnnnnnnnnnnnnnnnnnnnnnnnnnnnnnnnnnnnnnnnnnnnnnnnnnnnnnnnnnnnnnnnnnnnnnnnnnnnnnnnnnnnnacgggattacaggcgtggagcaccactcccagctcagctctaagtttcagtggttctgggaatttcagcgttagggaggggtgccacctagaagaccctaatttatatacaaccagtatatcccagtttccccccaactgctagtttccagttcccttccacctaattttgtcctgcaatcattgtaactaaaacctaaaatggacatcccagagaacccgggcctggctttgttctcgcccaggcaacttccctctgaccaaccccagaaccctaccctccagaacttgccccccgaccatcgatccctggaaacacatgtgctgctgccacaggggcttccacctgcccacaaagcaggccccccaccatcagacccctctcacctttgttcccatgccctgtccctgcccaataccatctctccaaggactgattggactttgtttcctttcaaaagggcttgaatgaggagtagctttgccacatcttgatctgctcagccctggaggtgccagcaaagccccatgctggagcctgtgtaacagctccttgggaggaagcagaataaagcaattttccttgaagccgagatcctgactccagactcttcttcactgccctgaggacccggggatggggtctggcataggggaggtggaaatgcacgggagtgggggcaaattcaaaggcctggcctaggaggccttcgtggagcagcactgaaaacccctttcacttcccccaaaccagccaaatgcagtagaggcgacacctctcctcccagccttctccctggtccagccaggatttaaaggagatttagggagacccctaaagttcacctagagcaccctgagcccatctactgtggacctgcaccccagcttccgtcaaccctgccccacccaccaccatggatactgcccagggctgggcaaagggcagcggttcggggtgtgggtgctggccagtgccctttctgagcccggagaagttgtgaaccactgggccaggtgaggcaatggctgcctaagtgccagtcccaggcgagtctctgagagtacacaaggattcacagctgtagcctgcatccccttttaaatagagccaccaccctctccagccaccgccagaagccagcataccccctgcccaccacaggtggagaaacacaccctcagcccacctgccgtcctcctcagctcctcctggtgccgagcccccttggcccagggtgctcccttcttcccactcatttcttcccattgtaattcccattaccaagccctttgtcctctgggcttgtgggaagatggggttctcctggcccatttatggcaagccattcttgaggggaggcagacagatgaggggctggggaaggttatgtgtgaacaggactctggggagagggagggaagggatggctcccgagagggccaggaggtggaggaaagagtaagtctcctccaactaaacaagttcagcccctttggagttcctgccacagctggattgcttaggcaggcctggtactgtgggccacagaggtcaggggcttgaaaggcactggggctgtcggaccccactgggaacctgggaaggagtggttcaaccctggactggatctcccccaacccaccaaccatacccactcggagcccactcctgctctctacccagctctgagctctgaggactgcggcagcagagccaagggcctaagccggagaaggagaaacactactggacaatagcaggtgacagcagaggagaaaaagggggtagggaggggacaaggaaagaacctgagggggtggcagtggacaaagagattgagcaaccacaggacaaggtaaccagaggaaacagagacaaggaaaaaagatgcaggaaatgaggaggccccagaaagatccgcagcgccgccacctttctcctcatagccacctccattctccttccctaggccaacccagacagagctcctcaaaacagggatgcttccttttcatttatccagctcaattgaaccacacagccccagaggccaaggtaattcagtatctctgtgatttctaggattctttcagtnnnnnnnnnnnnnnnnnnnnnnnnnnnnnnnnnnnnnnnnnnnnnnnnnnnnnnnnnnnnnnnnnnnnnnnnnnnnnnnntgggccgagatccctagggccattcctctggctaggaacagacttggacagcaatgcaagagataactagaaacaaaggagagaacccttgaaaagggagctatgcagagagacccagggcacctaagcaaccagagcaagagagaccgcaagagatacagatc

SEQ ID NO: 45786 - DNA, 3063 bp, Homo sapiens
tcccacctcggcgcctcactcattgtcccctcgcgcagtcatcgagcgcagatcccgcgctctcgattggaacgcctccccatcactcagccacactcaggggctggacgcctcactcccgtttccgagccataaaaggtctaggaccgcttcccccgagccagcagaacatccagtcatggataaaaatgagctggttcagaaggccaaactggccgagcaggctgagcgatatgatgacatggcagcctgcatgaagtctgtaactgagcaaggagctgaattatccaatgaggagaggaatcttctctcagttgcttataaaaatgttgtaggagcccgtaggtcatcttggagggtcgtctcaagtattgaacaaaagacggaaggtgctgagaaaaaacagcagatggctcgagaatacagagagaaaattgagacggagctaagagatatctgcaatgatgtactgtctcttttggaaaagttcttgatccccaatgcttcacaagcagagagcaaagtcttctattttgaaaatgaaaggagattactaccgttacttggctgaggttgccgctggtgatgacaagaaagggattgtcgatcagtcacaacaagcataccaagaagcttttgaaatcagcaaaaaggaaatgcaaccaacacatcctatcagactgggtctggcccttaacttctctgtgttctattatgagattctgaactccccagagaaagcctgctctcttgcaaagacagcttttgatgaagccattgctgaacttgatacattaagtgaagagtcatacaaagacagcacgctaataatgcaattactgagagacaacttgacattgtggacatcggatacccaaggagacgaagctgaagcaggagaaggaggggaaaattaaccggccttccaacttttgtctgcctcattctaaaatttacacagtagaccatttgtcatccatgctgtcccacaaatagttttttgtttacgatttatgacaggtttatgttacttctatttgaatttctatatttcccatgtggtttttatgtttaatattaggggagtagagccagttaacatttagggagttatctgttttcatcttgaggtggccaatatggggatgtggaatttttatacaagttataagtgtttggcatagtacttttggtacattgtggcttcaaaagggccagtgtaaaactgcttccatgtctaagcaaagaaaactgcctacatactggtttgtcctggcggggcaataaaagggatcattggttccagtcacaggtgtagtaattgtgggtactttaaggtttggagcacttacaaggctgtggtagaatcataccccatggataccacatattaaaccatgtatatctgtggaatactcaatgtgtacacctttgactacagctgcagaagtgttcctttagacaaagttgtgacccattttactctggataagggcagaaacggttcacattccattatttgtaaagttacctgctgttagctttcattatttttgctacactcattttatttgtatttaaatgttttaggcaacctaagaacaaatgtaaaagtaaagatgcaggaaaaatgaattgcttggtattcattacttcatgtatatcaagcacagcagtaaaacaaaaaccccatgtatttaacttttttttaggatttttgcttttgtgattttttttttttttttttgatacttgcctaacatgcatgtgctgtaaaaatagttaacagggaaataacttgagatgatggctagctttgtttaatgtcttatgaaattttcatgaacaatccaagcataattgttaagaacacgtgtattaaattcatgtaagtggaataaaagttttatgaatggacttttcaactactttctctacagcttttcatgtaaattagtcttggttctgaaacttctctaaaggaaattgtacattttttgaaatttattccttattccctcttggcagctaatgggctcttaccaagtttaaacacaaaatttatcataacaaaaatactactaatataactactgtttccatgtcccatgatcccctctcttcctccccaccctggaaaaaaatgagttcctattttttctgggagagggggggattgattagaaaaaaatgtagtgtgttccatttaaaattttggcatatggcattttctaacttaggaagccacaatgttcttgggcccatcatgacattgggtagcattaactgtaagttttgtggcttccaaatcactttttggtttttaaggaatttcttgatactcttatagcctggccttcaattttgatcctttattctttctatttgtcaggtgcacaagattaccttcctgttttagccttctgtcttgtcaccaaccattcttacttggtggccatgtacttggaaaaaggccgcatgatctttctggctccactcagtgtctaaggcaccctgcttcctttgcttgcatcccacagactatttccctcatcctatttactgcagcaaatctctccttagttgatgagactgtgtttatctccctttaaaaccctacctatcctgaatgggtctgtcattgtctgcctttaaaatccttcctctttcttcctcctctattctctaaataatgatggggctaagttatacccaaagctcactttacaaaatatttcctcagtactttgcagaaaacaccaaacaaaaatgccattttaaaaaaggtgtattttttcttttagaatgtaagctcctcaagagcagggacaatgttttctgtatgttctattgtgcctagtacactgtaaatgctcaataaatattgatgatgggaggcagtgagtcttgatgataagggtgagaaactgaaatcccaaacactgttttgttgcttgttttattatgacctcagattaaattgggaaatattggcccttttgaataattgtcccaaatattacattcaaataaaagtgcaatggagaaaaaaaaaaaaaaaaa

SEQ ID NO: 45787 - DNA, 2966 bp, Homo sapiens
  misc_feature (1)...(2966): n = a,t,c or g
gaattcaggactcaatggtgctcagaacccccacaatctattggctgtgcttggccccttttcccaacacacacattctgtctggtgggtggaagttaaacacgcggggaggaggaaaggaataggatagagagtggaatggggtcggtaggggtctcaaggactggctatcctgacagccttccccgcgttcaggttgaccaacatggcctgcagccagagggcacccacctgaccctcaaagagaggacaagttgggtggagtctgtggctgacactctgtgcacaatccttacaacactggtgatggtgagaagggaaagacgacaagccagggggcatgatcccagcatgtgtgggaggagcttctaaattatccactagcacaagcccgtcagtggccccatgcataaatgtacacagaaacaggtggggtcaagcagggagagagaactggccagggtataaaaagggcccacaagagaccggctctaggatcccaaggcccaactccccgaaccactcagggtcctgtggacagctcacctagtggcaatggctccaggtaagcgcccctaaaatccctttgggcacaacgtgtcctgaggggagaggcagcgccctgtagatgggacgggggcactaaccctcaggtttggggcttatgaatgtgagtatcgccatctaaggccagatatttggccaatctctgaatgttcctggtctctggagggatggagagagagaaaaaaaacaaacagctcctggagcagggagagcgctggcctcttcctctccggctccctccattgccctccggtttctcccnnnnnnnnnnnnnnnnnnnnnnnnnnnnnnnnnnnnnnnnnnnnnnnnnnnnnnnnnnnnnnnnnnnnnnnnnnnnnnnnnnnnnnnnnnnnnnnnnnnnnnnnnnnnnnnnnnnnnnnnnnnnnnnnnnnnnnnnnnnnnnnnnnnnnnnnnnnnnnnnnnnnntaagttcttggggaatgggtgcgggtcaggggtggcaagaaggggtgactttcccccactggggaagtaatgggaggagactaaggagctcagggttgttttctgaagcgaaaatgcaggcagatgagcataggctgagccaggttcccagaaaagcaacaatgggagctggtctccagcatagaaaccagcagtccttcttggtggggggtccttctcctagnnnnnnnnnnnnnnnnnnnnnnnnnnnnnnnnnnnnnnnnnnnnnnnnnnnnnnnnnnnnnnnnnnnnnnnnnnnnnnnnnnnnnnnnnnnnnnnnnnnnnnnnnnnnnnnnnnnnnnntgtgagtggatgccttctccctaggcggggatgggggagacctgtggtcagggctcccgggcagcacagccactgccggtccttcccctgcagaatctagagctgctccgcctnnnnnnnnnnnnnnnnnnnnnnnnnnnnnnnnnnnnnnnnnnnnnnnnnnnnnnnnnnnnnnnnnnnnnnnnnnnnnnnnnnnnnnnnnnnnnnnnnnnnnnnnnnnnnnnnnnnnnnnnnnnnnnnnnnnnnnnnnnnnnngtgagggtggcgccaggggtcaccaatcctggaaccccactggcttcgagggctgggggagagaaatactgctgccctctttttagcagtaaggcgctgacccaagagaactcaccttattcttcatttcgcctggtgaatcctccaggcctttctctacaccctgaaggggagggaggaaaatggataaatgagagagggagggaacagtgcccaagcgcttgggcctctccttctcttccttcactttgcannnnnnnnnnnnnnnnnnnnnnnnnnnnnnnnnnnnnnnnnnnnnnnnnnnnnnnnnnnnnnnnnnnnnnnnnnnnnnnnnnnnnnnnnnnnnnnnnnnnnnnnnnnnnnnnnnnnnnnnnnnnnnnnnnnnnnnnnnnnnnnnnnnnnnnnnnnnnnnnnnnnnnnnnnnnnnnnnnnnnnnnnnnnnnnnnnnnnnnnnnnnnnnnnnnnnnnntgtgagccnnnnnnnnnnnnnnnnnnnnnnnnnnnnnnnnnnnnnnnnnnnnnnnnnnnnnnnnnnnnnnnnnnnnnnnnnnnnnnnnnnnnntttcatctgactaggtgtcgattctataatattatggggtggaaggtggtggtatggagcaaggggtaggtggaaagaagacctggagggccttcaaggtctattgggaactaggccactgaaatataagaggcttggctgttcctgggccagaaaaaggctgacacatcaccgctattactcactaaggccattcaccagctcagtggtcccagcttgctgtcacagctcattggtcatcccagagatgacttgaaggcatttcttcctcccccaccatcaccagcaacaccaaacctagccctcaggagcgggaagaaatgaaaacaagatgggctattaagtgcagaggcaaaaactccccaacaggtgaggaaacaatggcatagaattacttgtgttcagaacaattttaggatgaatattccttaagcccaactactctcgggaaatgagatccaatgtcaaaaatgagtttgagacatacagaaccagagcatttggaatctgaattagggcaagggaagtggaagagagattttatttggggttgtaaatgcagtgccaacagtgccaggtagataacaatgtaagcaatgagggctggatgggaggggataaatcccagatgacactcgcttgtccttcaggggatgcaacacagaggggtgggaaccagcacaatctgcagaactcaagcccctgctgaggtgggacccacccagcctgtcaccatcaggactgaagggacacggcttccagaccttctgattctttgagacagccaggacatccagacttttacgaggaattc

SEQ ID NO: 45788 - DNA, 1277 bp, Homo sapiens
ttttaggtttaaagacatttattcaactgacacttgtctttagtagccagcccatctcttctttgggtggtgtctctagccgagaatggcacctcagtctccagactgcccagggttctcccctcaccgcacagccatttaatcaccaaatagattgggcagtccatttaatgcaaagattctctgacatgtgtgtccagatgttcagacggaagcagagattccagctgccactccccagccctttctctatcactgtttaggacctgtgatgtcccacagcacagagctgggaccactgctttcaggtgtgatcctatctttttaaaatttttaatcagcgaattttaagaaacatagaacttgtaagccccagaagacagaacctctaatgatgacatttcagccctgcgccagataggggtagaagggatacttttgtgaatgagaaaacattcagattctcaaaaatccacactctgtgagttattatttgctttacctactcatggtggttaagaaagcagcaacaggtaataccttcagattcataaagtcacaggcagtctggttcatttaaacttgacatgtagaatggattagaaaccactttgatctggtcagcctgaggccacatggttgtatattaaatcttttgtctcaaggaccaagggcattttttttttccgttgagaaaagtacagtccactcagaggtgctaaaataaatcccacatttttttttcattattttctggaatagtgtttgaatgatgggcaaaccctcaagtggagaatttgctttcacacacgtagcagcttcaactgctgagatcatgttgttcagcacccattctaatccacatggaaaggggcacgggggtgttgtgggtggggaggggtggtgcagctctgggccccaggggtcttgggagtgatccatttctggatgtctgcattgtgtggggtcccgtcattcactctgtcacttgctctgacttgagttcgctctccagatcgatttcattttttttacaggtgggaatcttgttactccacgtcccatccttcagacactcaatctgggaatgtgtccatctccacattatccttcagcactttgtagcctgtgtcacagctgacgagcacttggtctttgaagaaatacttggcttgggagggctcgattttcccatggacaggaggctgtagctctgggcactcatttcctgcagccctgtatgagagcctccagccccggttctctcccgagttgtc

SEQ ID NO: 45789 - DNA, 397 bp, Homo sapiens
  misc_feature (1)...(397): n = a,t,c or g
tgacgaagtgtcgtgaataaaagaaaggagaccgcagaagtaaagaagtggggagtttaggcaagtgcctgatttgggtgtctgcttttggggcagagttttcatcggaggcatgcagagagttaggcttttctagcaacttgctttgcagctcttgtgatcttctcggacagttcaacctgcttcagctggatcctgattgcagaggatgctgtcaggaggaagcacaatttgaaaccaaaaagctgtatgcaggagctattcttgaagtttgtgggnntccctcaagtccaagcttttgttncgagtgataaacccanactgttcagaggactgnnatcaagtatgtcgtgggtccnccctgtattnnacttttggacgacatggnnacatttgt

SEQ ID NO: 45790 - DNA, 1548 bp, Homo sapiens
ttttttttaagcaaagaaaaatcatttttaatataaaaattctatatcaagagatattccttaaataatataccaatgaaaatgtgttcataaatgaaaaaactttgaaaaataaaatcagacaaatataaagcactattaccaacaataagatgttataagttttaaatattacagccatttttacattttggctaaaaaaagggcttacatgaaaaaaatgcattgaaaaacatcatttttaaacatgaaagaacaaaccagaagaattccaaattcagatagatttttgaaactttttatttatattttggtcttacaaatgatcacttttaaatggacttttctgtaagaatgtaaaactcaaaaatttgccaagtatgtatctgatccacacaaatccctagaaaggttttctgtgtagtcttcattaacgcaaatctttgtgaatgtttcactcttactgtaggatcttgaatatgttttacaataatgaagctacaaagtttttatgcagtgcattcattgtaaactataaataacatttgtattaaaaagaaagctgggtaatacaaaaataggagagactctgaggagcaggcaatctgttgaggctcagtatatcttatttgcctttgtagtctgctgtcattcctttcaaagagcacacagcacatgaggcatagtaatcatctgtcttgttaacctctctaatttagaaatctgttgttcgtaaaactggaccaattatcacaaactatcatttgcataattaaccgcaagtctgttacaaagcattttgttagtggtatcaacaaatgcaggaggatggacatttataaaaaatgggttttgttaagcttgccaactccttagatatcatggactatactgccatttcacgatttaattagatatttaatgcctcaagtaaaagactgatcaatggaagcaagcaaaactaaattattttctaggtgctgtaatatttcatttgataaggtaacaaaaggataggacaaaatttaagcaagatttatatgcgttccaacttttcactcaggaattcttctacactgtctgtgttccatttgagaatgctcagttcttcagcaatgttcccattgtcgtccaaaagctttaatacagggtctgaaccacggacatacttgatttgcagtcctctgaacagtttgggtttatcactcctaacaaaagcttggacttgagggaaccttcccaattttcatccacaaacttcaagaatagctcctgcatacagctttttggtttcaaattgtgcttcctcctgacagcatcctctgcaatcaggatccagctgaagcaggttgaactgtccgagaagatcacaagacgctgcaaagcaagttgctagaaaagcctaactctctgcatgcctccgatgaaaactctgccccaaaagcagacaccgcttgaagcacagtcgccaacaacaaccgtagcccaaacgccggcaccagacacccactcgggcccagccgccatcgctaccattttccgcaggtt

SEQ ID NO: 45791 - DNA, 4631 bp, Homo sapiens
gcaggcaggcggcgggcgctcagacggcttctcctcctcctcttgctcctccagctcctgctccttcgccgggaggccgcccgccgagtcctgcgccagcgccgaggcagcctcgctgcgccccatcccgtcccgccgggcactcggagggcagcgcgccggaggccaaggttgccccgcacggcccggcgggcgagcgagctcgggctgcagcagccccgccggcggcgcgcacggcaactttggagaggcgagcagcagccccggcagcggcggcagcagcggcaatgaccccttggctcgggctcatcgtgctcctgggcagctggagcctgggggactggggcgccgaggcgtgcacatgctcgcccagccacccccaggacgccttctgcaactccgacatcgtgatccgggccaaggtggtggggaagaagctggtaaaggaggggcccttcggcacgctggtctacaccatcaagcagatgaagatgtaccgaggcttcaccaagatgccccatgtgcagtacatccacacggaagcttccgagagtctctgtggccttaagctggaggtcaacaagtaccagtacctgctgacaggtcgcgtctatgatggcaagatgtacacggggctgtgcaacttcgtggagaggtgggaccagctcaccctctcccagcgcaaggggctgaactatcggtatcacctgggttgtaactgcaagatcaagtcctgctactacctgccttgctttgtgacttccaagaacgagtgtctctggaccgacatgctctccaatttcggttaccctggctaccagtccaaacactacgcctgcatccggcagaagggcggctactgcagctggtaccgaggatgggcccccccggataaaagcatcatcaatgccacagacccctgagcgccagaccctgccccacctcacttccctcccttcccgctgagcttcccttggacactaactcttcccagatgatgacaatgaaattagtgcctgttttcttgcaaatttagcacttggaacatttaaagaaaggtctatgctgtcatatggggtttattgggaactatcctcctggccccaccctgccccttctttttggttttgacatcattcatttccacctgggaatttctggtgccatgccagaaagaatgaggaacctgtattcctcttcttcgtgataatataatctctatttttttaggaaaacaaaaatgaaaaactactccatttgaggattgtaattcccacccctcttgcttcttccccacctcaccatctcccagaccctcttccctttgcccttctcctccaatacataaagggacacagacaaggaacttgctgaaagggccaaccatttcagggatcagtcaaaggcagcaagcagatagactcaaggtgtgtgaaagatgttatacaccagggagctggccactgcatgtcccaaccagactggtgtctggtctggtggtctgcatgtaagagtgagggagggaaggaaggaactacaagagagtcggagatgatgcagcacacacacaattccccagcccagtgatgcttgtgttgaccagatgttcctgagtctggagcaagcacccaggccagaataacagagctttcttagttggtgaagacttaaacatctgcctgaggtcaggaggcaatttgcctgccttgtacaaaagctcaggtgaaagactgagatgaatgtctttcctctccctgcctcccaccagacttcctcctggaaaacgctttggtagatttggccaggagctttcttttatgtaaattgggataaatacacacaccatacactatccacagatatagccaagtagatttgggtagaggatactatttccagaatagtgtttagctcacctagggggatatgtttgtatacacatttgcatatacccacatggggacataagctaatttttttacaggacacagaattctgttcaatgctgttaaatatgccaatagtttaatctcttctattttgttgtcgttgcttgtttgaagaaaatcatgacattccaagttgacattttttttttcattttaattaaaatttgaaattctgaacaccgtcagcaccctctcttccctatcatggggtcatctgacccctgtccgtctccttgtccctgcttcatgtttgggggcctttctttaactgccttcctggcttagctcagatggcagatgagagtgtagtcaagggcctgggcacaggagggagagctgcagagtgtcctgcctgccttggctggagggacacctctcctgggtgtggagacagcttggttccctttccctagctccctggtgggtgaatgccacctcctgagatcctcacctcttggaattaaaattgttggtcactggggaaagcctgagtttgcaaccagttgtagggtttctgttgtgtttttttttttttttttgaaataaaactataatataaattctcctattaaataaaattattttaagttttagtgtcaaaagtgagatgctgagagtaggtgataatgtatattttacagagtgggggttggcaggatggtgacattgaacatgattgctctctgtctcttttttcagcttatgggtatttatcttctattagtatttgtatcttcagttcattccactttaggaaacagagctgccaattgaaacagaagaagaaaaaaaaaaaagcagcagacaacacactgtagagtcttgcacacacacaagtgcccaggcaaggtgcttggcagaaccgcagagtgggaagagagtaccggcatcgggtttccttgggatcaatttcattaccgtgtacctttcccattgtggtcacggccatttggcagggggagaatgggaggcttggccttctttgtgaggcagtgtgagcagaagaagctgatgcccagcatgtcactggttttgaagggatgagcccagacttgatgttttgggattgtccttattttaacctcaaggtctcgcatggtggggcccctgaccaacctacacaagttccctcccacaagtggacatcagtgtcttctctgtgaggcatctggccattcgcactccctggtgtggtcagcctctctcacacaaggaggaacttgggtgaaggctgagtgtgaggcacctgaagtttccctgcggagtcgataaattagcagaaccacatccccatctgttaggccttggtgaggaggccctgggcaaagaagggtctttcgcaaagcgatgtcagagggcggttttgagctttctataagctatagctttgtttatttcacccgttcacttactgtataatttaaaatcatttatgtagctgagacacttctgtatttcaatcatatcatgaacattttattttgctaaatcttgtgtcatgtgtaggctgtaatatgtgtacattgtgtttaagagaaaaatgaaacccacatgccgccattttcctgaatcaaattctgcagtggaatggagaggaaaatacttctaggcaagcagctagactggtgaattgggggaaatagaaggaactagtaactgagactcctccagcctcttccctattggaatcccaatggctcctggagtaggaaaaaagtttaaactacattcatgttcttgttctgtgtcactcggccctggggtagtctacccatttacttcaccccaagtcctgctgcccatccagttggggaagccatggattttcctaagaatccaggggccatgggagatacaattccaagttctcgcttcctcctttgggcatctcttctgcctcccaatcaaggaagctccatggttcaggctctcagctctcggggccagtgctctgctctgtccagggtaggtaatactgggagactcctgtcttttaccctcccctcgttccagacctgcctcatggtggcaacatgggttcttgaacaattaaagaaacaaatggactttttggaataggccctgtctagggcaaactgtggcccccaggagacactacccttccatgccccagacctctgtcttgcatgtgacaattgacaatctggactaccccaagatggcacccaagtgtttggcttctggctacctaaggttaacatgtcactagagtatttttatgagagacaaacattataaaaatctgatggcaaaagcaaaacaaaatggaaagtaggggaggtggatgtgacaacaacttcccaaattggctctttggaggcgagaggaaggggagaacttggagaatagtttttgctttgggggtagaggcttcttagattctcccagcatccgcctttccctttagccagtctgctgtcctgaaacccagaagtgatggagagaaaccaacaagagatctcgaaccctgtctagaaggaatgtatttgttgctaaatttcgtagcactgtttacagttttcctccatgttatttatgaattttatattccgtgaatgtatattgtcttgtaatgttgcataatgttcactttttatagtgtgtcctttattctaaacagtaaagtggttttatttctatcacaaaaaaaaaaaaaaaaaa

SEQ ID NO: 45792 - DNA, 657 bp, Homo sapiens
tttttttgcaggggcccagggcagcgctgggtgctttatttccatgctgggcgcccgggaagtatgtacagggggtacgtgccaagcatcctcgtgcgaccgcgagagcccggggagcgggggcttgccggccgtcgcactcatttacccggggacagggagaggctcttctgcgtgtagtggttgtgcagagcctcatgcatcacggagcatgagaagacgttcccctgctgccacctgctcttgtccacggtgagcttgctgtagaggaagaaggagccgtcggagtccagcacgggaggcgtggtcttgtagttgttctccggctgcccattgctctcccactccacggcgatgtcgctgggatagaagcctttgaccaggcaggtcaggctgacctggttcttggtcagctcatcccgggatgggggcaggtggcagcaggggaacgtcttctcatgctccgtgatgcatgaggctctgcacaaccactacacgcagaagagcctctccctgtctccgggtaaatgagtgcgacggccggcaagcccccgctccccgggctctcgcggtcgcacgaggatgcttggcacgtaccccctgtacatacttcccgggcgcccagcatggaaataaagcacccagcgctgccctggg

SEQ ID NO: 45793 - DNA, 5927 bp, Homo sapiens
  misc_feature (1)...(5927): n = a,t,c or g
ccctgcatgcaccaagcagcggaggtctggggtagacctgctatgcacagggtctggaaggggggcgtgtcaggtgtgtcagggtcagagggcaactgcgaggccagagagccatggggttgagggcggtgaggtcgggggcaggtgtggcctgggtggtggctgagcatggcccatggctggtgtgtggggtctgggcggccctggacaccccgcagagggtggccctaggccccctgtccgatcatgttcctgtagtcggggatgatggtctgcttcaggtccaccaccgaggagaagatccacttcacctgtaggcaaggcacagcacaggggtgagcgaggccacagccctgcccccgaggcctgctcacccctcaggccacccaggccacagccctgcccctgaggcctatccggcccctcatgccacccatgtgccagggcctcaccactgcctgctctgaggcctggacagggagagcagagccagggcagcaacagcatgtggacagcacagaagatagtgtcaggtggggacagcacgggggacagtgtcagagacaggtgaggacagcatgggggacagtgtcagggacaggtgaggacagcatgggggacagtgtcagggacaggttgagacagtgtggggggagagtgttggggacaggtgaggacagtgtggaggagagtgttggggacaggtgaggacagcatgggggacagtgtcagggataggtggggacagcgtggaggacagtgtcagggacaggtggagacagtgtgggggagagtgttggggacaggtgagaacagcgtggaggagagtgtcaggggcaggtggggacagcatgggtgacagtgtcagggagaggtggggacatcatgaggacagcatcagggacaggtggggacagtatgtgtacagtgtcagagatgggtgaggacagcatgggggacagtgtcagggacaggtggagactgtgtgggggacagtgttggagacacgtgggaacagcatgggagaaagtgtcggggacaggtagggacagtgtgggggacagtgttaggaaccggtggggacagcatgggggacagtgtcagggaggtgtggggacagtgtgggggacagcatcagggacaggtggagacagcgtaggggatagtgttggctacaggtggggacagagtgggggacagtgtcagggaaaggaggaaacagagtggcggacagtgttggggacaggaggaaacagcatgggggacattgttggggacaggaggggacagcatgggggacagtgttggggacaggtgggaaaagcatggtgtacagtgttggggactggtggggacagcatgggggaaagtgttggggacaggaggggacagtgtgtaggacagtgttagggagaggtggggacagtgtgggggacagtgtcagggggaggtggggacagtgtgggggacagcgtcagggacaggtggggacagtgtgggggacagcatcagggacagctggggacaccatagggacattgtcgggacagatggggatggcatgggggacagtgtcagggacaggtggggacagtgtgggggacagcatcagggacaagtggggaccacgtngggggacagcgtcagggagaggtggggacagtgtgggggacagcatcagggacagctggggacaccctggggacattgtcgggacagatggggatggcatgggggacagtgtcagggacaggtggggacagcgtgggggagagtggtggggacagattgggacagtgtgggggacagcatcagggacaggtggggacagcatgggggacattgttgaggacaagtggggacagcgtggggtacagtgtcgcagatgagtggggacagcatgagagacagtgtcagggacagtgtcagggacaggtggggatagcatgggggacagtgtcagtgacagtttgtgacagcatgggggacagtgtgagggacagtttttgagagcgtgggggacagtgtcagggacaggtggggcagctggggacagtgtcagggacagtgtgtgacagcatggaggacaatgtcaaggacagctggggacaacgtgcggccgaccttgaagaaggtgacggtggcactgtagcacacgcttaacaggaagagtgtgatgaagatggtgatggtcgtccacagcccgtccagctccccgtcctgcgcctccgcacagctctcctccagttgcagctctggacaggaagagggtggtcagtgctgtgtccccctgggcttgggcctctgggggtgattccctctgtggcaggacccaggatgtagggcccggccgggatgggccaacagtgtcctgaggtcagctccccacagctgcccgccctgggcaccagctttggccccgggactcagccagacacccggccctagatagagacctggccctcagcaggacccactccccgtctcccgtgtccctccctgaggcccagagggcaggaggatggtgaagcccacacctcatgtgacctcagctgcagggaagggctgtattgggaagtgggccagtgccagggacgcgacgtggcgtgtgttcccctgtgtgtgggggctgtgtgtgtggcggctgcaggggcaccttgtgagaggagggctgggtttgtctgagcaggtcagcatgtggagaagctgccgagcggctcgtgggccttgaggtgccgcgtggggctcgtgggggcctgtgtctgaggagtgttcacgtgtgcgaggacgttgctctggtctgggtgctgtgcggttcgcccgggtgaggctccgtgtgtgaggcgtgcacgtgtgtgtgtggtggccgtgtggcggccaacctcagtgcggggtttgttgaacgggtctgggctgagtgtgtgtgtgggcatctgcaccagtccctccacagggcccgagagtgcatgtccccggagtcggttgtgtccccatgtgggtgcgaggctgggcagggctgccaggggttagtgccgtgggggtagatgggtgagggagggcctctccctacgcacatggactaggcatgcccccgagtgggcatcggggtcggaggacagggcgctcacaggacaggacagtctcctacagaggcaggggctgtgtgtctgtccccaggggctcctagggcttctcgtggcccaccccagggcagcttcttctggagggagggccacgctggcaaatcccccaccctgccgagggcagcccctggctgagccccaccctaggcggcccaggcacacctgcacagcctgggccagtgtggggacagtgggacccgctctgcctccctcatgtcactcaggcctcagactcggcctgacccgtggaaagaaccatcacagtctcacaggggcccagggcagcgctgggtgctttatttccatgctgggtgcccgggaagtatgtacacggggtacgtgccaagcatcctcgcgcgaccccgagagcccggggagcgggggcttgccggccctggcactcatttacccagagacagggagaggctcttctgcgtgtagtggttgtgcagagcctcatgcatcacggagcatgagaagacattcccctcctgccacctgctcttgtccacggttagcctgctgtagaggaagaaggagccgtcggagtccagcacgggaggcgtggtcttgtagttgttctccggctgcccattgctctcccactccacggcgatgtcgctggggtagaagcctttgaccaggcaggtcaggctgacctggttcttggtcatctcctcctgggatgggggcagggtgtacacctgtggctctcggggctgtcctgtagggacagaggttggcacagcggtcactcccagggcagagggtgggtcaagctggcctctgtccatgtggccctcataccccgcgggtcccacctttggttttggagatggttttctcgatgggggctgggagggctttgttggagaccttgcacttgtactccttgccgttcagccagtcctggtgcaggacggtgaggacgctgaccacacggaacgtgctgttgtactgctcctcccgcggctttgtcttggcattatgcacctccacgccgtccacgtaccagttgaactggacctcggggtcttcgtggctcacgtccaccaccacgcacgtgacctcaggggtccgggagatcatgagagtgtccttgggttttggggggaagaggaagactgacggtcctcccaggagttcaggtgctgaggaagagatggaggcagatgtgtcagcacccgactgggacctgtccctggatgcaggccactctagggcacctgtcctgccttgagctggagggcgaggcctgggctggcttacctgggcaccttgggcacgggggaggtgtgtcacaagatttgggctctgcagagagaagattgggagttacggggatctgggatggaggtggatgcgtcagcaccctgctggggcctgtccctggactcaggccactctagggctcttgtcccgccttgagctggagggcgaggcctgggctggcttacctgggcaccgtgggcatgggggaggtgtgtcacaagatttgggctctgcagagagaagattgggagttacggggatctgggatggaggtggacgcgtcagcaccctgctggggcctgtccctggactcaggccactctagggctcttgtcctgccttgagctggagggtgaggcctgggctggcttacctgggcaccgtgggcacgggggaggtgtgtcacaagatttgggctctgcagagagaagattgggagttacggggatctgggatggaggtggatgcgtcagcaccctgctggggcctgtccctggactcaggccactctagggctcttgtcccgccttgagctggagggcgagtcctgggctggcttacctgggcaccgtgggcatgtgtgagttgtgtcaccaagtggggttttgagctctgcagagagaagattgggagttactcagatctgggaagagagaaggtgtctgagctgagtgagtagagagtttggcctttggggtgggcttaggtcaggggcagggtcctcctggatatggcttttggcagctctgagcgcagcacctgcccctgtgtgtgaagggcctggggtaggggcatccagcctgtgcctgcccggagcctggtggaaaaagccagaagaccctctccctgagcatgagtggggcgggcagaggctccgggtgaggagtcagacggggcctgccttgctgccctgggctgggactgcacagccgggatgcgtccaggcaggagggctgagcctggcttccagcagacaccctccctccctgcgctggcctctcaccaactctcttgtccaccttggtgttgctgggcttgtgattcacgttgcaggtgtaggtctgggtgcccaagctgctggagggcacggtcaccacgctgctgagggagtagagtcctgaggactgtaggacagccgggaaggtgtgcacgccgctggtcagggcgcctgagttccacgacaccgtcaccggttcggggaagtagtccttgaccaggcagcccagggccgctgtgcccccagaggtgctcctggagcagggcgccagggggaagaccgatgggcccttggtggaggctgcaagagagatggcgccatgtgactgcggtgtgggacagagctgggcccagggcgcagaggcccctcggttcttgtctatccacgagggtccaggcagggtccagtgtctgggctcacgggcattgggtgtgcgcctggctggcgccacctgcgtcaccttagccccctccctgcccccagccaaagtcaggcctggcctgccccagaaagct

SEQ ID NO: 45794 - DNA, 2133 bp, Homo sapiens
gcggcgtgcacaccttcccggctgtcctacagtcctcaggactctactccctcagcagcgtggtgaccgtgacctccagcaacttcggcacccagacctacacctgcaacgtagatcacaagcccagcaacaccaaggtggacaagacagttgagcgcaaatgttgtgtcgagtgcccaccgtgcccagcaccacctgtggcaggaccgtcagtcttcctcttccccccaaaacccaaggacaccctcatgatctcccggacccctgaggtcacgtgcgtggtggtggacgtgagccacgaagaccccgaggtccagttcaactggtacgtggacggcgtggaggtgcataatgccaagacaaagccacgggaggagcagttcaacagcacgttccgtgtggtcagcgtcctcaccgtcgtgcaccaggactggctgaacggcaaggagtacaagtgcaaggtctccaacaaaggcctcccagcccccatcgagaaaaccatctccaaaaccaaaggacagccccgagaaccacaggtgtacaccctgcccccatcccgggaggagatgaccaagaaccaggtcagcctgacctgcctggtcaaaggcttctaccccagcgacatcgccgtggagtgggagagcagcgggcagccggagaacaactacaacaccacgcctcccgtgctggactccgacggctccttcttcctctacagcaggctaaccgtggacaagagcaggtggcaggaggggaatgtcttctcatgctccgtgatgcatgaggctctgcacaaccactacacacagaagagcctctccctgtctctgggtaaatgagtgccagggccggcaagcccccgctccccgggctctcggggtcgcgcgaggatgcttggcacgtaccccgtctacatacttcccaggcacccagcatggaaataaagcacccaccactgccctgggaagtatgtagacggggtacgtgccaagcatcctcgtgcgaccgcgagagcccggggagcgggggcttgccggccgtcgcactcatttacccggagacagggagaggctcttctgcgtgtagtggttgtgcagagcctcatgcatcacggagcatgagaagacgttcccctgctgccacctgctcttgtccacggtgagcttgctgtagaggaagaaggagccgtcggagtccagcacgggaggcgtggtcttgtagttgttctccggctgcccattgctctcccactccacggcgatgtcgctgggatagaagccttttgaccaggcaggtcaggctgacctggttcttggtcagctcatcccgggatgggggcagggtgtacacctgtggttctcggggctgccctttggctttggagatggttttctcgatgggggctgggagggctttgttggagaccttgcacttgtactccttgccattcagccagtcctggtgcaggacggtgaggacgctgaccacacggtacgtgctgttgtactgctcctcccgcggctttgtcttggcattatgcacctccacgccgtccacgtaccagttgaacttgacctcagggtcttcgtggctcacgtccaccaccacgcatgtgacctcaggggtccgggagatcatgagggtgtccttgggttttggggggaagaggaagactgacggtccccccaggagttcaggtgctgggcacggtgggcatgtgtgagttttgtcacaagatttgggctcaactctcttgtccaccttggtgttgctgggcttgtgattcacgttgcagatgtaggtctgggtgcccaagctgctggagggcacggtcaccacgctgctgagggagtagagtcctgaggactgtaggacagccgggaaggtgtgcacgccgctggtcagggcgcctgagttccacgacaccgtcaccggttcggggaagtagtccttgaccaggcagcccagggccgctgtgcccccagaggtgctcttggaggagggtgccagggggaagaccgatgggcccttggtggaggctgaggagacggtgaccagggttccctggccccagacatccatgtagtaataatagaggtcggcagtcatcgtcatccattctcttgcacaatc

SEQ ID NO: 45795 - DNA, 1527 bp, Homo sapiens
ctgggcggcggctgaggcgcgtgctctcgcgtggtcgctgggtctgcgtcttcccgagccagtgtgctgagctctccgcgtcgcctctgtcgcccgcgcctggcctaccgcggcactcccggctgcacgctctgcttggcctcgccatgccggtggacctcagcaagtggtccgggcccttgagcctgcaagaagtggacgagcagccgcagcacccgctgcatgtcacctacgccggggcggcggtggacgagcctgggcaaagtgctgacgcccacccaggttaagaatagacccaccagcattttcgtggggatggtcttgattcagggaagctctacaccttggtccttgacagacccggatgctcccagcaggaaggatcccaaatacagagaatggcatcatttcctggtggtcaacatgaagggcaatgacatcagcagtggcacagtcctctccgattatgtgggctcggggcctccccaagggcacaggcctccaccgctatgtctggctggtttacgagcaggacaggccgctaaagtgtgacgagcccatcctcagcaacccgatctggagaccaccgtggcaaattcaaggtggcgtccttccgtaaaaagtatgagctcagggcccccggtggctggcacgtgttaccaggccgagtgggatgactatgtgccccaaactgtacgagcagctgtctgggaagtagggggttagcttgggggacctgaactgtccctggaggcccccaagccatgttccccagttcagtgttgcatgtataatagatttctcctcttcctgcccccccttggcatgggtgagacctgaccagtcagatggtagttgagggtgacttttcctgctgcctggcctttataattttactcactcactctgatttatgttttgatcaaatttgaacttcattttggggggtattttggtactgtgatggggtcatcaaattattaatctgaaaatagcaacccagaatgtaaaaaagaaaaaactggggggaaaaagaccaggtctacagtgatagagcaaagcatcaaagaatctttaaggaaggtttaaaaaaaaaaaaaaaaaaaaaaagattggttgcctctgcctttgtgatcctgagtccagaatggtacacaatgtgattttatggtgatgtcactcacctagacaaccagaggctggcattgaggctaacctccaacacagtgcatctcagatgcctcagtaggcatcagtatgtcactctggtccctttaaagagcaatcctgggaagaagcaggagggagggtggctttgctgttgttgggacatggcaatctagaccggtagcagcgcttcgctgacagcttgggaggaaacctgagatctgtgtttttttaaattgatcgttcttcatgggggtaagaaaagctggtctggagttgctgaatgttgcattaattgtgctgtttgcttgtagttgaataaaaatagaaacctgaatgaaaaaaaaaaaaaaaattttt

SEQ ID NO: 45796 - DNA, 825 bp, Homo sapiens
  misc_feature (1)...(825): n = a,t,c or g
gttaactccaaatttctttatagctgattatttcaaactaggatccaattaaagtttacatatgacacttggttataactctttagttggatataacattattattattttgataaaatatggaacaaatcaattctattaataagtggtcacatttgttttgggcttaaattactttttaaagatactggattttcctaagatttctgatttacactgatatttttttttgtcattcttaattgcatcacacaatagatgtaaatgaagatgtagtcacctcagataaaattggtatcgtgtatgataatattgtatcatttatatttgccttatgttaactttaagaaattgatttttttgtattaatcattttcccattgcaacagagctatattttttctattttaagaatcatattttaggattatttttggcaaatacagtgagcacttatgtaaccagatgataatgaactcaaatgtcatgatagcttgcataaatggtgactctagtagatttgactcaagcacttctagaatcatgcactgaattcaaaagaaaaatcttgctgctttttgtccagggcttgttctattcaacttctaatttgaaagctgtacaaagtaatagaagttccatttaaatatgagttcaaaactgtatttactttttatgtggccctctctttaggggattctaattttacttagggtctctaagtgcagcataatgttcctgatgttaacagaagactgtatttttaaagttacaaatttgtatatgggaattaagtaatgggcgcccataacgcnggttgtgggg

SEQ ID NO: 45797 - DNA, 960 bp, Homo sapiens
ttttttaacagatgataaatggagtttttctttattatatcatatttctaaatcaaggaagctgaaattatatacttaaatatactctggtcaaaatatacatgaaccacaaatattaacttctacctaccaacaatttacagttatgttgtatgtggaatttcattcttgtcagaactcacaatggaaataaaatttctattatgggtgagaagatgagggaaagaattaaggggaaaaaatttggacagcacacacttttctttcattccaaaggtgccagtcagaacacagatccatggagttccacatctagccccaggctaccaagcattaattcaatgtaaatggtgtcactacaacatcaaaaagagcagtgctaggcagaggattttgtataaaatcatctaaaactctgaaaaactacaaaagcatctcaagaaaaaaattaggtaaaagcaatggagtttatttcagtgaaattattttaaattagatatgatatattaagctcccatatgccccaacctggtagaaaagttcctctcagtgagaaatcatttattttaatggcaaaatttttacatatcagtaaaatctgttatacttaaaactatgtatacagtacatttctggcaaaaaaccttatacatctttcagttgtcaagacaaagtaaaaatatggttgcataaagtcacaaaaaatataaactgctgaaaagataataaaaaaagattaaaaatcatttgcattgcctcccttacctcttcaatattagtaacaatttgcaaacaacaaaaaaattgtgaaaattctgttgcaaccttgacacacttaaccaaaggttgtcatttcaaatatcctagcttaaaaaagaatttactgcaattgtctgtgcatttatcatactatttatagaagtgcaatatttaaatattttcaaaataaaacacagtaac

SEQ ID NO: 45798 - DNA, 1396 bp, Homo sapiens
ggcggcggcaacatggcggacgtgataaatgtcagtgtgaacctggaggccttttcccaggccattagtgccatccaggcgctgcgctccagcgtgagcagggtgttcgactgcctgaaggatgggatgcggaacaaggagacgctggagggccgggagaaggcctttattgcgcacttccaggacaacttacattcggtcaaccgggacctcaatgagctggaacgtctgagcaatctggtaggcaagccatctgagaaccatcctcttcataacagtgggctgttaagcctggatcctgtgcaggacaaaactcctctctatagtcaactccttcaagcatataagtggtcaaacaagttgcagtaccatgcaggactagcatctggccttttaaatcagcagtcattgaaggcgttccgctaatcagatgggagtatctgccaaacgtagaccaaaggctcagcccacaactcttgtcctaccacctcaatatgttgatgatgtgatcagccgcattgacaggatgtttcctgaaatgtccatccacttatccagacccaatggaacatcagcaatgcttctggtgaccttgggaaaggtgttgaaagtgatcgtcgtcatgcggagcctgtttcattgatcgaacaatagtaaagggatataacgagaatgtctacacagaagatggcaagcttgatatatggtccaaatccaactatcaagtattccagaaggtgacagaccatgccaccactggccctgctccactatcagctgccccagatgccggatgtcgtggtccgatccttcatgacctggttaagaagttacataaagctgttccaggccccgtgccagcgctgcgggaagtttctgcaggacggccttcccccgacatggagggatttccgaaccctcgaagccttccatgacacctgccggcagtagcccccacgctggccccagcctcagaccccacccagcaccttcccagacacgcaggaagcccacagaaggctcagctggttcctcactgcccagatgtgtacagctgctcctccctttcataaagcagcgcccatgtgtgcagaggccactcttgaagagcagactccctctgtggctgatgggactaattattcccactagccagcggactgaaggcaaagaagacctttctagaacctggtagaaggaagctgtgcagcatgctcctcgtccatgtgtgtcggcagtgctggtgtctgtcgtctccgcgagctgttactggaatgagcccttgtgttcatgggtatcgtcatgcggggttcttgtgttttgtggggcttgggttttggtaacttatttttataagcaataaaccttttgtatcctgaaaaaaaaaaaaaaaaaa

SEQ ID NO: 45799 - DNA, 1792 bp, Homo sapiens
cttttcctgtggcagcagccgggctgagaggagcgtggctgtctcctctctccgccatggcgtgtgctcgcccactgatatcggtgtactccgaaaagggggagtcatctggcaaaaatgtcactttgcctgctgtattcaaggctcctattcgaccagatattgtgaaactttgttcacaccaacttgcgcaaaaacaacagacagccctatgctgtcagtgaattagcaggtcatcagactagtgcctgagtcttggggtactggcagagctgtggctcgaattcccagaagttcgaggtggtgggactcaccgctctggccagggtgcttttggaaacatgtgtcgtggaggccgaatgtttgcaccaaccaaaacctggcgccgttggcatcgtagagtgaacacaacccaaaaacgatacgccatctgttctgccctggctgcctcagccctaccagcactggtcatgtctaaaggtcatcgtattgaggaagttcctgaacttcctttggtagttgaagataaagttgaaggctacaagaagaccaaggaagctgttttgctccttaagaaacttaaagcctggaatgatatcaaaaaggtctatgcctctcagcgaatgagagctggcaaaggcaaaatgagaaaccgtcgccgtatccagcgcaggggcccgtgcatcatctataatgaggataatggtatcatcaaggccttcagaaacatccctggaattactctgcttaatgtaagcaagctgaacattttgaagcttgctcctggtgggcatgtgggacgtttctgcatttggactgaaagtgctttccggaagttagatgaattgtacggcacttggcgtaaagccgcttccctcaagagtaactacaatcttcccatgcacaagatgattaatacagatcttagcagaatcttgaaaagcccagagatccaaagagcccttcgagcaccacgcaagaagatccatcgcagagtcctaaagaagaacccactgaaaaacttgagaatcatgttgaagctaaacccatatgcaaagaccatgcgccggaacaccattcttcgccaggccaggaatcacaagctccgggtggataaggcagctgctgcagcagcggcacctacaagccaaatcagatgagaaggcggcggttgcaggcaagaagcctgtggtaggtaagaaaggaaagaaggctgctgttggtgttaagaagcagaagaagcctctggtgggaaaaaaggcagcagctaccaagaaaccagcccctgaaaagaagcctgcagagaagaaacctactacagaggagaagaagcctgctgcataaactcttaaatttgattattccataaaggtcaaatcattttggacagcttcttttgaataaagacctgattatacaggcagtgagaaacatgacttggtgtgctctgtaaagcttggttagaatttttttaaagtgacattttgttggccataatttagactgttacattttatatagtgtggtataaaatggggcatggatttatactaagtccatggagttcagtggaaggggaatgatttaaaaaaagttgtggttttctaaataatgtggcttgaaaaataggtgtaacaggacttggtcagaaacgcagaggctgttcaagtttagctccccaccagatggaaaataggttaaattctgtaaagatttaactttaaccacaagagggcacaactggagagcacaatttttttggtactgcagtaaaattgattacctcttgaaa

SEQ ID NO: 45800 - DNA, 422 bp, Homo sapiens
gaagaatgcaaatttgctcatccccccaaaagttgtcaggttgaaaatggaagagtaattgcctgctttgattccctaaagggccgttgttcgagagagaactgcaagtatcttcaccctccgacacacttaaaaaactcaaactagaaatttaatggaagggaacaatttgattcagcaaaaaactgcagcagcaatgctttgccccagcagatgcaatttatgtttccaggaacaccacttcatccagtgcccacttttcccttgtaggtcccggcggatagggacaaaatacgggctatttagctttgctccttacctagcacctgtaacccctggagttgggttggtcccaacgggaaattctgcccaccacgcctgttattgttcccggaagtccaccggtcactgtcccgggctca

SEQ ID NO: 45801 - DNA, 423 bp, Homo sapiens
tgaaggtaaaattttccagatacggcagacggttttcagagtacaataaacagggaatgagaactatttacatggaagtttctttctcatgatgcggtggagaagcctcggccacttggttctgccagatgttcctggggttactgtaaatgggaaggacaggcagagctaaacaaggtttatcatttaaaagtgcctgtgtgaagtcacttttgctggaaaactgcagcttgggagctttctttgtattcacatcccactcttctgtcaagtacactttaccctgaccttatgaagtggatgaagatacctcagttgtctgactttgccaattgcttaatttcagaatttaaaaaggggaaagaaaaacatcctgctaaaatatgaacatctgagtgtcttattttccaacatcgcaataac

SEQ ID NO: 45802 - DNA, 382 bp, Homo sapiens
ctgacatcctcacaagaaaacaaatctagccattgcccaaactttaaatttgatctctataggtctgcttaaagactcaaattttctccagtttctctcataaattcaattgcaaaagtttctgacaaggctcataccctgtacccttatgcagagcaagcattccatcctaagttataaactacagtgatgtttaattttgaagccaggtctacattatttaattaatggcttcaaaaggtggagatgcactttatttaatgtctttccctagctaattcttactctcaccttaaatatgctttcttgttgcatatatgcacagatacacacacacacacacacgaaaataaataaatgttcatattcttctgtcaacaaa

SEQ ID NO: 45803 - DNA, 1052 bp, Homo sapiens
ttttttttaaaaaatcatttaattacaagaaaattagccagaaaattacatagtttcaaacaaatattgtctataaaaacaagtgttcatttaccatctttttaaatttatcttttaaataatgtctcatctactgaacctagcctttcctggcaaacattagaatatacaagttttcttcatgtttaatatttcataaaacagaactggcttttgttcctgaagttagaatgatgcctatcattttgcttcagagaaactttaaaattgactatttcaattaaccactccccaaatccaatgcaaaaacaacaaaaaacactgctattttactaaaagattcctgtcttccatttcattttaccagagcaagtacaaattcggagaaaagcttcttaagtcctgcagtttcaaattccttttgtaattcatccaacgctgaatactctttgacttcaaatgccagaaaccttgaggttgtttctgtctccctgtagtaaaatcagtattattttacccatgaacatcagtcttcctgtcagccttaaatctgaagcccacttctccacaattttgacatatttagtctttgctctcatgtgatctaaatgcaaaagagttatccacaatccatcatccatggtcgtgcttgttgaaaaagtacacttttcactgccactgccagtttctgggttggctgaggatatgcctgagattctgctgaatccagagaaccagctcatgaaccataggctccgacaaaaggctctctgcttgctcaagtaacttctctttcacagtcacacactgggccctggtcaactgttcagagttaatcgagataccaggtagacatgaaggataattgactggcaaatggaacaccaattccagaggtatatccgcatccataaatccttcagcttttgtgtgaattctgaacacggtcccatctgtctctgagcggctcagcacctcccactcgtggggcctgcagaaaatcgcggccaggaccgagagctcctccttgcaccagtccgccattgctgtgg

SEQ ID NO: 45804 - DNA, 1860 bp, Homo sapiens
gaattcgggctaccctcgccccgcccgcggtcctccgtcggttctctcattagtccacggtctggtcttcagctacccgccttcgtctccgagtttgcgactcgcgggaccggcgtccccggcgcgaagaggctggactcggattcgttgcctgagcaatggctgccatccggaagaaactggtgattgttggtgatggagcctgtggaaagacatgcttgctcatagtcttcagcaaggaccagttcccagaggtgtatgtgcccacagtgtttgagaactatgtggcaagatatcgaggtggatggaaagcaggtagagttggctttgtgggacacagcctgggcaggaagattatgatcgcctgaggcccctctcctacccagatacccgatgttatactgatgtgtttttccatcgacagccctggatagtttagaaaaacatcccagaaaaagtgggaccccagaagtcaagcatttctgtcccaaccgtgcccatcatcctgggttggggaataagaaggatcttcggaatgatgagcacacaaggcgggagcttaggccaagatgaaggcaggagcccggtgaaacctggaaggaaggcagagatatgggcaaacaggattgggcgctttttgggtacatgggagtgtttcagcaaagaccaaagatggagtgagagaggttttttgaaatggctacgagagcttgctctggcaagcttagacgtgggaagaaaaaatctggggtgccttgtcttgtgaaacccttgctgcaagcacagccccttatgcggttaattttgaagtgctgtttattaatcttagtgtatgattactggcctttttcatttatctataatttacctaagattacaaatcagaagtcatcttgctaccagtatttagaagcccaactatgattattaacgatgtccaacccgtctggcccaccagggtccttttgacactgctctaacagccctcctctgcactcccacctgacacaccaggcgctaattcaaggaatttcttaacttcttgcttctttctagaaagagaaacagttgggtaacttttgtgaattaggctgtaactactttataactaacatgtcctgcctattatctgtcagctgcaaggtactctggtgagtcaccacttcagggctttactccgtaacagattttgttggcatagctctggggtgggcagttttttgaaaatgggctcaaccagaaaagcccaagttcatgcagctgtggcagagttacagttctgtggtttcatgttagttaccttatagttactgtgtaattagtgccacttaatgtatgttaccaaaaataaatatatctaccccagactagatgtagtattttttgtataattggatttcctaatactgtcatcctcaaaggaaagtgtattgggttttttaaaaaagaaagtgtatttggaaataaagtcagatgggaaaattcattttttaaattcccgttttgtcactttttctgataaaagatggccatattaccccttttcggccccatgtatcctcagtaccccatggagctggggctaagtaaataggaattggtttcacgcctgaggcaattagacactttggaagatggcataacctgtctcacctggacttaagcgtctggctctaattcacagtgctcttttctcctcactgtatccaggttccctcccagaggagccaccagttctcatgggtggcactcagtctctcttctctccagctgactaaactttttttctgtaccagttaatttttccaactactaatagaataaaggcagttttctaaacttcctgtaaaaaaaaaaaaa

SEQ ID NO: 45805 - DNA, 4465 bp, Homo sapiens
aagcttactctctggcaccaaactccatgggatgatttttccttcctagaagagtccaggtggacaggtaaggagtgggagtcagggagtccagttccagggacagagattacgggataaaaagtgaaaggagagggacggggcccatgccgagggtttctcccttgtttctcagacagctcttgggccaagactcagggagacattgagacagagcgcttggcacagaagcagaggggtcagggcgaagtcccagggccccaggcgtggctctcagggtctcaggccccgaaggcggtgtatggattggggagtcccagccttggggattccccaactccgcagtttcttttctccctctcccaacctatgtagggtccttcttcctggatactcacgacgcggacccagttctcactcccattgggtgtcgggtttccagagaagccaatcagtgtcgtcgcggtcgctgttctaaagtccgcacgcacccaccgggactcagattctccccagacgccgaggatggctcgtggagaccaggccgtcatggcgccccgaaccctcgtcctgctactctcgggggccctggccctgacccagacctgggcgggtgagtgcggggtcgggagggaaacggcctctgtggggagaagcaaggggccctcctggcgggggcgcaggaccgggggagccgcgccgggaggagggtcgggcaggtctcagccactgctcgcccccaggctcccactccatgaggtatttcttcacatccgtgtcccggcccggccgcggggagccccgcttcatcgccgtgggctacgtggacgacacgcagttcgtgcggttcgacagcgacgccgcgagccagaagatggagccgcgggcgccgtggatagagcaggaggggccggagtattgggaccaggagacacggaatatgaaggcccactcacagactgaccgagcgaacctggggaccctgcgcggctacttacaaccagagcgaggccggtgagtgaccccggcccggggcgcaggtcacgacccctcatcccccacggacgggccaggtcgcccacagtctccgggtccgagatccgccccgaagccgcgggaccccgagacccttgccccgggagaggcccaggcgcctttacccggtttcattttcagtttaggccaaaaatccccccgggttggtcggggcggggcggggctcgggggaccgggctgaccgcggggtcggggccaggttctcacaccatccagataatgtatggctgcgacgtggggtcggacgggcgcttcctccgcgggtaccggcaggacgcctacgacggcaaggattacatcgccctgaacgaggacctgcgctcttggaccgcggcggacatggcggctcagatcaccaagcgcaagtgggaggcggcccatgaggcggagcagttgagagcctacctggatggcacgtgcgtggagtggctccgcagatacctggagaacgggaaggagacgctgcagcgcacgggtaccaggggccacggggcgcctccctgatcgcctgtagatctcccgggctggcctcccacaaggaggggagacaattgggaccaacactagaatatcgccctccctctggtcctgagggagaggaatcctcctgggtttccagatcctgtaccagagagtgactctgaggttccgccctgctctctgacacaattaagggataaaatctctgaaggaatgacgggaagacgatccctcgaatactgatgagttgttccctttgacaccggcagctgccttgggcccgtgacttttcctctcaggccttgttctctgcttcacactcaatgtgtgtgggggtctgagtccagcacttctgagtctctcagcctccactcaggtcaggaccagaagtcgctgttccctcttcagggactagaattttccacggaataggagattatcccaggtgcctgtgtccaggctggtgtctgggttctgtgctcccttccccatcccaggtgtcctgtccattctcaagatagccacatgtgtgctggaggagtgtcccatgacagatgcaaaatgcctgaattttctgactcttcccgtcagacccccccaagacacatatgacccaccaccccatctctgaccatgaggccaccctgaggtgctgggccctgggcttctaccctgcggagatcacactgacctggcagcgggatggggaggaccagacccaggacacggagctcgtggagaccaggcctgcaggggatggaaccttccagaagtgggcggctgtggtggtgccttctggagaggagcagagatacacctgccatgtgcagcatgagggtctgcccaagcccctcaccctgagatggggtaaggagggagatgggggtgtcatgtctcttagggaaagcaggagcctctctggagacctttagcagggtcagggcccctcaccttcccctcttttcccagagctgtcttcccagcccaccatccccatcgtgggcatcattgctggcctggttctccttggagctgtgatcactggagctgtggtcgctgccgtgatgtggaggaggaagagctcaggtggagaaggggtgaagggtggggtctgagatttcttgtctcactgagggttccaagccccagctagaaatgtgccctgtctcattactgggaagcaccttccacaatcatgggccgacccagcctgggccctgtgtgccagcacttactcttttgtaaagcacctgttaaaatgaaggacagatttatcaccttgattacggcggtgatgggacctgatcccagcagtcacaagtcacaggggaaggtccctgaggacagacctcaggagggctattggtccaggacccacacctgctttcttcatgtttcctgatcccgccctgggtctgcagtcacacatttctggaaacttctctggggtccaagactaggaggttcctctaggaccttaaggccctggctcctttctggtatctcacaggacattttcttcccacagatagaaaaggagggagctactctcaggctgcaagtaagtatgaaggaggctgatgcctgaggtccttgggatattgtgtttgggagcccatgggggagctcacccaccccacaattcctcctctagccacatcttctgtgggatctgaccaggttctgtttttgttctaccccaggcagtgacagtgcccagggctctgatgtgtctctcacagcttgtaaaggtgagagcttggagggcctgatgtgtgttgggtgttgggcggaacagtggacacagctgtgctatggggtttctttgcattggatgtattgagcatgcgatgggctgtttaaagtgtgacccctcactgtgacagatatgaagttgttcatgaatatttttttctatagtgtgagacagctgccttgtgtgggactgagaggcaagatttgttcctgcccttccctttgtgacttgaagaaccctgactttgtttctgcaaaggcacctgcatgtgtctgtgttcttgtaggcataatgtgaggaggtggggagaccaccccacccccatgtccaccatgaccctcttccccacgctgacctgtgctccctccccaatcatctttcctgttccagagaggtggggctgaggtgtctccatctctgtctcaacttcatggtgcactgagctgtaacttcttccttccctattaaaattagaaccttagtataaatttactttctcaaattcttgccatgagaggttgatgagttaattaaaggagaagattcctaaaatttgagagacaaaataaatggaagacatgagaaccttccagagtccacgtgttgcttatgctgatttgttgcaggggaggagagtagatggggctgtgcccagtttctgttctggcccagtatgggctttatgtggtcactgcttggctgggtcatctttgctgctccattgtccttggcccttcagtagaaccttgtcctaccaccacctgtgatcacagggacttggatgtcacctacagtggtccctgcatacaaatctcattgtagtatcaagagactaattttcagacctgtccagctcttgccctcctcctagggctctttcctggattgtatttttcatcttgcctccaatctttttaaaggaagcagattctaaaatttgcagagaggaggggcccatagtttctcatcatagtgaactttctgttggagctcctcttctgctctcttactcttcttccttccctgagttgtagtaatcctagtgctggctccagtccaaactcatggatttacaaagcagagtctaatttagattcatacgtggttggaaaattggacccataagcctagggttatctttcctgaagagaaaaatatggttgtgtgctgcag

SEQ ID NO: 45806 - DNA, 807 bp, Homo sapiens
  misc_feature (1)...(807): n = a,t,c or g
tgaacttgcggggtttttcagtatctacgattcatagatctggaattcgcggccgcgtcgaccgccgctcccgtccactctcgactgccggcgacggccgggtatgggcccgacgctccagcgccatccattttcagggctagttgattcggcaggtgagttgttacacactccttagcggattccgacttccatggccaccgtcctgctgtctatatcaaccaacaccttttctggggtctgatgagcgtcggcatcgggcgccttaacccggcgttcggttcatcccgcagcgccagttctgcttaccaaaagtggcccactaggcactcgcattccacgcccggctccacgccagcgagccgggcttcttacccatttaaagtttgagaataggttgagatcgtttcggccccaagacctctaatcattcgctttaccggataaaactgcgtggcgggggtgcgtcgggtctgcgagagcgccagctatcctgagggaaacttcggagggaaccagctactagatggttcgattagtctttcgcccctatacccaggtcggacgaccgatttgcacgtcaggaccgctacggacctccaccagagtttcctctggcttcgccctgcccaggcatagttcaccatctttcgggtcctaacacgtgcgctcgtgctccacctcnnnnnnnnnnnnnnnnnnnnnnnnnnnnnnnnnngccctcggcgacttggagaggcctcgggatcccacctcggccggcgagcgcgcgctgcnacaacttcattgtcgccacggcggcttttc

SEQ ID NO: 45807 - DNA, 996 bp, Homo sapiens
  misc_feature (1)...(996): n = a,t,c or g
ggtggttgatggcatgcccccgggggtgtccttcaaagcccccagctacctggaaatcagctccatgagaaggatcttagactctgccgagtttatcaaattcacggtcattagaccatttccaggacttgtgattaataaccagctggttgatcagagtgagtcagaaggccccgtgatacaagaatcagctgaaccaagccagttggaagttccagccacagaagaaataaaagagactgatggaagctctcagatcaagcaagaaccagaccccacgtggtagacctcttccctcctagggtaaatcagcttctgtgtcagggatgctgtgtggtgtccatctgaaccccctgcatacgcgtagctaatgtgatctccccactttcacataagatgggtgggccctgccttcagggaatgtgggagcccaggttggggagccttcccggatatttaagctagaagattctacagggagattctccttggatcaatatatgtctctcagtcaaagatgtaaaagcacttttgccttaaaaagaatgttctgtttctaaatagagtcaacgttgtcctcctcattggaattcactatgagtcagaatcattagactgactttttttttttccatagtaatagtattttgcagagtctcacagagctgcagatcttttgttcatcttgcagagttaacaagtctgatcctgttagtccagatttcttaaatttggccaagttataataggagcagtagcttgagacccgaagtcaggaaactttgacaatggatttttttttttttaatccagagacttgtactggaatttgccttaccctgtcaagctcatgggacttaaggtttcatcccgctttatgagtgcttctgaatccaagtcattgttacctgaatttgcaaattaagttgtgatattcgtgactgttaaattccngtaattaggataacctctttgcttgcttgtttgttttntctc

SEQ ID NO: 45808 - DNA, 4425 bp, Homo sapiens
tttttttttttttttagtgtgtgaaaggcatggatggattttattgattaccctatatctacaatttgaggtaaaatagaagcaacacataaaagggcctatttctgctaccatgtcatataattctccattgtgaatattgtgataaagctactgaaaactatgccgtcacagagcctagcttcttgtagagctggtattttacaactcgcattgcttgtgaaatctcaacacatgtaagactctcctaggaaggcgcagaacgtcagaggttgcatccttagccccctgacccctcctcactccccgcgctggcacctcagggttacaagaagaactaggaaataatgccggccacggcgacccctggagagggggccggctagaacagcgttcctaagaatccgcgccacagcaggtcccgcgatgttggggccttagtgtcatcgagctagccccaatcctcaacccgatcttcaacttctggtacaccatgcattttatttgggacgaaaagtaaaagtggaagaggttctctctgtatttcctctataattcacacgctgagatactgacctctgactgttaggtgatccagatggttttgcttttaattatgataaaaaaacataggaaccatgagagatagcttaggaaaaggtttagtcaaatatacagataggaactgttcactcagtcattaaggagagccgtgaacaaaggatcatttaaatgattttttttttttcaaatagaaaaactaaagaactgaactatcacaggaatttttcttcactgcagaagctgagatgttccagtaggagaagtaggagatatcttcacttgattggaaaataaacaccgtaactcaaggctctgctgagtacataaaaaatctggtgagattcattcctgtcattttccctgtcatttcccagcattgctgtaaaatcctgatagtacattcccaagtacaccaggccattccagaccccacagtcactctgctctttaattcacagaactgctgaaaaagtagacattttctatctaaaagtagaaaaaaaggtttgtatagaaggtatttctgttatacaagtatattacacagcttggggtagtaacaggtccgaaaagctcttctcaaccactgatactttaagcctaggagggaagaggtctaccacgtggggtctggttcttgcttgatctgagagcttccatcagtctcttttatttcttctgtggctggaacttccaactggcttggttcagctgattcttgtatcacggggccttctgactcactctgatcaaccagctggttattaatcacaagtcctggaaatggtctaatgaccgtgaatttgataaactcggcagagtctaagatccttctcatggagctgatttccaggtagctgggggctttgaaggacacccccgggggcatgccatcaaccaccacacagccagggttaattgtgattttcctgtagggaactttcacaggaaaacccataccaatagcttcaccaaatttccgactaaagaggtcattcacttgttctcttagctgtctagctttttcaactttcgagagtctttcattatcatcatctggaattgtcacctgaatgatgttaaggtcttcaacacctgatgcagtagtattaacattgggtgatgaatttatttttcctgggagggctcttagaggaggtgctctccttaatcgccgtctcaaacatttcgggctttttaatgatgaacttaattttggctttgtttctgagtatcttctccagcctcggaatgccaaaagtcgatggtcttcggaatggcacaccctcaggtaagccttccacataaaagtcttccgggaaagactcaaataacgcgaacggcaccttcacagcttgtttaaggccaagagcttccccacatttctcattgaagagattttcaactttctgttttaggtccgtgattttggcattccaggcctcaaaggaaaactctctccctcgtggcttgaagggaacgttagaaccgttagtctgggtcggggttcgaacagctgaggtttgaggattgttgttattagggccttccacggtgacctcaatttcaggaacctttgaattactcccaggacttcgtggtcttttgggggactgcaaagctttagtgtttattttactagccatcccaggaggcaagtaggaaataactagttcaggttttttaacaacgaacttgattttattactcccgcggacgatcctttcaagtcgtggaattccaaaccaggtagggcttcggaagggaatcccctctggcaagccttccacatacaagaactccgggtttgattcaaacacaggatatggtacttttactgcctcggtgagtccaagagcttgagcaaatttcaaattaaaaatctcttccacttgcttccgtagcttggtaattctgacattccaatcttctttgactggtgtattcgttcttggctgagtaacttcagtggtactgtgagtcagaagttctggtcttttaataacaaatttaattcgattgcccacttgaatgattttttccagccttgggattccataccatgagggacttcggaaaggaatgttttctggcagtccttccacgtacagatcattcgggtgtgcctcaaatttttggtacggtacagccttggcttcagtgctccccaaggcttccgcaaattttttgcagaaaagctgatccaccatctttcttaatttagtgattctggcataccattcttcctttactcctgaagctggcttatcaagctgtaaatcttcacgtgttgaattcagaagctcatgtttcttaatcacaaaacgaatcctttcctttgcaagtaatatcctctccaggcgaggaattccgtaagtagatggccttctaaaaggaattccttcaggaagtccttctacataaagatcttcaacatgagactggaaaagagggtacgggatcgtcaccggacctttggcttttatggcttgagcatatttcctttcaaacaattcttcaacttgtttacgtagatcagtgatgcgagcattccatttctcgaagttgaactccctcactttccgcttcccagcattggcgggttccgggactggtggctgcggtagctcattggcctttggtctcttagacggtggagaataatcatcatcttctgctggtacttccatttctgtgccttcattgccctctgaagaatggtggcttccttgaatgttatattgataataatcaggatcttctgattcttcctttactgtcacagctgccatttccagggaaatgccagaatcttctgtgggttcagttttcactttgatggggccacaacttccacctggagatagtattgacctgtcagcatctgttaccatcacacgaccacctacatgcttctttggctctaaaaaaggtctcttaatgatgaatgaaatccctgctttgttctccaaaatccatttcagggttgcaagatcatagttctcggggtgtttaaaggcaacaccttccggaagcccctgcactaccacagccgactggtctcgcagcatcttctcatatggtacaggtaccactgtggatttgcctaaagctttcccatagcaaaagcagaaatagtcctcaactgtttttctgagtgtttcaatttctacagcatctacactcatccgatttgcctgggttgtagatttcattttatgcatctctgcagctttttcttcttcttcaacacaatattttacaaaatctttttgaaaatcctttctggtattgacaaaagcacgtcctctttcagttccgacgacaaacacgtctgtttcatacactgcaatgcaggccacttcggctttggacttggccagttctttacacatggactcgagagctgacatgaggaatgtcaccaccatcctgctctccgaggactcctcatcttcaacggggagggtggacattgcaacttgggccatgatccccgagtgcggccgcctccaggcagctccggggccgggggtgccgaggggaggcgagtgtgggccgcgcgcgggctgcggccgccgcggagcagcctcggctgaggggagctggcgagcggacgggaggcgagagggggcgaggggcccgtgcgtgtcggtcgcgctcctgtcaccgccgcatggccgccccgcaggcagggcctcgctcagcgccttgatccgatcactgggggacagaggcagaggccggggtgaccgcggcaggcgggcggccgcggctggagagcgcgtgcggggaagcgggggggcgaccggtggccccttttctctgctctcccagcttctctctcaccctcctcctcct

SEQ ID NO: 45809 - DNA, 1538 bp, Homo sapiens
caagccacacagctgcagcaactgcagatactgcgggctgagcaggagcagtggtggcgcctgccctgaggctgccctgcgatggcctgggtgggagagctgggtcaccggtgccgatgctctggccctccccaatacgctgcttcgtcccactgcaccgcctggctgagggcgttaggggctgtgcctcttgtgagggccatttgggacctccctggggcactgcacaattgatagtgtaccaatagagggagactgggcgatctggaacagcacgtggtggggtcctgcttgtgtgctctgcgttcctctgtggcgtggccaggccggggcatggctcttacccggggagtggtgggcatctcgatgcttctttgccttaatgatggccacatctgggctgctctgcacccacgggagaggctggcccagctgcagactgcttagggacttctgtgtccatcctggggggtaagcccacgtgacccacattcttggcactatgaacagagaacatttgcctgttggcttctgaagtggtcagggccatggctgacacctccaggtccgcctggcatgggacaccaagtggaaggcccaagcagctcatctgctcttgggaccaggggccagttgggttgggtctggtcacggcagagcttttgtggagggtcaggaagggtggagaggagctgggttgaagcggactgctgcggatgcaactcccagcttgcccaccgcgggctgtctgctctccctcctagcagctgtcacactgaagttttgtcctctgctgtctcctctggtcctgagatgagctgtgagcctaggtggccaaggcttcctgcattgcttccctgtgagtccaaggccttcccccaccactgggcagaggctggacagcacggacttctagagagagccgcgttgccagttcctctcccactcgctcgtccttatccaccacgctattatagtttccgttgtcctccaccagcatttcccttactctgaagttccggcattcacatcattcatgttttcttttgtcttttagctaaaggaaaagcattggcgatttgtctgattctggttttgagttactctttgttcagtaatgcactttattttattgtccaaagagagtcagagctaagcatacaggcttgggggtgagccctgctgtgagagttcaggccctgggaggctcagccacctcctcttgtgggaaggaggtctcagccccacctcgcatcttcacctgcccttggtgtggacacaccctctcatgctaccagcaccataatccagtgggggtgactgggtgcacacctgcccaggtgaacacagcggctgccagtctcctggtcccgagaggaggtggggcctggccctggctccctccaaccagctgctcctgggacacaggtgctcctgcttcggctctgtttcggctcacaggtgtgcatcactgggcttggatttgcattacattgaccccagccctgcagtggaacctaataaaagcgcctgaagca

SEQ ID NO: 45810 - DNA, 3167 bp, Homo sapiens
  misc_feature (1)...(3167): n = a,t,c or g
tttttttgattttttaggagcttttattgttttagtaatcttaacataacttaaaataagagaggggaaatgacatctggagatctaggtatgtggcccattgcaattgagcacatttcttgggtctgtttctctatctctaaggggagtctcaaaaccccagctcaaaatacgacactaacatcatgaacatgcatgagctttgaaaagtgctctgtagtcttatgatgatctagaagagcactgtccaatangaactttctgtgatgatgaaaaagattctacttctgacctattcaatagggtaaccactaatcatgcatggctctcaagcacttgaaatgttgctagtgtgattggggagctgcgttttgaatgttaactaatttaaatttaaatcttaaaaagttacatgtgggtagtggctgccgtacggaacagtacagcactagaataatgctgtgtcctcctgttacacatactcatggtctctcctactctcccttcatcacacctgtgacatcttgcaatttatatttgattgtgtcattatctaatgtattcctcctggactctaagctccaaatgaacaaatgctttgtctactttgccataactgtgtccccagtgcttggcatgggacctggtgcagagtaaatacatcataaatattttgtgaatgaatgaatgaatgaatgaccatgattaataaaaggatatagctgctcagtctggtgctgataatggtggtagtgatcaaaagggttaaaccacaggtcattaaatgaaaacagctaacttagtgcttacaggaaccatacactccctgtgtataaacatgccggtgtgtgtgtacaggtgtgtgtgtgcaaaagcataataatgtgtttgcaaaggtttgcatttgtgtagtcatgtgtagacatgtatgctcatgtgtttttgtgtcaggataataaggtgactaagactaagacacatgcaaatcacccaggaaggcagtttctaagtcattactttttattttgaaggatttgtgaaactcttcacatcatggtgagagtttgtatgattaataagaagcagctttttcatgaaatgcttggaggtgaacgagttctcagcctgtgagatccgaccatcccattaactttgaagtttctcttgattaatagaagaaaaaaggggagggtgaagaaaaggaggaacatgctaaaaaccttatgacaatcatccaaaatgtgaggaaagaacaaccgattcaccaactccactttttctattttacaactttctacatctcactcttgattttggccttccctggctgaaacagccctggcagtccctagagcccctgagaagagccctggttctccaaaagacagaggaggagaagcccctgcaggatgcgctgaccactttcccagagaactgacagtccgtgctccccaaaagtttgaaccaacagcctaatgtgaaaagaaactgcactgaaaggtaaaggaggaaatggtgatgaactgggcttatgtgagaatgtctatattttcataagacagccccagaatctttctctcagttacagcctcaggcaaaccacgttctggttggtgggttctgcagggatctctcccaccactgagcctctagtcccaaaaccatccttgacaacatcgtgtgtctgttacttccctttgcccacctcccaggccacctggggaagcccacaggcagcccaagaccctgaaatgaaatgaacacaaagtctgactcggtaagtattagtttcaaacagaacactaaagagaaaagttgaagctgcaatgtgtgtttaaggcagagccccagcagatccgtgtcccaccccatgtgcccaataagacaatgggcaaagcctacaaatggcaagagaaaaatgggactattaatgcgtgtggaaaaggccttaatagttaagttacagctaagaatgtcatgtcttgggttagaattttcatttttagcaccgttaatgtattcacttaaatctatgttagcaccttgtctccaggcagaacaacaaaccatccaaacattttaaacattgggggaaacacgaaggggagggttaaagagagaatccggtactgtggaaggagtggatttagatcacaagatccttgtcgatatccttctgcttgatgccgaagcagccggcccactcatccagggcgatgtacttgtcattgtccaggtcacaggtctcgaaaaagcgggtggtgcaatgctccatggggatgaggggagcacgcagtggagccagctcggtgtgggagaggtacccgtcaatggggtgctggtccagctggccgaactgccagtgtacagggaagatgtacatgttatagttcttctcgaagtcccgggccagcagctccacggggtggtctcctgcctccaggcgcttctcattctcatggatcttcttcacccgcagcttctgcttctcagtcagaaggttgttgtcctcatccctctcatacagggtgacccaggacgttcttgagccagtcccgcatgcgcagggggaattcggtcagctcagagtcccaggcaaggggggatgtatttgcaaggcccgatgtagtccaggtggagcttgtggcccttcttggtgccctcccagggtgcactttgtggcaaagaagtggcaggaagagtcgaaggtcttgttgtcattgctgcacaccttctcaaactcgccaatgggggctgggcagctggtggggtcctggcacacgcacatgggggtgttgttctcatccagctcgcacaccttgccgtgtttgcagtggtggttctggcagggattttccgccaccacctcctcttcggtttcctctgcaccatcatcaaattctcctacgttccacctggacaggattagctcccacagatacctcagtcacctctgccacagtttcttccaccacctctgtctcatcaggcagggcttcttgctgaggggctgccaaggccctcccggccaggcaaaggagaaagaagatccaggccctcatggtgctgggaaccctcagtggcaggcaggcaggcggcaggcagagcgcgctctccgggcagtctgaaggaccgcgggaatgtggaggggtttagagacaggcaac

SEQ ID NO: 45811 - DNA, 1981 bp, Homo sapiens
  misc_feature (1)...(1981): n = a,t,c or g
cgaaggggacgtgggaaagtgttagcggggaacgctgggaaactcccggcctccgccaccatcttgctttcctttaatccggcagtgaccgtgtgtcagaacaatcttgaatcatgaagctactaaccagagcccggctctttctcgagattttattccctcaaagttgcccccaaagttaaagccacagctgcgcctgcaggagcaccgccacaacctcaggaccttgagtttaccaagttaccaaatggcttggtgattgcttctttggaaaactattctcctgtatcaagaattggtttgttcattaaagcagggcagtagatatgaggacttcaggcaatttagggaaccacccatttgctgcgtctttacatccagtctgaccgacaaaagggagctttcatcttttcaaggataaccccgtgggaatttgaaggcagttgggtgggccaaatttaagtgtgaccgcaacaaggggaaaacatgggcttattactgtgggattgcctgcggggttgatgttgatattctaatgggagttcctgctcaatgtcaccacaggcaccagaatttcgtcgttggggaagtaggctgaccttcagcctcagctaaagattgacaaagctgtggcctttcagaatccgcagactcatgtcattgaaaatttgcatgcagcagcttaccggaatgccttggctaatcccttgtattgtcctgactataggattggaaaagtgacatcagaggagttacattacttcgttcagaaccatttcacaagtgcaagaatggctttgattggacttggtgtgagtcatcctgttctaaagcaagttgctgaacagtttctcaacatgaggggtgggcttggtttatctggtgcaaaggccaactaccgtggaggtgaaatccgagaacagaatggagacagtcttgtccatgctgcttttgtagcagaaagtgctgtcgcgggaagtgcagaggcaaatgcatttagtgttcttcagcatgtcctcggtgctgggccacatgtcaagaggggcagcaacaccaccagccatctgcaccaggctgttgccaaggcaactcagcagccatttgatgtttctgcatttaatgccagttactcagattctggactctttgggatttatactatctcccaggccacagctgctggagatgttatcaaggctgcctataatcaagtaaaaacaatagctcaaggaaacctttccaacacagatgtccaagctgccaagaacaagctgaaagctgggatacctaatgtcagtggagtcttctgagtgtttcctggaagaagtcgggtcccaggctctagttgctggttcttacatgccaccatccacagtccttcagcagattgattcagtggctaatgctgatatcataaatgcggcaaagaagtttgtttctggccagaagtcaatggcagcaagtggaaatttgggacatacaccttttgttgatgagttgtaatactgatgcacacattacaggagagagctgaacgttctctcagcccagagcagcaaacacatgaaagtcagaagtctctaatatatcatttgtcttttttccagtgaggtaaaataaggcataaatgcaggtaattattcccagctgacctaaagtcaataaaacattctgtttaagtgtttttcttacgtttttctcaatgagttaatcaacaagtatttattatgtgctgatatctttgttttagatgctttaaaggagacaggaatataattattgagtatagaagcatcagaaactattaaaattaaggctaagtggctatcggggtaaatagtgccagattactattggtggcgtttaagatgaaagcaagttcaaaatttgtcattttgggtgtcaacagctaaatggtctggtttttacccctgttttgccttttttgcaataaaattatttccaaaaagncaaaaaaaaa

SEQ ID NO: 45812 - DNA, 17399 bp, Homo sapiens
  misc_feature (1)...(17399): n = a,t,c or g
aagctttgttcagaattcctctgattgatcatttaagtaaatttaaaagtcaatttaaggaatataaaaactgcataatttccaactcaagagtataaacttagatcactcattagcctctggttgaaaacagtaatcgtgatttatacggaatgctaaatatctatgttctaagtgtgctctcttgccacaaacccatttaatcctaacaatcttaggaggtaagttgaggtaggctgttattgttctcatgaataagtttggtaaaaccccaatctcaagatacagcccaagcagcagaggcacatgcgttacgaacacatggaccccaccgcagtattagcaatcatcttttgctataagtgcttggcttccaagagcttttatacagatgtctgagaggcacaaaatatgtataattaggctatttctcaaatagcacaggaaagctgccaaaggcgttccctgaattgagaggcaaagcactgacaatggggactattacagcctctggatacaagatgacgtatctgccaaccttaaccacccgagtcaaatgctactttagaaataattaaggttccctttagtcatttcacaggagttgctacagcagtacataaagttttattaatattctgattctcgtgtcatagcttttatggcaggaaaggatgaggacatgccccacctgtaacgtagagcaagcaaaccaccaagtagaatcttgagattctctctcaactgttctctagaaacacgcttgtgcttttaatctgccttttaaaagggacacagaacaaaaaatggttgtttgcaaataaacatctgaaagaaagtaacagctgacctgggctgaggcatccaaacaaagcagtcattgtggaaggagacaatgcaaaccacactggggcaagaaacggggcagagaacgtgcgggtcatttgtgcgttgggtatttctaccagccccaaaggccccatctggaacaagtatcaaccaggaggggctctatggcttgatttattaacctaactcaaaagaagtcactgccaccaacagcactgtgcagttttattaaccattcaagtccagtagcatctggtaagattgggacagaattgggattgaaaagtgaacagatattcagcatctaacagttcaaaagaagccactacatactcttttcacaaatatgttttcacagagccaatacagtactagccattaacccagtacaccaagtgtactgaagtagaaaagatgcaacaagaaaaatagctacattagaaagaccaacactttagaaaaagagtaaaacactttcagtttctcccctttagcccctaaaacaacatcttacagtctggatctggatctacctatacagtcctacattagcttctaaaatatttgtcaggagggaaaaaataaaatgacactggccagtacagtctttggatatttaggaaggggatggggagaaagtcagttctcagaacaaattagtcagcttcagtctcgtcagcagggtctttggattctttgttcttccgcacttcttcaatgtgcttatcctgtaaaggaagggtaaggtgtcatcagtcaaaaaaaaaaaaaaaaaaaaaaagccctgtcaagtcacgacccccagcccccacctcaaagaggcccaacacaacctcagtgcatatattacagcctgtgggaaccacacaatttaagttctgagacatcatcatcaaatctcctgggtcccttgtagaacctaacaagctgcctactggacttccaaggactgtgcaattatgctgggaattactgaatattccatcttaaaatatacctttcatttaatatgttaagccccaaaatggatgacaaaaagacaccaaacaccttttatcaaagcacttagttcaagccaactcattggtgcatcaaactccaagctcaacccttttacaaagtaagaaaccaaccttctctcgcaaacgttccagtttggcagccatttgtgcctctcggttctctttattagcttccattttgtgggtcagtttctcttctgccattttactgaagttgttgttctcttctattgccttctgaagcacttctttctcgtgctctcgtttctcagccagctgcttcaagacctcagcttcatgggactggaaaaaaaagtttaataggctaggcactctaaaatgtannnnnnnnnnnnnnnnnnnnnnnnnnnnnnnnnnnnnnnnnnnnnnnnnnnnnnnnnnnnnnnnnnnnnnnnnnnnnnnnnnnnnnnnnnnnnnnnnnnnnnnnnnnnnnnnnnnnnnnnnnnnnnnnnnnnnnnnnnnnnnnnnnnnnnnnnnnnnnnnnnnnnnnnnnnnnnnnnnnnnnnnnnnnnnnnnnnnnnnnnnnnnnnnnnnnnnnnnnnnnnnnnnnnnnnnnnnnnnnnnnnnnnnnnnnnnnnnnnnnnnnnnnnnnnnnnctctgcctcaaaaaataaaatgtattcagcataagttaaaattacaataaaaataatttactaaggggattgaaaaggggcagaaaataaggtccctttaaataacaccaaaattaggacctgaattatccctatcataaaatactgtgaaaatgatattctttttctagtatttgtatttaactttggaaaagtgcttatctgttcagaaatcttacccaattagtccttaaggaaatccttgtaagatttactgcttaatggtatctggatgacttgaggaatatgtacttgcgagtggcacttttattgtaaagaatttcactatttaacttcaaaagctacccaaagaaaactagctcattgtaaaaattttaaccataactgataaaacaatgataggaaattcaagactaagtctgtagattactatttaagacagaaaaatttgtttcaaggaaaaggcttattagcttttgtctcaggaaactgcattaattaccagaccataccttggtatgaccccttcaacagaacagcttgttctcaaaacacattggaaccactgacttgcaggataaccacagagcatctgacactggttctattgattctcttctgccaaatcctagtcatgatgggagtttcattatatttagccagttactatgtaaagcacaggctaatgactacagggccagggttgatgtctaaaaagctttccactgtccaaccttgggttgtattgcttcctcctactccatgaactcacactattcgatagaagacgactccttagtgtaagcactgaggctcttcgggcggggtgtgtgtgtatactacaaatcactatgctggtctggggaaggttattaccttaccttttgtgcctcacttgccccagctttaaaatcaatcctatcagggttgttgagaaagggagttaaatgaaaagttatgtacagttgttaatgagtaacattgaatggaaagaaacacaccaaaatgttaacactggttgcttctcggaagcgggataatgaatacttttaatttccatttataaatttctgtatttcccaaattttctacaactagcatattaatatttattgattcttctgattagcttttaaagatagttactttataatagaattgtttagataagagaaaagctaccatgataccagctgagcaacacaatcacactagcaatttaaaatgttattgtacagctctcaaaaaacaaaaccaaagtgccaaagaatcatctggcaacaaatcttttcaaagaggaagcatgagagaagcatgagctttggtttaagatagaccagggcttgaattctgaccccaacacttactagttgtatgactgcagaaaaacgacttaacattcctgaaactgtttctaatttccattatttgaggcaacaccatgtattaaaggagaaaaatataaacaaaggagcgggcatgtaacaggagttcaataaatgaggactggtatttccttccagtcactggcatatgtaataatcacagtgtagctacaattctgttttcttcctgttatagaaataaaattgatctgcccattacataaattaatatcctgctttctgtgaattgcttcgtttaccttgcgtctttcttctgcagcttctaatttcttctgaatttcctccagggaaagatccttcttctttggaggggaaagggggaattctggaacagattcttttgaccgagggctgagaatcagctcaaaagcctggcctgaggcacgcttctccagttctttcacctggatatctagaattgattatatttataattcagaaaaccaggattctcctgttctaataaactgtactataattttctaaaacccaaatcaatttaatgtattaaactagggctgatgaggaaagttgtgttttttttcccctttttattcctatcagtctactgacactaggggaagatgtatttgcaggcaagatattattatctaaataccatttcccaannnnnnnnnnnnnnnnnnnnnnnnnnnnnnnnnnnnnnnnnnnnnnnnnnnnnnnnnnnnnnnnnnnnnnnnnnnnnnnnnnnnnnnnnnnnnnnnnnnnnnnnnnnnnnnnnnnnnnnnnnnnnnnnnnnnnnnnnnnnnnnnnnnnnnnnnnnnnnnnnnnnnnnnnnnnnnnnnnnnnnnnnnnnnnnnnnnnnnnnnnnnnnnnnnnnnnnnnnnnnnnnnnnnnnnnnnnnnnnnnnnnnnnnnnnnnnnnnnnnnnnnnnnnnnnnnnnnnnnnnnnnnnnnnnnnnnnnnnnnnnnnnnnnnnncatctcccagaaaaacaaagctcaacatttttggattaataaatactgttttgagacatcagtatctgacaatcgctttcataaacaaaagacttgtgcaaactccacaattttgcttcagactaagccaaactgtccaataaacaattacgagctctcggcacattcaagtgataatcatttttaaattcttctcctattcataaaataggttttggtaagaccaaaacataagtgccaaatcaaaggcgaagacctgagccatctcaatctaaaatcataagcccattacaatttcagattttccaaatagattacctaccagaagaagccatggtgaatagaagacaagcgacaggcagtgtattctgcacaatcaactgggataaggaaagtcctgaaaatgattttcaaaaacatgcaatcactttctttgcctttctatatgtcatcaacccaaaaaaatctcacatcacatctacatacattcgtcagaaaaatacgtggaataaagacgtctaaattaaccacgaaaaaaattatcaaaatctactaaataaacattgggaaatatgacctgaatatgatattggttccagaaaatcaagttaactgagctttctcggtcacaaaactcttggatttttaaaatcagacaaagtcacaagggtgaagaatttttcccccataaactctttaacatttcaccgaaactgtaagaagatattccagattcaactcaacagtgcccccggagccatcttaatactgcctacaactcattgtgcaaatgaaatacccacccctgctttgtctgtgtctgacgtggtggataagaaaacgcccaagctaatagtaaccaataatgttgaactcctattgtccctcaggtttaagcttccttgcccaacagcaagcaaaatgtttatgaacctctagattttgacttatatttgctgccgttatgtcatgaaaaatgctgtatctcttgttgatctttttaacattatgacttttgtagacgccagctagtaccaaaaacgtaggatgacaggttcccaaaagctaggaattaaaatcagaggcagcgacaagatttaagaaaagcagagaattagacgcagcaccggacccaggatgggcgtggcctggtccgggcgaggaaaagaggaccggtcgcccccggccaatcagagcacgccttgcgctccggcccctggccccgcccccttcctccccgcgccttttcgaatctccccgaactcaacaccccggagcccgcgcgcgtgggaaggggaggggtgggcggggctaacggtccaatccgggtaactccgcccctgcctgactccccctgcgcggacgccccccccaactcccgccaaaaacacctccaggccgccgccaccacccccttcacagttcagcgggtggggcaggccccgggaacaggcccccgggtggtcccgcggtgagctcgccaccgcctcccgccgtccccatgcccaacctgccgccacccaagctgtccgcgcgtccggccgcgaagacagaagaaccctcgtggggcccgggagcgccgccctccctcaatcaccagctgcggtcgccagtgggcacggtcgcagggagggtcgcggccctgggctgacccgccagtttggtcctaaagccgctggtccctgggcaccgccccgtcccttcagacaatggggaacccggcggggcccgcagggaagggagggagggagggaggtaaacgatgggcccacggccccctattgtctccttgcggacggcaccccggagcgtaccgcccggtgatcgcccagccccctgcccacgaacagccgcgcccccggagagcggggacaaaggcgacgtccgcccgagccacacacaaagcggagcgacccccgcccaccaacccctccgaggcccgcagccccgcccgccgccctgcagcagggggtcgctgccacggcccagcccctcccgccgaccgcgtccctcttgctggcctcagccagccgccgcctcctccgagccccgcacccacctgctcagtccgagccgcctgaccacactctgagcaccaacagacccgggcgcgcacaaaagcgccaaacagaggcacgtgacctccgcgcggggctccgcattggccgagagcggcggcacgtgccgcccccgccccccacaacccgcgtggagcgccgccccccgggaccccgaagcacctcgggaagtgtagtcctgtcccggagggcaggaggacaatgccgggggttgcagggcgcctggggagcatccccaggtgtgggcctgggactaggggggtggtctcgccgtggaagagggcgtggcagtggaccccggactaggtccgaaccagctccccattctcgagaacaagggcagggcggacgaggcggagggcgggggggtccttccctacctttccaaactttggccgcctggactccaccttgtagagccacatgcccgcctcgccccaagggcagcactcggacagagcagtgccccttctagtgcgccacccacatgggtgcctaagacgcccgagcccctgtgacagcacaatgccactccacgcccctgcagggccccctgcccccggcaccctacaccgacaccggcgtgtcacccatattgtgacatcatcgtaatttctaatccactcagcccacaggtcgcgggcgtggcccttccctcactgtgtgcgttcttgccagcatcctcaggttcccgagccggtgaccagggacctgtgcgggaaagcgtggggctctggaatttgatcgcctttggtctaacaaagccactcagcttaaatgcagactccatctgttcttccaagccttctgcggatgataggggaggaagagcaatagccgttctagactacacagattgcagttaagtgttgcttttgttctcagagcacgtgctccccagagcagcagtgggttctttttaaaaatcgaaaaaggagccacaaggtcactgttctccctgacctggatagctcagaacctcagcaaaggcacaaaggaaattggtctgaccgtgccttagaataactggccctttctctcacaaaaaggggaaaaaaataaatgaaatgaacatggtccccgcctcctcccattctctgaccaagaccgtgtcctcggttggtggtcaatacaccaagacacctgctttgagatcttgactaagcagaagagatatctttattttattaatgagctgcatctccccaaatcaagaaacaaatgtgaccaaccttcctgaaacaacagtcctaatttagaaagactctcatgcctagttagtcaccagggatgtgccagagataaaatacaactaaggggtgcccaagacaataaaaactggatcatacaagcagcagcacactacacaaagcaaacaattagcaatgcgctgttgcctgaaatatgcttgttgcggcattttttccaacaatcgcccttgtgtggggtcggcctcccccccaagccaatcgaagtggttttcacttagcctgtgagcaggaccaggaataattcagatactgagccttgaaaggcttcttctcagaccaaacttagcttcaaaatggctaggtgcttccgtctgtcatttttctgaacagaatctcagacatcattagaaaagttggagaaggatgggcatgagacccctcaggaaagcgacagataggcaggcaacacaaatgagcaaggaacccaagcccaagaggtccttacccactgaacaggctttttatcttgaagtctttgtatttgatctggaggttcacagaggaaggtcccactcatttaatgcatttttttaagtacaataaattgccacacaaaagtctcacattcctgactattaatgttgtgacagaaaaaagaaataaatctttcaaaacactgataatttgaaagcacttacactgcttccccccacattttctttctccctagagcagatgtctatttccatggaaaccatagcaaggaacgtagatgttagaactcatgttcatttttaatcttttttagcaatgccacttggcttctgggtttgttgggagatgcctggttctgccagtctgtgacaatgttccgagctcctcacagctgcttgaggactgagagggctgggttaaagtttcccctagaatgagcctttgaataaaaaggtgcttttgaggtgggatgattcctgtccttnnnnnnnnnnnnnnnnnnnnnnnnnnnnnnnnnnnnnnnnctgacttaaaaaannnnnnnnnnnnnnnnnnnnnnnnnnnnnnnnnnnnnnnnnnnnnnnnnnnnnnnnnnnnnnnnnnnnnnnnnnnnnnnnnnnnnnnnnnnnnnnnnnnnnnnnnnnnnnnnnnnnnnnnnnntccttgttctttagggtggggctgccttcccaagagccagatcacagctcattattgtcagcttttgtgggtgtcctatataagccttggaataggaagggctttcaactgtaaggagagacaacagttttgccacttcaccttggagaggggcagaatcgcccttctcgaaagcttcctaaaacgaacttcaagatccactctcttctgaagtggcagcaaggagttaatgttcacatcttggaactgtctatctttgcccataagaattatttttgcttctgctcagatggtttggttggattgttatggagctggctgtgactatggagccacacaacgaagtggagatagggcagtcatccagcttatttgatctgtgtagacagctaaaggagagcacttcaggcttcaaagtctagaacggctattgctcttcctcccctatcatccgcagaaggcttggaagaacagatggagtctgcatttaagctgagtggctttgttagaccaaaggcgatcaaattccagagccccacgctttcccgcacaggtccctggtcaccggctcgggaacctgaggatgctggcaagaacgcacacagtgagggaagggccacgccgcgacctgtgggctgagtggattagaaattacgatgatgtcacaatatgggtgacacgccggtgtcggtgtagggtgccgggggcagggggcctgcaggggcgtggagtggcattgtgctgtcacaggggctcgggcgtcttaggcacccatgtgggtggcgcactagaaggggcactgctctgtccgagtgctgcccttggggcgaggcgggcatgtggctctacaaggtggagtccaggcggccaaagtttggaaaggtagggaaggacccccccgccctccgcctgctccgccctgcccttgttctcgagaatggggagctggttcggacctagtccggggtccactgccacgccctcttccacggcgagaccacccccctagtcccaggcccacacctggggatgctccccaggcgccctgcaacccccggcattgtcctcctgcctccgggacaggactacacttcccgaggtgcttcggggtcccggggggcggcgctccacgcgggttgtggggggcgggggcggcacgtgccgccgctctcggccaatgcggagccccgcgcggaggtcacgtgcctctgtttggcgcttttgtgcgcgcccgggtctgttggtgctcagagtgtggtcaggcggctcggactgagcaggtgggtgcggggctcggaggaggcggcggctggctgaggccagcaagagggacgcggtcggcgggaggggctgggccgtggcagcgaccccctgctgcagggcggcgggcggggctgcgggcctcggaggggttggtgggcgggggtcgctcccgctttgtgtgtggctcgggcggagcctcgcctttgtccccgctctccgggggcgcggctgttcgtgggcagggggctgggcgatcacgggcgtccgctccggggtgccgtcgaggagacaatagggggcgtgggccctcgtttacctccctccctccctcccttccctgcgggccccgccgggttccccattgtctgaagggacggggcggtgcccagggaccagcggctttaggaccaaactgcgggcagccagggccgcgaccctccctgcgaccgtcccctggcgaccgcagctggtgattgaggggcggcgctcccgggccccacgagggttcttctgtcttcgcggccggacgcgcggacagcttgggtggcggcaggttgggcatggggacggcgggaggcggtggcgagctcaccgcgggaccacccgggggcctgttcccggggcctgccccacccgctgaactgtgaagggggtggtggcggcggcctggaggtgtttttggcgggagttggggggggcgtccgcgcagggggagtcaggcaggggcggagttacccggattggaccgttagccccgcccacccctccccttcccacgcgcgcgggctccggggtgttgagttcggggagattcgaaaaggcgcggggaggaagggggcggggccaggggccggagcgcaaggcgtgctctgattggccgggggcgaccggtcctcttttcctcgcccggaccagggccacgcccatcctgggtccggtgctgcgtctaattctctgcttttcttaaatcttgtcgctgcctctgattttaattcctagcttttgggaacctgtcatcctacgtttttggtactagctggcgtctacaaaagtcataatgttaaaaagatcaacaagagatacagcatttttcatgacataacggcagcaaatataagtcaaaatctagaggttcataaacattttgcttgctgttgggcaaggaagcttaaacctgagggacaataggagttcaacattattggttactattagcttgggcgttttcttatccaccacgtcagacacagacaaagcaggggtgggtatttcatttgcacaatgagttgtaggcagtattaagatggctccgggggcactgttgagttgaatctggaatatcttcttacagtttcggtgaaatgttaaagagtttatgggggaaaaattcttcacccttgtgactttgtctgattttaaaaatccaagagttttatgaccgagaaagctcagttaacttgattttctggaaccaatatcatattcaggtcatatttcccaatgtttatttagtagattttgataatttttttcgtggttaatttagacgtctttattccacgtatttttctgacgatgtatgtagatgtgatgtgagatttttttgggttgatgacatatagaaaggcaaagaaagtgattgcatgtttttgaaaatcattttcaaggactttccttatcccagttgattgtgcagaatacactgcctatcgcttgtcttctattcaccatggcttcttctggtaggtaatctatttggaaaatctgaaattgtaatgggcttatgattttagattgagatggctcaggtcttcgcctttgatttggcacttatgttttggtcttaccaaaacctattttatgaataggagaagaatttaaaaatgattatcacttgaatgtgccgagagctcgtaattgtttattggacagtttggcttagtctgaagcaaaattgtggagtttgcacaagtcttttgtttatgaaagcgattgtcagatactgatgtctcaaaacagtatttattaatccaaaaatgttgagctttgtttttctgggagatgnnnnnnnnnnnnnnnnnnnnnnnnnnnnnnnnnnnnnnnnnnnnnnnnnnnnnnnnnnnnnnnnnnnnnnnnnnnnnnnnnnnnnnnnnnnnnnnnnnnnnnnnnnnnnnnnnnnnnnnnnnnnnnnnnnnnnnnnnnnnnnnnnnnnnnnnnnnnnnnnnnnnnnnnncctcctcnnnnnnnnnnnnnnnnnnnnnnnnnnnnnnnnnnnnnnnnnnnnnnnnnnnnnnnnnnnnnnnnnnnnnnnnnnnnnnnnnnnnnnnnnnnnnnnnnnnnnnnnnnnnnnnnnnnnnnnnnnnnnnnnnnnnnnttgggaaatggtatttagataataatatcttgcctgcaaatacatcttcccctagtgtcagtagactgataggaataaaaaggggaaaaaaaacacaactttcctcatcagccctagtttaatacattaaattgatttgggttttagaaaattatagtacagtttattagaacaggagaatcctggttttctgaattataaatataatcaattctagatatccaggtgaaagaactggagaagcgtgcctcaggccaggcttttgagctgattctcagccctcggtcaaaagaatctgttccagaattccccctttcccctccaaagaagaaggatctttccctggaggaaattcagaagaaattagaagctgcagaagaaagacgcaaggtaaacgaagcaattcacagaaagcaggatattaatttatgtaatgggcagatcaattttatttctataacaggaagaaaacagaattgtagctacactgtgattattacatatgccagtgactggaaggaaataccagtcctcatttattgaactcctgttacatgcccgctcctttgtttatatttttctcctttaatacatggtgttgcctcaaataatggaaattagaaacagtttcaggaatgttaagtcgtttttctgcagtcatacaactagtaagtgttggggtcagaattcaatccctggtctatcttaaaccaaagctcatgcttctctcatgcttcctctttgaaaagatttgttgccagatgattctttggcactttggttttgttttttgagagctgtacaataacattttaaattgctagtgtgattgtgttgctcagctggtatcatggtagcttttctcttatctaaacaattctattataaagtaactatctttaaaagctaatcagaagaatcaataaatattaatatgctagttgtagaaaatttgggaaatacagaaatttataaatggaaattaaaagtattcattatcccgcttccgagaagcaaccagtgttaacattttggtgtgtttctttccattcaatgttactcattaacaactgtacataacttttcatttaactccctttctcaacaaccctgataggattgattttaaagctggggcaagtgaggcacaaaaggtaaggtaataaccttccccagaccagcatagtgatttgtagtatacacacacacccgcccgaagagcctcagtgcttacactaaggagtcgtcttctatgcaatagtgtgagttcatggagtaggaggaagcaatacaaccaaaggttggacagtggaaagctttttagacatcaaccctggccctgtagtcattagcctgtgctttacatagtaactggctaaatataatgaaactcccatcatgactaggatttggcagaagagaatcaatagaaccagtgtcagatgctctgtggttatcctgcaagtcagtggttccaatgtgttttgagaacaagctgttctgttgaaggggtcataccaaggtatggtctggtaattaatgcagtttcctgagacaaaagctaataagccttttccttgaaacaaatttttctgccttaaatagtaatctacagacttagtcttgaatttcctatcattgttttatcagttatggttaaaatttttacaatgagctagttttctttgggtagcttttgaagttaaatagtgaaattctttacaataaaagtgccactcgcaagtacatattcctcaagtcatccagataccattaagcagtaaatcttgcaaggatttaattaaggacgaattgggtaagatttctgaacagataagcacttttccaaagttaaatacaaatactagaaaaagaatatcattttcacagtattttatgatagggataattcaggtccttattttctgccccttttcaatccccttagtaaattatttttattgtaattttaacttatgcttgaatacattttattttttgaggcagagnnnnnnnnnnnnnnnnnnnnnnnnnnnnnnnnnnnnnnnnnnnnnnnnnnnnnnnnnnnnnnnnnnnnnnnnnnnnnnnnnnnnnnnnnnnnnnnnnnnnnnnnnnnnnnnnnnnnnnnnnnnnnnnnnnnnnnnnnnnnnnnnnnnnnnnnnnnnnnnnnnnnnnnnnnnnnnnnnnnnnnnnnnnnnnnnnnnnnnnnnnnnnnnnnnnnnnnnnnnnnnnnnnnnnnnnnnnnnnnnnnnnnnnnnnnnnnnnnnnnnnnnnnnntgaatacattttagagtgcctagcctattaaacttttttttccagtcccatgaagctgaggtcttgaagcagctggctgagaaacgagagcacgagaaagaagtgcttcagaaggcaatagaagagaacaacaacttcagtaaaatggcagaagagaaactgacccacaaaatggaagctaataaagagaaccgagaggcacaaatggctgccaaactggaacgtttgcgagagaaggttgttttcttgctttgtaaaagggttgagcttggagtttgatgcgaccaatgagttggcttgaactaagtgctttgataaaaggtgttcggtgtctttttgtcatccattttggggatcttaacatattaaatgaaaggtatattttaagatggtataaacagtaattcccagcataattgcatagtccttggaagtccagtaggcagcttgttaggtactacaagggacccaggagatttgatgatgaggtctcagaacttaaattgtgtggttcccacaggctgtaatatatgcactgaggttgtgttgggcctctttgaggtgggggctgggggtcgtgacttgacaggcttttttttttttttttttttttgactgatgacaccttacccttcctttacaggataagcacattgaagaagtgcggaagaacaaagaatccaaagacccctgctgacgagactgaagctgactaatttgttctgagaaactgactttctccccatccccttcctaaatatccaaagactgtactggccagtgtcattttattttttccctcctgacaaatattttagaagctaatgtaggactgtataggtagatccagatccagactgtaagatgttgttttaggggctaaaggggagaaactgaaagtgttttactctttttctaaagtgttggtctttctaatgtagctatttttcttgttgcatcttttctacttcagtacacttggtgtactgggttaatggctagtactgtattggctctgtgaaaacatatttgtgaaaagagtatgtagtggcttcttttgaactgttagatgctgaatatctgttcacttttcaatcccaattctgtcccaatcttaccagatgctactggacttgaatggttaataaaactgcacagtgctgttggtggcagtgacttcttttgagttaggttaataaatcaagccatagagcccctcctggttgatacttgttccagatggggcctttggggctggtagaaatacccaacgcacaaatgaccgcacgttctctgccccgtttcttgccccagtgtggtttgcattgtctccttccacaatgactgctttgtttggatgcctcagcccaggtcagctgttactttctttcagatgtttatttgcaaacaaccattttttgttctgtgtcccttttaaaaggcagattaaaagcacaagcgtgtttctagagaacagttgagagagaatctcaagattctacttggtggtttgcttgctctacgttacaggtggggcatgtcctcatcctttcctgccataaaagctatgacacgagaatcagaatattaataaaactttatgtactgctgtagcaactcctgtgaaatgactaaagggaaccttaattatttctaaagtagcatttgactcgggtggttaaggttggcagatacgtcatcttgtatccagaggctgtaatagtccccattgtcagtgctttgcctctcaattcagggaacgcctttggcagctttcctgtgctatttgagaaatagcctaattatactattttgtgcctctcagacatctgtataaaagctcttggaagccaagcacttatagcaaagatgattgctaatactgcggtggggaccatgtgttgctaacgatgtgccctctgctgcttgggctgtatcttgagattggggttttaccaaacttattcatgagaacaataacagcctacctcaacttacctcctaagattgttaggattaaatgggtttgtggcaagagagcacacttagaacatagatatttagcattccgtataaatcacgattactgttttcaaccagaggctaatgagtgatctaagtttatactcttgagttggaaattatgcagtttttatattccttaaattgacttttaaatttacttaaatgatcaatcagaggaattc

SEQ ID NO: 45813 - DNA, 1007 bp, Homo sapiens
gctacatacattcggaagaagggtggaaaagttactggagatagtcaaccaaaggaacaaggacagggagatttgaaaaagaagaaaaagaaaaagaagggaaaattgcctaagaattatgacccaaaagttaccccagatccagaaagatggctgccaatgcgagaacgttcttactaccggggaagaaagaagggtaaaaagaaggatcagattggaaaagggacccagggagcaactgcaggagcttcatctgaactggatgccagtaaaactgtgagcagcccacccacctccccaagacctggcagtgctgcaacagtatctgcctctacaagtaacatcatacccccaagacaccagaaacctgcaggggctccagcaacaaaaaagaaacagcaacagaaaaagaagaaaggtggaaaaggtggctggtgatgagaatattcttgttgcaggctgtttttaaactagtgtcagtgacactaggaatataataaaggtaacacagcaagaagcacagaactactccctcttcatctccatattttcataatttcttgtgtttcaaatagggaaacatcttcctcaaagtctgcctagtgagatatggcctactggttgcctcatagctttgtacagattatgaggactgaaaataattgggcatttacccatcttggtatctgttgtatcctttatctgtgtgtgctgatttgatcttttttcagtttcacataccttatctaaggtttcccaggatttaaacagaaactacttctatgatttcagctggagtctgaagatacttgtttctgttcaagtcccactttaaattatgtcttaggagactgaaagtggaatcttctgagcattcctgaatatctgcttagaaatatcatgtgataaagagggaccttcttaatacactgatgttcttcactaaatggatggccacaagaaaaataaagtaaatgtcttaaataatttaaccataaaaaaaaaaa

SEQ ID NO: 45814 - DNA, 514 bp, Homo sapiens
  misc_feature (1)...(514): n = a,t,c or g
ttgnannnccatctatgacatgattacgaatttaatacgactcactatagggaatttggccctcgaggccaagaattcggcacgagggacatttccagaactaccatgagatggtttagacgggaattcatgcaaatgaggggtcaaaaatggtatagtgaccccgtccacgtcctccaagctcacgaccttggagccccgtggagctggactgaggaggaggctgcacagcgggagagcagctggtccagaccagccctgcagcccccactcagccggcagccagatggccccgcaaggcctccagggatggcccctagccacaggccctggctgaggtctctgggtcggtcagtgacnnnnnnnnnnnnnncactgaanatagtgntcccagagcactttgcactccctgggtaagagggacgaccctctggnntttcaataccanttacntggaacttttntgnaangggtacaatgannaagnttntnttacnncacnngcnnattggtc

SEQ ID NO: 45815 - DNA, 4863 bp, Homo sapiens
gcgtctgaacgtctcaaagggccacagcgacaatgacagctgacaaggagaagaaaaggagtagctcggagaggaggaaggagaagtcccgggatgctgcgcggtgccggcggagcaaggagacggaggtgttctatgagctggcccatgagctgcctctgccccacagtgtgagctcccatctggacaaggcctccatcatgcgactggcaatcagcttcctgcgaacacacaagctcctctcctcagtttgctctgaaaacgagtccgaagccgaagctgaccagcagatggacaacttgtacctgaaagccttggagggtttcattgccgtggtgacccaagatggcgacatgatctttctgtcagaaaacatcagcaagttcatgggacttacacaggtggagctaacaggacatagtatctttgacttcactcatccctgcgaccatgaggagattcgtgagaacctgagtctcaaaaatggctctggttttgggaaaaaaagcaaagacatgtccacagagcgggacttcttcatgaggatgaagtgcacggtcaccaacagaggccgtactgtcaacctcaagtcagccacctggaaggtcttgcactgcacgggccaggtgaaagtctacaacaactgccctcctcacaatagtctgtgtggctacaaggagcccctgctgtcctgcctcatcatcatgtgtgaaccaatccagcacccatcccacatggacatccccctggatagcaagaccttcctgagccgccacagcatggacatgaagttcacctactgtgatgacagaatcacagaactgattggttaccaccctgaggagctgcttggccgctcagcctatgaattctaccatgcgctagactccgagaacatgaccaagagtcaccagaacttgtgcaccaagggtcaggtagtaagtggccagtaccggatgctcgcaaagcatgggggctacgtgtggctggagacccaggggacggtcatctacaaccctcgcaacctgcagccccagtgcatcatgtgtgtcaactacgtcctgagtgagattgagaagaatgacgtggtgttctccatggaccagactgaatccctgttcaagccccacctgatggccatgaacagcatctttgatagcagtggcaagggggctgtgtctgagaagagtaacttcctattcaccaagctaaaggaggagcccgaggagctggcccagctggctcccaccccaggagacgccatcatctctctggatttcgggaatcagaacttcgaggagtcctcagcctatggcaaggccatcctgcccccgagccagccatgggccacggagttgaggagccacagcacccagagcgaggctgggagcctgcctgccttcaccgtgccccaggcagctgccccgggcagcaccacccccagtgccaccagcagcagcagcagctgctccacgcccaatagccctgaagactattacacatctttggataacgacctgaagattgaagtgattgagaagctcttcgccatggacacagaggccaaggaccaatgcagtacccagacggatttcaatgagctggacttggagacactggcaccctatatccccatggacggggaaggcttccagctaagccccatctgccccgaggagcggctcttggcggagaacccacagtccaccccccagcactgcttcagtgccatgacaaacatcttccagccactggcccctgtagccccgcacagtcccttcctcctggacaagtttcagcagcagctggagagcaagaagacagagcccgagcaccggcccatgtcctccatcttctttgatgccggaagcaaagcatccctgccaccgtgctgtggccaggccagcacccctctctcttccatggggggcagatccaatacccagtggcccccagatccaccattacattttgggcccacaaagtgggccgtcggggatcagcgcacagagttcttgggagcagcgccgttggggccccctgtctctccaccccatgtctccaccttcaagacaaggtctgcaaagggttttggggctcgaggcccagacgtgctgagtccggccatggtagccctctccaacaagctgaagctgaagcgacagctggagtatgaagagcaagccttccaggacctgagcgggggggacccacctggtggcagcacctcacatttgatgtggaaacggatgaagaacctcaggggtgggagctgccctttgatgccggacaagccactgagcgcaaatgtacccaatgataagttcacccaaaaccccatgaggggcctgggccatcccctgagacatctgccgctgccacagcctccatctgccatcagtcccggggagaacagcaagagcaggttccccccacagtgctacgccacccagtaccaggactacagcctgtcgtcagcccacaaggtgtcaggcatggcaagccggctgctcgggccctcatttgagtcctacctgctgcccgaactgaccagatatgactgtgaggtgaacgtgcccgtgctgggaagctccacgctcctgcaaggagggggacctcctcagagccctggaccagggccacctgagccaggccttctacctgggcagcacctctgccgacgccgtcccaccagcttcactctctccgtctgtctttgcaactaggtatttctaacgccagcacactatttacaagatggacttacctggcagacttgcccaggtcaccaagcagtggcctttttctgagatgctcactttattatccctatttttaaagtacacaattgttttacctgttctgaaatgttcttaaattttgtaggatttttttcctccccaccttcaatgacttctaatttatattatccataggtttctctccctccttctccttctcacacacaactgtccatactaacaagtttggtgcatgtctgttcttctgtagggagaagctttagcttcattttactaaaaagattcctcgttattgttgttgccaaagagaaacaaaaatgattttgctttccaagcttggtttgtggcgtctccctcggcagagcccttctcgtttcttttttaaactaatcaccatattgtaaatttcagggtttttttttttgtttaagctgactctttgctctaattttggaaaaaaagaaatgtgaagggtcaactccaacgtatgtggttatctgtgaaagttgcacagcgtggcttttcctaaactggtgtttttcccccgcatttggtggattttttattattattcaaaaacataactgagttttttaaaagaggagaaaatttatatctgggttaagtgtttatcatatatatgggtactttgtaatatctaaaaacttagaaacggaaatggaatcctgctcacaaaatcactttaagatcttttcgaagctgttaatttttcttagtgttgtggacactgcagacttgtccagtgctcccacggcctgtacggacactgtggaaggcctccctcctgtcggctttttgccatctgtgatatgccataggtgtgacaatccgagcagtggagtcattcagcgggagcactgcgcgctatcccctcacattctctatgtactatgtatgtatgtattattattattgctgccaagagggtctgatggcacgttgtggggtcggggggtggggcggggaagtgctctaacttttcttaaggttttgttgctagcccttcaagtgcactgagctatgtgactcggatggtctttcacacggcacatttggacatttccagaactaccatgagatggtttagacgggaattcatgcaaatgaggggtcaaaaatggtatagtgaccccgtccacgtcctccaagctcacgaccttgggagccccgtggagctggactgaggaggaggctgcacagcggggagagcagctggtccagaccagccctgcagcccccactcagccggcagccagatggccccgcaaggcctccagggatggcccctagccacaggccctggctgaggtctctgggtcggtcagtgacatgtaggtaggaagcactgaaaatagtgttcccagagcactttgcaactccctgggtaagagggacgacacctctggtttttcaataccaattacatggaacttttctgtaatgggtacaatgaagaagtttctaaaaacacacacaaagcacattgggccaactatttagtaagcccggatagacttattgccaaaaacaaaaaatagctttcaaaagaaatttaagttctatgagaaattccttagtcatggtgttgcgtaaatcatattttaggctgcacgggcattaccccacacagggtggcagaacttgaagggttactgacgtgtaaatgctggtatttgatttcctgtgtgtgttgccctggcattaagggcattttacccttgcagttttactaaaacactgaaaaatattccaagcttcatattaaccctacctgtcaacgtaacgatttcatgaacgttattatattgtcgaattcctactgacaacattataactgtatgggagcttaactttataaggaaatgtattttgacactggtatcttattaaagtattctgatcctaaaaaatattccaagcttcatattaaccctacctgtccacgtaccgatttcatgaaccttatcatcttgtcgaattcctcctgacaacattataactgtatggcagcttcacttcataaggaactctacttcgacactggtatatcactacagcatttcgatcataacacaacaac

SEQ ID NO: 45816 - DNA, 3997 bp, Homo sapiens
tcgtccgcaaagcctgagtcctgtcctttctctctccccggacagcatgagcttcaccactcgctccaccttctccaccaactaccggtccctgggctctgtccaggcgcccagctacggcgcccggccgcgtcagcagcgcgaccagcgtcgtatgcaggcgctgggggctctggttcccggatctccgtgtcccgctccaccagcttcaggggcggcatggggtccgggggcctggccaccgggatagcccgggggtctggcaggaatgggaggcatccagaacgagaaggagaccatggcaaagccttgaacgaccgcctgggcctttttacctgggacagagtgaggagcctggagaccgagaaccggaggcttggagagcaaaatccgggagcacttggagaagaagggaccccaggtcagagactgggagccattacttcaagatcatcgaggacctgagggctcaggtaaggggtaggagggacctcaactcccagccttgtctgaccctccaattatacactcctttgcctctttccgtcattccataaccaccccaacccctactccaccgggagggggttgggcatacctggatttccatccgcgcacctagccacagggtccctaagagcagcagcagctaggcatgggagggctctttcccaggagagagggggaaggggacagggttgagagctttacagaggaagtggacagcatggagggaggtaaggaaaggcctgtaaagaggaggagacactggctctggcggaatggggactattggagggttaagcggatgtggctaaggctgagtcatctaggagtaaacaagaggccttcctttgggaggagccaatccagggtgtagggggcccagagtgaccaggtgcactagggaaaaaatgccaggagagggccaggaagaggacttgttagtagcgactcacttctgggcaggcaggccagccagctagccagcctgctgaggcttcccaagaggggcagagtgctgggatctgggaatccaggaaaggagggaatggggtggggctagatgaaaagggataggtgtccagggagagcctctggctattcctgggaccaggaagttttcactaggatacataacactttttacacactcaccccacccatccctggctttctattcatggaacaacctctctctacaatccctccagatcttcgcaaatactgtggacaatgcccgcatcgttctgcagattgacaatgcccgtcttgctgctgatgactttagagtcaagtaagtttgggggctagagagctgggggtccaggggtggagctaagaaggactgctccccaggctgggtagttaggggcacacagtgggatcctgttaggtgtgggtggatgagagtcagggtccatcagtgtattcatttaactgttcatttgtataaccccgtttaagaatactgtcctccaagtgccaagaatggtgctcaggggattaccacctaattgctgactcaagttgctggtttgcaatgggcacagaacttctcttagtaggtggcatgagttgagaaggttctggatcagagataggggcccctctgatcacctccactcctataggtatgagacagagctggccatgcgccagtctgtggagaacgacatccatgggctccgcaaggtcattgatgacaccaatatcacacgactgcagctggagacagagatcgaggctctcaaggaggagctgctcttcatgaagaagaaccacgaagaggcaagcaggggccactggccaggccagggattgaggggccaagagaagtctgggtcggagaatagacaagacaaaccaactgcaagtagccttgctaagacgtttagaaatagcagcctgggctcttcttaaataagaccgttctgatgaagagcattctcagggggtcgagtacaccctggctcacctgaattacaggtcaaaatgatatgggttagaaaatgagatgagaacagaagtagaagcagctaacactaggagctgggggtgataaaggaatgacagcagatggagttggcagcttcctaaaagatggtagaaggagcaggtttgtgaaggggagggtggataaaggaacagggtgaagttacagagaaaccatcagtgagtgggtggcatttctacccactggagtagaaaggccagaactggcattgccctgagtgcaagccaaggggttcctcctgtctcttctccaactgtaggcctcctagaagaggcaatcacagaagaaaggccttgttggagctctgaccctgaaccctcctcacttttgcccctgtcacctttaggaagtaaaaggcctacaagcccagattgccagctctgggttgaccgtggaggtagatgcccccaaatctcaggacctcgccaagatcatggcagacatccgggcccaatatgacgagctggctcggaagaaccgagaggagctagacaagtactggtctcagcaggtgcgtgaggggaggggatggctgccaaggtgtgggagggaggcagacggaatgaggggcctgatggactgtccccatcctgcagattgaggagagcaccacagtggtcaccacacagtctgctgaggttggagctgctgagacgacgctcacagagctgagacgtacagtccagtccttggagatcgacctggactccatgagaaatctggtgagtgccttcacatcacctgcccagctcctccttcacttggcctcagacccaaccctgtctcaacccaaatcctatccctcatatcatgagttcctttagctcagaaagagtcagtttcctctttgcatttccctccactcctatcccttatcccagtacttggcacatagcaggtgcccaaaaaagtttccaaaagtgaagggatgagcagtcctgggactctgggctcaccctgcccctcctctctgtgcccctgcagaaggccagcttggagaacagcctgagggaggtggaggcccgctacgccctacagatggagcagctcaacgggatcctgctgcaccttgagtcagagctggcacagacccgggcagagggacagcgccaggcccaggagtatgaggccctgctgaacatcaaggtcaagctggaggctgagatcgccacctaccgccgcctgctggaagatggcgaggactttaagtgagtggggctctcctacccacacgtgctgggatcaggagatcacttctccccaaagtctgagcttttggaagcaccccatgtgtctgttcactggtatccactgagcactgggccgttgctccgtgggtgctcctgtgtcttcaagggagtaacagttacagaggtctcccccttgaagaaagcaaactaagtattgtccctagctgtacttagtatgcaaatgaagtttggccttgagtttcccttttctggaggaagaggctgagggtgatttggagataaaggtagaggtcaggaggctttttccctctacctttcttgtctcccttctactccacggggctgtttataacttgggcttggtcttctgttacagtcttggtgatgccttggacagcagcaactccatgcaaaccatccaaaagaccaccacccgccggatagtggatggcaaagtggtgtctgagaccaatgacaccaaagttctgaggcattaagccagcagaagcagggtacctttggggagcaggaggccaataaaaagttcagagttcattggatgtcactttgtcttcttttggctgttttcattgtgcacaaatgccctaacccaacagtcccatccctgatccagcagaaaccacctctgacccctgaggtttcatatagattggggtgtagaaggaagagggatctgtattcttggaaacacttctgagagacagaggagggagcagtagatgtgatgggtcacaggctgtggggatcc

SEQ ID NO: 45817 - DNA, 5877 bp, Homo sapiens
  misc_feature (1)...(5877): n = a,t,c or g
gctcgacttttttttttccaagccaaactgtatccagctttattaaagatactttccataaacaatcatggtatttcaggcaggacatgggcagacaatcgttaacagtatacaacaactttcaaactcccttcttcaatggactaccaaaaatcagaaagccactataaaacccaatgaagtcttcatctgatgctctgaacagggaaagtttagagtgagggttgacatttcacatttagcatgttgtttaacaacttttcacaagccgaccctgactttcaggaagtgaaatgaaaaatggcagaatttatctgaagatccacaatctagaaatggaaccactgctcttttgacaggtgcccatctcagtggcatcactgggaaaagtccagattgcctgacacactggtaaccaatgactaggggtcaggtctcaacagatgtctggggcttaagggagttaagtctatgctgaaagatggaaagggagaagaggacataaaaacaaatttgtttttctataccacaaggcttttgtgccaaggtggccatgtgtgtcaaagtcagggaatccctcctcctgggagccaagaggaagtctctcaaaactagaagggaaaggtgttttctccacatcaatccagctttggagacattctattagtgacatatgccccttcccccaaaaacaacaatgaagtgttctgtgtgctaacaacatagcttttaaaaaaaaaaaaaaagtaaaacaaaattctgcatttttataaaacttgataaaaaatagtatttcaaactgtacagtcaccagaagtacacagttatcaaaaatgcacacacttcacttggcatctccagcaccttcagctttctgtgcctaaaagaaaacagacaaattaatgcaatgcgtagatttcaaaactatctgtgttcacattccacctacagcatcaatttgctcccaggccaaagttcaggtttcaggtactgagactcagtatttcttctgagaatgacttactaggtaactttgctaagtcacctctcctctgggcctcactgtaaaattgaggtaggaagaacaccagaataagagacctgaggttactcctagcttgaaaacttcatgtagtataaaacacaatgcccttcagctgacagtagagatttccagaatccaggatttaagttaacaggaaagccacaagcacactggaccaaatggtacatttggagtgatacaagaaaagggcaattaaatttttgatatcagcaactaactgaatgaacaaatctaacaaagggtgaaacagcagttatacctggtctgttttggcatctccattttctgcagggttattcccctccttgccagcatcagcttttccctttttccctttgggtaccttctctcccttctgaaaaaggggaaaaaatagaactgtttctccccatttcgtattaccaaggtatggtctgcaaagttctgcacaaggtaggattgtttactcaagataaaacacaaaccctcacccatttgacaagaacaactgatcaaaactaggctaaattatctgtaatttgctataatctttagtacttagaatttcctaagtaacagaagaataaatcagtttaaaccctggggtatttaatatttaaatgcagattttcctataaactaacaacagaattcttgatcaggaaaccaacgttatgaatgacacggacgaggtaagctatccacacagtttataacctccattaatggaggcaccattatgctaattaagttaaggcactaaggacagtcctcattctgtgaaaatgatcagttccaatgttagcacttacctttgcaggggcctttttaggcttgggctctggctttggaggagcaggtttctttttttggcaggaagagaggaaaaagtgaacatcagtacaatggactgaagaaaaccacccacaaccaaccaaaagtaccaagggtagagaagtttctcctcctcctcaaagtttttgtggttggctttcttctagaatgttggatttccagaagcccactcaaatgtcccactttggctacaggcatcagaatttcagaaccagcaaaacccaaagggcaagagtcccaagtagaggcaatgattcaaaaccaggcactaaccataattcatggaagcaaagggaattgttttttgatgttttttagtttcagggacaagcacgaaaattcaaaagcatacacttacagcagacaacctcgcggatcttctctgtggctattaaagacaacgagaaagttagaaataggacaggtaagtcgctttgaaagtttggtatcaatttgctctagattataggagtgtaaattcaggacacaggttacggttaatcaccgagtccagtggcctctgctagtccaaggctttgacccttgaagagagaatgacttacttcgtccttcacctttgctttatctcccttagcatccccttcagcctataagaaacaagaacaaaaaactgcagattttgaggtggttcttaattacttcccaaactttagagtgctaaaaatgaaaattaaagcagtcgtccacacaacttttctaggacataaatgagtgagcccgacgttcgtataagaacgaagcgcgcgcaggagctccggctcgccgaccccgagaagcgagggctggaccggagcgcagccggggagggcagcggagcccgcaccaccgcgacaggcaggagcaacagctgcagatggcgcaaacaaaccccctccggagcggagcccagcgccgttgctatggcagccgtcgagggcgggagagggaggcgcgcgcagcccggggaactcgtgggcggcgacagcgcgcgtctcgtgcgcggggaacgtgggcgagggggcggggccataccgcacaagccccgcctcacggcggcggttttttggcggcacgctttcccccgcccgccaaccccgagcgccgccttcccgccctttcgggtttgaattgcccgcccgcagagggagggaaggggccctcgcgatgggggagggggcacggggcgggggcggcgagcgaggagagcgggataaacagccgccaacatggctcctcccgccgcggccgccgctcctccaatatggcctctggcgcccgcgggcagccgagccgctcagggttagccccgagctgcccgacaccgtctccagcccccgcgcggggacggtgcgctggctcctgctcggcgccgattctcgctccctgcaccagggaggcggcggcggcggtggcggcagtggtggcccggcgcctggggccctcgcgccacgtacctttctcttgggcatggtggcggcggcgacggcagcgggacgtaggtgctggacgcgggatgcagcggcgcgcgggctttggtcggtccgggggtcgttctcgcctcttcttcacactgctcgggctccggggggtttataaagtttttatagcgctgggagccccggaccggttagaaccgatttcacctcccgccgccgttcattggcccagctggggtcacgtgggcggggtttaaactcacctcctctggagggagtgaggaggggggtgtgtggggggggtagtgcgcggagacggcggcgcgccgagggggtgggggcgcagtcggggtggcgcgcgtcgaaggcagtaaatgaggaggggtgcgcgagtcggcgggctccgggttccggctcccgccaagagctgtcttttgcaaactagcaagttccttccaccttatgcaacccagcaacccacttctccaagccgtgcgacactcacggcgcatctcagcggctttccttcctgctcccgctgggggccccagaagaggggtttgcgaggcctggctgcactgccctgctcctctggaagcaggaggaagcgcgcggctggaggcacaggctgcagttcccagagcccaggctgacgccgaagtgggaaaaaggcggggaaaccagcttggcgcagccggacgtgcatccttccgagctgccacttcggagaagcctttcgtgcacctcacctgaaagacggtcccactcgaggtgggctaggggtttcagggggagactttccatgcagaggtgccttttgggtgccgtgggtcaggtaggagctgtcctttcagcacccgttgcgcagccgcctccccaaatgctatcgaagcccccacccccaactcctctcgggtggctcccttaaggtccctgtattcccaaacctccagaccccgccacagtatggtggagagcggccgtcgaggtctaccagcactcacttccccctacactctacccctctcggagacattttgcccagctgcccaacccgacgcggccaccaagcctgggcactgcagccgcagctggcgaaatccctccttccacactgtcaagctggctgcctttcacttgcgcgaggaaaggagggtggaggaaagcgcccggggattaggaaacaagtagaggaacaggtggtgtgatggcaaaagggctcttccggtgccccctagtccaaagccagggtcttggagctagccaagtgcacctgagggagggtaggcaattgcagcagcaaaagaaggtgttcttccgttgcagttagcaaacaagttttacatctaagaatctttaaaaattctatttgagacccagcacacaagaatacgatagatgtcctcaaatgggggcttggctcacaggtggaaggacactaaattggtcccatctgatttcttgaggcaagggttgaacctggcttgcacaaatcacacctgtccaaagcaaccacgagttctactattttgcagcccttgctgctgggcgacgacgacgacctctctgcctcttctttccaccactacatcgcctcctggggcagcttctccctactccaccctgtatacctttcccagaatacagaacctcaggccaaagagagatgccagccccattaatcacctctactgtaccccaatcatattacggaaagtcagacccaggagacaggactcaacagccacgctcatagggcagattccgtttgctgcctccagcccctcattcccgccttaattgtagggctctgcattatagccgcataattcatgcctccctaattatggctgtcaacagccccattgtaaagctgtaaaatgtacagcacctgctctccaggaaccctgtgccagggattggtagaggggagtgccaggtgtggatggggctttgcaaagggttcactgattggcttctcaatcgccgtgtctggcatttatgcttgattctgggagcatggacaatagccaagaagtctcttgccgccagtatcccgggacagaaaggggaagaggcgggtggggtataggaaagttaggggtttcctgtgtgctcttgctacaacttgcaagatttcacctctcccctagagggagctgctagggaaacagcttgcagaaagtaaaatgggannnnnnnnnnnnnnnnnnnnnnnnnnnnnnnnnnnnnnnnnnnnnnnnnnnnnnnnnnnnnnnnnnnnnnnnnnnnnnnnnnnnnnnnnnagnnnnnnnnnnnnnnnnnnnnnnnnnnnnnnnnnnnnnnnnnnnagaaggaaaatggactttaaagagagtagcatttggttggtgttgctggctggtacttgccggtgtggggcacctgaaatagagttgctcaggcagacagctcttcaaaggcactaatcctctcagcagctctgcagcaagtcctggcagagggaggtaagggaaaggacacagctttgaccctcacaagcagaggacctagaacaagctt

SEQ ID NO: 45818 - DNA, 508 bp, Homo sapiens
cgccggttcggccgcctttccagaaagcccgggccgaacggccccgccgcagagactcagcgcggatcgctgctccctctcgccatggcgcaggtgctgatcgtgggcgccgggatgacaggaagcttgtgcgctgcgctgctgaggaggcagacgtccggtcccttgtaccttgctgtgtgggacaaggctgaggactcagggggaagaatgactacagcctgcagtcctcataatcctcagtgcacagctgacttgggtgctcagtacatcacctgcactcctcattatgccaaaaaacaccaacgtttttatgatgaactgttagcctatggcgttttgaggcctctaagctcgcctattgaaggaatggtgatgaaagaaggagactgtaactttgtggcacctcaaggaatttcttcaattattaagcattacttgaaagaatcaggtgcagaagctacttcagacatcgtgtgacacagatcaacctaagagatgacaaatg

SEQ ID NO: 45819 - DNA, 461 bp, Homo sapiens
  misc_feature (1)...(461): n = a,t,c or g
agtgnnttgnnntttgganaccnctatgacatgattacgaatttaataccgactcactatagggaatttggccctcgaggccaagaattcggcacgagggaaatatggcctcaatatgtgccgccagtgtttccgtcagtacgcgaaggatatcggtttcattaagttggactaaatgatcttccttcaaaggattatccaaggcatatactcaatgaaaaaccatgatagttctttgtacataaaataaacatttgaaaaaacaacaacaaaaaatgcgttgaataaacgaaggccaaaatgtcagtttccaaaaagaacctgaggcggttctttggtcagagcagccctgttagggctgagggcctcggttccacctcctccatgttttcctctctcttcccactgtgagctctctcanacctggcactgtggccgtcccagctcctcgcacccagcat

SEQ ID NO: 45820 - DNA, 2178 bp, Homo sapiens
cggcgcatctgtgagggagtcgctgtgatccggggccccggaacccgagctggagctgaagcgcaggctgcggggcgcggagtcgggagtgcaggcctgagtgttccttccagcatgtcggagggggagtcccagacagtacttagcagtggctcagacccaaaggtagaatcctcatcttcagctcctggcctgacatcagtgtcacctcctgtgacctccacaacctcagctgcttccccagaggaagaagaagaaagtgaagatgagtctgagattttggaagagtcgccctgtgggcgctggcagaagaggcgagaagaggtgaatcaacggaatgtaccaggtattgacagtgcatacctggccatggatacagaggaaggtgtagaggttgtgtggaatgaggtacagttctctgaacgcaagaactacaagctgcaggaaggaaaaggttcgtgctgtgtttgataatctgattcaattggagcatcttaacattgttaagtttcacaaatattggggctgacattaaagagaacaaggccagggtcatttttatcacagaatacatgtcatctgggagtctgaagcaatttctgaagaagaccaaaaagaaccacaagacgatgaatgaaaaggcatggaagcgttggtgcacacaaatcctctctgccctaagctacctgcactcctgtgacccccccatcatccatgggaacctgacctgtgacaccatcttcatccagcacaacggactcatcaagattggctctgtggctcctgacactatcaacaatcatgtgaagacttgtcgagaagagcagaagaatctacacttctttgcaccagagtatggagaagtcactaatgtgacaacagcagtggacatctactcctttggcatgtgtgcactggagatggcagtgctggagattcagggcaatggagagtcctcatatgtgccacaggaagccatcagcagtgccatccagcttctagaagacccattacagagggagttcattcaaaagtgcctgcagtctgagcctgctcgcagaccaacagccagagaacttctgttccacccagcattgtttgaagtgccctcgctcaaactccttgcggcccactgcattgtgggacaccaacacatgatcccagagaacgctctagaggagatcaccaaaaacatggatactagtgccgtactggctgaaatccctgcaggaccaggaagagaaccagttcagactttgtactctcagtcaccagctctggaattagataaattccttgaagatgtcaggaatgggatctatcctctgacagcctttgggctgcctcggccccagcagccacagcaggaggaggtgacatcacctgtcgtgcccccctctgtcaagactccgacacctgaaccagctgaggtggagactcgcaaggtggtgctgatgcagtgcaacattgagtcggtggaggagggagtcaaacaccacctgacacttctgctgaagttggaggacaaactgaaccggcacctgagctgtgacctgatgccaaatgagaatatccccgagttggcggctgagctggtgcagctgggcttcattagtgaggctgaccagagccggttgacttctctgctagaagagaccttgaacaagttcaattttgccaggaacagtaccctcaactcagccgctgtcaccgtctcctcttagagctcactcgggccaggccctgatctgcgctgtggctgtccctggacgtgctgcagccctcctgtcccttccccccagtcagtattaccctgtgaaagccccttccctcctttattattcaggagggctgggggggctccctggttctgagcatcatcctttcccctcccctctcttcctcccctctgcactttgtttacttgttttgcacagacgtgggcctgggccttctcagcagccgccttctagttgggggctagtcgctgatctgccggctcccggcccagcctgtgtggaaaggaggcccacgggcactaggggagccgaattctacaatcccgctggggcggccggggcgggagagaaaggtggtgctgcagctggtggccctggggggccattcgattcgcctcagttgctgctgtaataaaagtctactttttgctaaaaaaaa

SEQ ID NO: 45821 - DNA, 888 bp, Homo sapiens
  misc_feature (1)...(888): n = a,t,c or g
aagtcactaatgtgaccaaccagcagtggacatctactccttttggcatgtgtgccactggagatggcagtgctggagattccagggcaatggagagtcctcnatatgtgccacaggaacccatcagcagtgccatccagcttcttagaagacccattacagagggagttcatttcaaaagtgcctgcagtctgagcctgctcgcagaccaacagccagagaacttctgttccacccagcattgtttgaagtgccctcgctcttgtcgtgtctgttcaaaccggcacggtctgatccggaaatatggcctcaatatgtgccgccagtgtttccgtcagtacgcgaaggatatcggtttcattaagaaagacctgagctgtcttccttggcactgcctatggaggtgacacccatctcctccatcatggccatcctgagaccgctcgcgaagcccaagatcatcaaaaagagcaccaagttcactgggaaccagtcagactgatatgtcaaaattaagggtaactggtggaaacacagaggtattaacaacagggttcatagaaggtttgagggccagatctatgcccaacattggttatgggagaaacaaaaagacaaagcacatactgcccagtggcttctggaagttcctggtccacaacgttaaggagctggaagtactgctggtgagcaacaaatcttactgtgttgagatcactcatgatgtttcttccaagaactgcaaagccatcttggaaagagcagcccaggtggtcatcagagtcaccaatgccaatgccagcctgcacagtgcagaaagtgaatagacagtgaatgtgtttgttttattggggtttaaataaaaccaataaaactgtaaaaacaaaa

SEQ ID NO: 45822 - DNA, 937 bp, Homo sapiens
cccttctatgactgattacgaatttaatacgactcactatagggaatttggccctcgaggccaagaattcggcacgaggcgctggtgaacaggacccgtcgccatgggccgtgtgatccgtggacagaggaagggcgccgggtctgtgttccgcgcgcacgtgaagcaccgtaaaggcgctgcgcgcctgcgcgccgtggatttcgctgagcggcacggctacatcaagggcatcgtcaaggacatcatccacgacccgggccgcggcgcgcccctcgccaaggtggtcttccgggatccgtatcggtttaagaagcggacggagctgttcattgccgccgagggcattcacacgggccagtttgtgtattgcggcaagaaggcccagctcaacattggcaatgtgctccctgtggggcaccatgcctgagggtacaatcgtgtgctgcctggaggagaagcctggagaccgtggcaagctggcccgggcatcagggaactatgccaccgttatctcccacaacccctgagaccaagaagacccgtgtgaagctgccctccggctccaagaaaggttatctccctcagccaacagagctgtggttggtgtggtggctggaggtggccgaatttgacaaaccccatcttgaaggcttggccgggcgtaccacaaatataaggcaaagaggaactgctggcccacgagtacggggtgtggccatgaatcctgtggagcatccttttggaggtggcaaccaccagcacatcggcaagccctccaccatccgcagagatgcccctgctggccgcaaagtgggtctcattgctgcccgccggactggacgtctccggggaaccaagactgtgcaggagaaagagaactagtgctgagggcctcaataaagtttgtgtttatgccaccaaaaaaaaaaaaaaa

SEQ ID NO: 45823 - DNA, 2552 bp, Homo sapiens
tttttttttttttttaaaatgagacttggagtttaattaaaaacagaacagggatacattaaacaaacaaacaaaaattacttttctgattatcaattttttttgagactcaaagcatccccaaaacattggagatccagcttattcctgagacatcaaccatcacaaaaggttttcactctgaactattcacatttttgtggcagaaaacagaacaaagttctgcagacatccttcctctctttctaaaatatattcacaaacagggtcttttcatagttcaaaagaaaaacaaacaggtttctttcttggccaaatggcctgttactctcaccctgggatctgatttcttaataaaaaagttcagggcaccaaatccaaccagaaattcccaggacaccagtggctacttaactatgaggggatggatgcttttgtctttctatgaggggaatcattctcccgggattattatgctgctcaacagccccaggacaggtaggtgggaaggagggtgaatgcaaaagcgaaagggtcacagaaaagaatgaggctttcttgaacaacccatagcaaggcagaatggtccagttttacaaaccacccactacaaactccaaacatgcacacccaaaactagaggggaaaggaaagagctcctgggggactaggggagacaaaagatggtgacatagaacagcagacttgcctatgaacgtttctcaacttcctaacactggaagatgtttaattaaaaagttgctgttcaaaattgtactgaaaacatatctaaaaataggtctgtagtcatcttaaaaataaaaggtcacttctcagataagaggagtgacagatattctcagataccaacacttcaggtatctttgatgtaaatttgaaaaatggcctggtagagaaaaaggaaggaaaggaaggagagaggaagaaagtgagggaggtagggagagaaattcagagtacaacaggaaaggcaagaaaactgggaggaacacattttttaagcccatgcttatctatcccagcagccaaacaaagcagatccacaaaggaaaaaaatgcagttcttttctaagaacattctgaaaatcaacttcaaactcaaaacataagaaactgcaatctaagaacaactaccacaatgctcactggacttaaaaatgacgactgagaccgggtactcaaatgggtcaacgttcttcagcggtcattcttaggcattatctgacagaatactatgatcaggccttacccaccaagtggaagctaaagtgcctctattacttggtatggacctgctctaggagcagacaaaatcactttgctttcttgaagtacaagaggactctgccaggcaacgagatgcaagcagggaggagtggcagaagaagagcaaaactggttaccaagggctctcttctgatgtacagagttaaaaatatctgcacaaatgcactaagtaaaagaatgggaagatgaactataataccaaagacagaagacattcctcccagaggaaagaaaggaagtggacctcaaaacagtgtcacagggtaacgctacccagagtttgcacaagctgtgcctctgtcccgagggacgaatacctcaaggtaaaagggaaagcagctctctttttatcatttccccctgctggttttaaagaccccaagcccagactcttgcaacactgaacccataggtgggatacagggaggagagacagagggtaaggaatatgaatggtgttaggcccaccaagctctgtatcccttccccagacttcccagcccaggcagttgttggtaggttgatatttgatttgggacaaaattacagggtatgagggtggctctcaataaaaaaacaactaggaaagtcagagttgaactgttttcctctaagggctgcttagctctacagaaatacagcaagggccttcaatctaacctgtttaactgggaaggggaacaggagacagggagaagaaatggtcagatgaagctcatcttcccatcatttggcacccagaggaagacggggaggtggagactgtaatggggactgctggtattgcctcttctgtcttttcactgttgatcctattggccaaatcaggtgcacacaagtatcagtgttgctgcttttcttctaatccttgcaggagagtcagatgtccatctcgaactgagcatcatccccaactgcatgtttcctgtcgtgattgttcaagttgttcaaattgtttacttctactttggagtcttcaattaaggtgccagggctagtgactcctgggatattgggcaggtggcagggtggggtctgagccatgggagaattgcgacgatccaacagaaactttctgtcataaatgattcgagttcctcccggtgtggtggagaagagcgtcccccaggacgtggtgcaatagtcatgaggtagctgcacgcagtccgtggatggccacggtgcagggtggggatggcacggctctggcttgggctggtggcgctgcagcttgacaaggacat

SEQ ID NO: 45824 - DNA, 956 bp, Homo sapiens
  misc_feature (1)...(956): n = a,t,c or g
tgtgtgagcaacaaggctgtttatttcacctgggtgcaagcaggctgtgtccaagaaaggagtcagcaaagggtgctgggattatcattagttcttataggtttgggataggcggtggagttaggagcaattttttataggcagggggtggatctcacaaagtacattctcaagggtggggagaattacaaagtacattctcaagggtggggagaattacaaagaaccttcttaagggtgggggagattacaaagtacattgatcagttagggtggggcaggaacaaatcacaatggtggaatgtcatcagttaaggctatttttacttctnnnnnnnnnnnnnnnnnnnnnnnnnnnnnnnnnnnnnnnnnnnnnnnnnnnnnnnnnnnnnnnnnnnnnnnnnnnnnnnnnnnnnnnnnnnnttcctgccgtcttatattaataagaaaaataaaacaaaatagtgttgaagtgttggggcggcgaaaatttttggggggtgatatggagagagaatgggcgatgtttctcagggctgcttcaagcgggattaggggcggcgtgggaaccttccactgtgagagttacccgaagctcggcatccgtgatggtctagggggcttccgaggcgatcgggcagtgtcagtcttcagccgctaagccgagaagatctgggaaggagtcagtcagagagccttgggccagagttccaggggctctgggagtggcggatttgaaattggtgagatgtttcttgggctggtcggtctgaggacctgaggtcgtaggtggatctttctcacggagcaaagagcaggaggacaggggattgatctcccaagggaggtcccccaatccgagtcacagcaccaaannnnnnnnnnnnnnnnnnnnnnnnnnnnnnnnnnnnnnnnnnnnnnnnagcagtaaagctgtttatttcacctgggtgcag

SEQ ID NO: 45825 - DNA, 606 bp, Homo sapiens
  misc_feature (1)...(606): n = a,t,c or g
tttttttttaggtgtcaacaaacttgtntatatatatatatatatatatatatacacatacatacacacacagtcacattccagtgtgacaaatactccttcaccaggagacagcgctaccactccgggatcttgaagactctctacagagagcctaggcctggcagtcttcacagatgacacccaacagggagcacgtttattaaagtgggaaggggtggggtacaccccagggtgtatactgacagggacctcatgcaggcccagagctctgctgcaccctcttcatcagctcttcatcctgcatagacaactctgtcaactttttgcccatccgctcatggatgtccaggtacttagagacacatcggtccaggcacacagactcgcccttggagagctctgcttccttgtagtgaggaggcacacacttccggtggcaggcactggtcattctgttgtacatatcggccatcatctccacctccagctccgcagccagctgttgggccctgagaggatccatctcagcctagcaccgtggaagggatctccttctggcctcctaatccactgcctgggacggatcacaatgcccacggagac

SEQ ID NO: 45826 - DNA, 421 bp, Homo sapiens
aggcgccacaggccgggctcacagcaccatgacaggctctggggtggatgccaggacagccagctccgggagcagcgtgtgggaaggacagctgcagagcctggtgctgtcagaatatgcatccacagagatgagcctgcatgccctctatatgcaccagctccacaagcagcaggcccaggctgaacctgagcggcatgtatggcaccgccgggagagtgatgagagtggagaaagcgcccctgatgaagggggagagggcgcccgggcccccccagtctatccctcgctctgctagctatccctgtgcagcaccccggcctggagctcctgagaccaccgccctgcatggggggctttccagaggcgctacggtggcatcacagatcctgggcacagtgcccagggttccctctcattt

SEQ ID NO: 45827 - DNA, 700 bp, Homo sapiens
ctcaggggaggaaagtatgaaatacagtttatgaagcaagtgtgtctcgggctgtgcttgtcccaggagccccagcagcatctgaactgaggcttcttcagtcctgcaggaacaggatcatctgtctcagcggtgggcagatgttttcatagacagccagggagtaaacactgttggctctgtgggctgtatggtctctgccataaatagtacagagatgtggctgtgtctagtacaacttttagacacagaaatctgaatgacatatattgttctgtgtcaagaaacttagatttttttttaactatttaaaaacgtgaaacctattcttagctcacaggccatggagaagctggtggggaccagacccagctccttagctggctgggctggggagggggtagtgacagtggcagctgctactcactgctcagtgtggaaaacacaggacttggcaatcacagcccgcagaaccatcatgtgtggcagaagcctgagggatgcggtttcttgcccacgtgctctgttcattttctgttgtttttctgcacttaaagaattcacatggaagcatgttttataaaatgaattaccagagaaacagagatgggccgagattctcagaaatggtcccatgtgaccaagttctgctgtttgggtgacagtgctttgaagatctcctttgaggatgtgcagtctt

SEQ ID NO: 45828 - DNA, 965 bp, Homo sapiens
actgctatgacatgattacgaatttaatacgactcactatagggaatttggccctcgaggccaagaattcggcacgagggtcgccgctgcgaagggagccgccgccatgtctgcgcatctgcaatggatggtcgtgcggaactgctccagtttcctgatcaagaggaataagcagacctacagcactgagcccaataacttgaaggcccgcaattccttccgctacaacggactgattcaccgcaagactgtgggcgtggagccggcagccgacggcaaaggtgtcgtggtggtcattaagcggagatccggccagcggaagcctgccacctcctatgtgcggaccaccatcaacaagaatgctcgcgccacgctcagcagcatcagacacatgatccgcaagaacaagtaccgccccgacctgcgcatggacatgctggcatctactgggtcagggctctgctgctcggtggcttgtggaaactttggggcaagttccttcaaacctctctgtgtcttcggtaacctcatctgtaacatgcgtgtcgatagaccctactactcagggttgatgagaagattaaatgtgcaaaacctgcttgactgtgcccacaaatcctgattgtaggaataaattaatgactttttataaatattttgatcagatggactcagatgatcacagatgtcttcacatgcctatgactaatttgtacacaaactaatgctcgtgtttcccaagcacctggaagacatgccagatccatgtgcagtaatgcctggtggctccaggtctgccccgccgtcctgtggggctgtgagctttcccagcctcctgcccgtgtttgtgaatatcattctgtcctcagctgcatttccagcccaggctgtttggcgctgcccaggaatggtatcaattcccctgtttctcttgtagccagttactagaataaaatcatctactt

SEQ ID NO: 45829 - DNA, 574 bp, Homo sapiens
  misc_feature (1)...(574): n = a,t,c or g
agaacagtgagatcatccagcagtggcctggactgcactcacataaaaatcatgagacagccatggctacttgtttctgtaatacatgcatgtgtgttttttaaaacctatgataggcctctgattctgcagctgcaacttttatggaatgttttccttctccacatctcatgtgatgctcttattacaggacacagcattgttggttttgccatgtactattttacctatgacccgtggattggcaagttattgtatcttgaggacttcttcgtgatgagtgattatagaggctttggcataggatcagaaattctgaagaatctaagccaggttgcaatgaggtgtcgctgcagcagcatgcacttcttggtagcagaatggaatgaaccatccatcaacttctataaaagaagaggtgcttctgatctgtccagtgaagagggttggagactgttcaagatcgacaaggagtacttgctaaaaatggcaacagaggagtgaggagtgctgctgtagatgacaacctccattctattttagaataaattcccagcttctcntgctttctatg

SEQ ID NO: 45830 - DNA, 4108 bp, Homo sapiens
  misc_feature (1)...(4108): n = a,t,c or g
gaatcaagtagggattacaacaactttcaacagcaaccgaagtcagaagacagataccatcaatgtgctgaaagaggaaaacttctgaacctcaaaatctataaactatgaaataaacccttcaagaattttaagatgggctggtccaaaggtagtgagttatctcagttgattgttcacaatcatgttacacatcaaactccttattttactctgactactgcacttgactagtctaaaaaaaagaattataagatgaattaaagacacgttcagataagcaaaactgagaacgtttggcaaaagcagatctttactaaaggaaattatgaagaatgtacctcgggcagaaggaaaagtgtcaagatcaagtgtcaaggaagcattagagatttaagaaggtataagaaggttagaaaagtaagaaaaaaaatatgccgtcaactctaaaaactacaagtataaagaaaaaagattattgggaaatccaaataacctaccttaggaaattctaaaagaatatacgagctcacattcctttggtcataagagcagtgtcatcattagacatcaggtcgcctctggaaaaggccattgtgagtttaaaaaggcaaatgacgtctataattctaaaactagttctcccaccgaaactctagaaaggatcttgggatctgcagggtctcccggatcacactttgagaactgctgctttagtcttcctcccatctcctaaggccagagctcctgagtttgcttcccactggccaaggagaaaagagcaaggtcacttgtcggggggctgcagagggaattaccttctttcatttgcaaatgttactgggggacacaccggctcccagtagggtttccgccaaggctccgcgaaacgccactagagggcgccgctagcgaatcccacagcgcgccccgctgcccccacttttgtcctccgggttcacacgggcgcccggaagagagggtggtgcctgggagaggaaacgatgcgccccggggccgcggcctcattggatgagaggtcccacctcacggcccgaggcggggcttctttgcgcttaaaagccgagccgggccaatgttcaaatgcgcagctcttagtcgcgggccgactggtgtttatccgtcactcgccgaggttccttgggtcatggtgccagcctgactgagaagaggacgctcccgggagacgaatgaggaaccacctcctcctactgttcaagtacaggggcctggtccgcaaagggaagaaaagcaaaagacgaaaatggctaaattcgtgatccgcccagccactgccgccgactgcagtgacatactgcggctgatcaaggtagcggagagccagagctcctcccggggcgtggggtggaggtggctccgtttcccagggtggggtgattcacgtcttgaggtctcggccggtgtgagagcccagcctgttcccctttctgcgcccatccccggctcggccgccaccccgcccgcgcgccccattcccttcccctgagctggccgggccggagcctcattttgttttctacttttttctctcctatgtgcatccccccaggagctggctaaatatgaatacatggaagaacaagtaatcttaactgaaaaaggtaattcaacagtggcgggacgggggacaagcgttcggtgcctgtcaccttcgccaaggccattaccgcccctgctcccccttcttgcagatctgctagaagatggttttggagagcaccccttttaccactgcctggttgcagaagtgccgaaagagcactggactccggaaggtaacccctcgccctttccagaagccagagagaccaagtgttatgtaagaagtagtgtcggctgtgtagaaccactgactacacaggccgaagttactgagaacttggacagaaaaaatagccagcaagtgttcaaactactgaggaaaaaaaaaatttagatatgctgcacttaagaatactagggcaggttaaaagagctgtttaagttaagtatcagagtgctgtggagactcggaagtgtttaagctgcttaagtaagtataagtgctgtggagacccggaagagttggatataatgtcatttgttgtaattcagtttcataaaatggttcttgtttgaccctaacgtaacagtttttgtaattgtgttaaatcacacttttttctttaatttgtcccaatcttcaggttacagtctctagcttcgccatgtacatggcccttccgtgtacatggatgggcggggaggtaactaaaagatcctttacacaataaagtagatgatcatgataaatgaggtaaggtcctattatcacacacttcaaacacggtagatcagaaacccactatgatactcgctggctgtctgtttgctaaggaatataaaatggctagaaagtttaatttgaaacctttgcctccatttggaatagtagacaccagttaagagggtgtcagannnnnnnnnnnnnnnnnnnnnnnnnnnngctggtccctgttgattggtcagaagacagctcagctaaaaggggaagttgtctgggtggttgctttttttctgacgtctgttcctcaggctggaagaaatgagcagaaaacaagggatgagtactttttagagtatgtgcatgttacgtaatacctgtttctgggcaatgctgcttcttctgactcaacaaatggggagagcaaattgaaaatgcgtaaattggaaggcaagttctgaaattaaacgttgtactttggcctgatgttctgacctttaaggaagcaagagtttgtaaacttccaaatatttactattctgaactgccgtgtaaacctgacgtattcccaagtcaacataccagtataccaataggatgtgaataatgtgtgtgttgagtttaaaaccataggcagttttgctctggcaagtaatgaaagcgttctcgcttcctgagtgtgagctccagcagactgcagagtggccagtgccacagttgtagcctgacttcagtgagttctgatgtgtgctttttgcaaatacatgttctcagaacagtgagatcatccaggcagtggccctggactgcactcacataaaaatcatgagacagccatggctacttgtttctgtaatacatgcatgtgtgttttttaaaacctatgataggcctctgattctgcagctgcaacttttatggaatgttttccttctccacatctcatgtgatgctcttattacaggacacagcattgttggttttgccatgtactattttacctatgacccgtggattggcaagttattgtatcttgaggacttcttcgtgatgagtgattatagaggtacgattgagttcgtagcagagggtctgaagagagttcagagttataaatgcttacaatgactttttaaattgtactctttctttttaggctttggcataggatcagaaattctgaagaatctaagccaggtatgtcttagattttgttccaaatttgtaagtttactggattattttaatgatggaataaaaattgggtcttgagagcaggctgaaatgtcactgagtgtgtgttttactctctcataataggttgcaatgaggtgtcgctgcagcagcatgcacttcttggtagcagaatggaatgaaccatccatcaacttctataaaagaagaggtgcttctgatctgtccagtgaagagggttggagactgttcaagatcgacaaggagtacttgctaaaaatggcaacagaggagtgaggagtgctgctgtagatgacaacctccattctattttagaataaattcccaacttctcttgctttctatgctgtttgtagtgaaataatagaatgagcacccattccaaagctttattaccagtggcgttgttgcatgtttgaaatgaggtctgtttaaagtggcaatctcagatgcagtttggagagtcagatctttctcctcgaatatctttcgataaacaacaaggtggtgtgatcttaatatatttgaaaaaaacttcattctcgtgagtcatttaaatgtgtacaatgtacacactggtacttagag

SEQ ID NO: 45831 - DNA, 1050 bp, Homo sapiens
ttttttttttttttaaatcaaagagtagtttattaaaaaagaatcaaacagaaactctaagtaccagtgtgtacattgtacacatttaaatgactcacgagaatgaagtttttttcaaatatattaagatcacaccaccttgttgtttatcgaaagatattcaaggagaaagatctgactctccaaactgcatctgagattgccactttaaacagacctcatttcaaacatgcaacaacgccactggtaataaagctttggaatgggtgctcattctattatttcactacaaacagcatagaaagcaagagaagttgggaatttattctaaaatagaatggaggttgtcatctacagcagcactcctcactcctctgttgccatttttagcaagtactccttgtcgatcttggaacagtctccaaccctcttcactggacagatcagaagcacctcttcttttatagaagttgatggatggttcattccattctgctaccaagaagtgcatgctgctgcagcgacacctcattgcaacctggcttagattcttcagaatttctgatcctatgccaaagcctctataatcactcatcacgaagaagtcctcaagatacaataacttgccaatccacgggtcataggtaaaatagtacatggcaaaaccaacaatgctgtgtccttccggagtccagtgctctttcggcacttctgcaaccaggcagtggtaaaaggggtgctctccaaaaccatcttctagcagatctttttcagttaagattacttgttcttccatgtattcatatttagccagctccttgatcagccgcagtatgtcactgcagtcggcggcagtggctgggcggatcacgaatttagccattttcgtcttttgcttttcttccctttgcggaccaggcccctgtacttgaacagtaggaggaggtggttcctcattcgtctcccgggagcgtcctcttctcagtcaggctggcaccatgacccaaggaacctcggcgagtgacggataaacaccagtcggcctgcgac

SEQ ID NO: 45832 - DNA, 845 bp, Homo sapiens
aggagtctctggcttatgactcctggttcccattagtcttaagtcttctggttcccataaaagactcagttttattgaggtagatacaggtttagaagagaaaagagcaacagattttcagcgttgcagtcactcggttatctatgaagggttgtgcaaaacaggaaggtctgggaatgaccagatatcttgttggcataaatgttatgaaaaggcagaatactggcaagaaatgaggaagagagagaaaaacaatataactttcttgagtgcaaaggtgctagacaactaggagcccagctgggattggtgtagggagggccgaacgctgactagtgtggcctcactgccccaggcttcctttcagaggaaggcctgtcctgctggaactggagccaaggggaggctgcctatgaaggcagaagatgtggatgaattcaggcactgggggtgggggggttatttataaacacaaggtggttggtttaagccaaaaggagataccatcctgataagctctgtgaaagagaagatgtgcctggtgtgtgtaatgcggctggggtatgaaaacactgagaaggagatgaaggagtgtgtgtagcatgggggtgtgtacaacttaacacctggacttttactgggggagtgggaaagtgattctgtaaccaacattagaattactttggatttgtaatcagattggttctatgatttgtctttgactattcacagataattgtaaatgctggttttataagcccaagtcattttacatttgcttttccaaaatgtattaaattggaattttttaatcctttatatacaaaaaaaaaaaaaaaaaaaaa

SEQ ID NO: 45833 - DNA, 924 bp, Homo sapiens
tatgacatgattacgaatttaatacgactcactatagggaatttggccctcgaggccaagaattcggcacgagcgcctcggaggcgttcagctgcttcaagatgaagctgaacatctccttcccagccactggctgccagaaactcattgaagtggacgatgaacgcaaacttcgtactttctatgagaagcgtatggccacagaagttgctgctgacgctctgggtgaagaatggaagggttatgtggtccgaatcagtggtgggaacgacaaacaaggtttccccatgaagcagggtgtcttgacccatggccgtgtccgcctgctactgagtaaggggcattcctgttacagaccaaggagaactggagaaagaaagagaaaatcagttcgtggttgcattgtggatgcaaatctgagcgttctcaacttggttattgtaaaaaaaggagagaaggatattcctgggactgactgatactacagttgcctcgccgcctgggcccccaaaagagcttagccagaatcccgcaaactttttcaatctctctaaaagaagatgatgtccgccagtattgttgtaagaaagcccttaaataaagaaggtaagaaacctaggaccaaagcacccaagattcagcgtctttgttactccacgtgtcctgcagcacaaacggcggcgtattgctctgaagaagcagcgtaccaagaaaaataaagaagaggctgcagaatatgctaaacttttggccaagagaatgaaggaggctaaggagaagcgccaggaacaaattgcgaagagacgcagactttcctctctgcgagcttctacttctaagtctgaatccagtcagaaataagatttttttgagtaacaaataaataagatcagactctgaaaaaaaaaaaaaaaaaagtcgacg

SEQ ID NO: 45834 - DNA, 382 bp, Homo sapiens
cggacgcgtgggcggcgcactcattcgccctcccgggcatcatcttcaccacgttctggggcctcgtcggcatggccgggccctggttcgtgccgaagggacccaaccgcggagtgatcatcaccatgctggtcgccaccgccgtctgctgttacctcttctggctcatcgccatcctggcgcagctgaaccccctgttcgggccccagctgaagaatgagaccatctggtgcccagctctcggaatgactgtggctccactgtccctgacaaccccttcgtccggaccctcccccacacaactatgtctggtcaccagctccctcctgctggcacccagagacccggacccgcagggcctgcctggtcctggaagtcttcc

SEQ ID NO: 45835 - DNA, 2591 bp, Homo sapiens
ctggattccagggcatgcctggtattggtggctctccaggaatcacaggctctaagggtgatatggggcctccaggagttccaggatttcaaggtccaaaaggtcttcctggcctccagggaattaaaggtgatcaaggcgatcaaggcgtcccgggagctaaaggtctcccgggtcctcctggccccccaggtccttacgacatcatcaaaggggagcccgggctccctggtcctgagggccccccagggctgaaagggcttcagggactgccaggcccgaaaggccagcaaggtgttacaggattggtgggtatacctggacctccaggtattcctgggtttgacggtgcccctggccagaaaggagagatgggacctgccgggcctactggtccaagaggatttccaggtccaccaggccccgatgggttgccaggatccatggggcccccaggcaccccatctgttgatcacggcttccttgtgaccaggcatagtcaaacaatagatgacccacagtgtccttctgggaccaaaattctttaccacgggtactctttgctctacgtgcaaggcaatgaacgggcccatggccaggacttgggcacggccggcagctgcctgcgcaagttcagcacaatgcccttcctgttctgcaatattaacaacgtgtgcaactttgcatcacgaaatgactactcgtactggctgtccacccctgagcccatgcccatgtcaatggcacccatcacgggggaaaacataagaccatttattagtaggtgtgctgtgtgtgaggcgcctgccatggtgatggccgtgcacagccagaccatttcagatcccaccgtggccccagcgggtggtcctcgctgtggatcggctactcttttgtgatgcacaccagcgctggtgcagaaggctctggccaagccctggcgtcccccggctcctgcctggaggagtttagaagtgcgccattcatcgagtgtcacggccgtgggacctgcaattactacgcaaacgcttacagcttttggctcgccaccatagagaggagcgagatgttcaagaagcctacgcccgtccaccttgaaggcaggggagctgcgcacgcacgtcagccgctgccaagtctgtatgagaagaacataatgaagcctgactcagctaatgtcacaacatggtgctacttcttcttctttttgttaacagcaacgaaccctagaaatatatcctgtgtacctcactgtccaatatgaaaaccgtaaagtgccttataggaatttgcgtaactaacacaccctgcttcattgacctctacttgctgaaggagaaaaagacagcgataagctttcaatagtggcataccaaatggcacttttgatgaaataaaatatcaatattttctgcaatccaatgcactgatgtgtgaagtgagaactccatcagaaaaccaaagggtgctaggaggtgtgggtgccttccatactgtttgccccattttcattcttgtattataattaattttctacccccagagataaatgtttgtttatatcactgtctagctgtttcaaaatttaggtcccttggtctgtacaaataatagcaatgtaaaaatggttttttgaacctccaaatggaattacagactcagtagccatatcttccaaccccccagtataaatttctgtctttctgctatgtgtggtactttgcagctgcttttgcagaaatcacaattttcctgtggaataaagatggtccaaaaatagtcaaaaattaaatatatatatatattagtaatttatatagatgtcagcaattaggcagatcaaggtttagtttaacttccactgttaaaataaagcttacatagttttcttcctttgaaagactgtgctgtcctttaacataggtttttaaagactaggatattgaatgtgaaacatccgttttcattgttcacttctaaaccaaaaattatgtgttgccaaaaccaaacccaggttcatgaatatggtgtctattatagtgaaacatgtactttgagcttattgtttttattctgtattaaatattttcaggggttttaaacactaatcacaaactgaatgacttgacttcaaaagcaacaacccttaaaggcccgtcatttccattaggtattccctcattctgcatcctgggcttgaaaaacagctctgttggaatcacagtatccagtattttcacacggtaagcacattcggggccatttccgtggtttctcatgagctgtgttcacagaccctcagcagggcatcgcatggaccgcaggagggcagattcggaccactaggcctgaaatgacatttcactaaaagtctccaaaacatttctaagactactaaggccttttatgtaatttctttaaatgtgtatttcttaagaattcaaatttgtaataaaactatttgtataaaaattaagcttttattaatttgttgctagtattgccacagacgcattaaaagaaacttactgcacaagctgctaataaatttgtaagctttgcataccttaaaaaaaaaaaagtcgacgcgg

SEQ ID NO: 45836 - DNA, 815 bp, Homo sapiens
  misc_feature (1)...(815): n = a,t,c or g
cctaaagactcttaagtccctggttcacgggattttcaagcaagtttctagagcatgtgtacgtccttcccattcagattttttatgagccaccattatgtcaatctgtttcatgagctcctgtagttctgcttcacaagatgtcaaaaatcccccaccatgccctcgattttgtattccttctaacaaagcctccatcaccaaatcccctttgttttggcaaccacatccgggaatccgaggaaagcgagtgcagacacgtatgcgggggagggcggggcgtggcaggagcaagcgtctgccgcggtggccgggtgccggtaagggtttccagcgcccccggcctaggttttggaggcgcgggaatgcgttcgttgctcagtgtcggacttccccctattcccatcggccgaggctgtcactttacgctcataaccgtttttctttactgcactcgtgtcgggaggaaagggacttgcgtggcacccccagacctccccgtctccgcttccacgtttggtacatcctgcctgaggcaggaagccgcagctgagggacggcctgtcgtacgatttgacaagatcaaagctgcaggaaaatggacagtgaggttcagagagatggaaggatctnggatttgattgatgatgcttggcgagaagacaagctgccttatgaggatgtcgcaataccactgaatgagcttcctgaacctgaacaagacaatggtggcaccacagaatctgtcaaagaacaagaaatgaagtggacagacttagccttacagtacctccatgagaatgtccccccattgg

SEQ ID NO: 45837 - DNA, 2392 bp, Homo sapiens
acggcgagcctcatcctccgggtgcggcgctgagcagcgagtccgactgtgctcgctgctcagcgccgcacccggaggatgaggctcgccgtgggagccctgctggtctgcgccgtcctggggctgtgtctggctgtccctgataaaactgtgagatggtgtgcagtgtcggagcatgaggccactaagtgccagagtttccgcgaccatatgaaaagcgtcattccatccgatggtcccagtgttgcttgtgtgaagaaagcctcctaccttgattgcatcagggccattgcggcaaacgaagcggatgctgtgacactggatgcaggtttggtgtatgatgcttacctggctcccaataacctgaagcctgtggtggcagagttctatgggtcaaaagaggatccacagactttctattatgctgttgctgtggtgaagaaggatagtggcttccagatgaaccagcttcgaggcaagaagtcctgccacacgggtctaggcaggtccgctgggtggaacatccccataggcttactttactgtgacttacctgagccacgtaaacctcttgagaaagcagtggccaatttcttctcgggcagctgtgccccttgtgcggatgggacggacttcccccagctgtgtcaactgtgtccagggtgtggctgctccacccttaaccaatacttcggctactcaggagccttcaagtgtctgaaggatggtgctggggatgtggcctttgtcaagcactcgactatatttgagaacttggcaaacaaggctgacagggaccagtattgagctgctttgcctgggacaacaccccggaagccggtagatgaatacaaggacttgccacttggcccaggtcccttctcataccgtcgtggcccgaagtatggggcgggcaaggaggacttgatctgggagcttctcaaccaggcccaggaacattttggcaaagacaaatcaaaagaattccaactattcagctctcctcatgggaaggacctgctgtttaaggactctgcccacgggtttttaaaagtcccccccaggatggatgccaagatgtacctgggctatgagtatgtcactgccatccggaatctacgggaaggcacatgcccagaagccccaacagatgaatgcaagcctgtgaagtggtgtgcgctgagccaccacgagaggctcaagtgtgatgagtggagtgttaacagtgtagggaaaatagagtgtgtatcagcagagaccaccgaagactgcatcgccaagatcatgaatggagaagctgatgccatgagcttggatggagggtttgtctacatagcgggcaagtgtggtctggtgcctgtcttggcagaaaactacaataagagcgataattgtgaggatacaccagaggcagggtattttgctgtagcagtggtgaagaaatcagcttctgacctcacctggggacaatctgaaaggcaagaagtcctgccatacggcagttggcagaaccgctgggctgggaacatcccccatgggccctgcctctacaataagatcaaccactgcagatttgatgaatttttcagtgaaggttgtgccccctgggtctaagaaagactccagtctctgtaagctgtgtatgggctcaggcctaaacctgtgtgaacccaacaacaaagagggatactatggctacacaggcgctttcaggtgtctggttgagaagggagatgtggcctttgtgaaacaccagactgtcccacagaacactgggggaaaaaaccctgatccatgggctaagaatctgaatgaaaaagactatgagttgctgtgccttgatggtaccaggaaacctgtggaggagtatgcgaactgccacctggccagagccccgaatcacgctgtggtcacacggaaagataaggaagcttgcgtccacaaagatattacgtcaacagcagcacctatttgggaagcaacgtaactgactgctcgggcaacttttgtttgttccggtcggaaacccaaggaccttctgttcagagatgacacagtatgtttggccaaacttcatgacagaaacacatatgaaaaatacttaggagaagaatatgtcaaggctgttggtaacctgagaaaatgctccacctcatcactcctggaagcctgcactttccgtagaccttaaaatctcagaggtagggctgccaccaaggtgaagatgggaacgcagatgatccatgagtttgccctggtttcactggcccaagtggtttgtgctaaccacgtctgtcttcacagctctgtgttgccatgtgtgctgaacaaaaaataaaaattattattgattttatatttcaaaaactccattctttcctaaatattttca

SEQ ID NO: 45838 - DNA, 429 bp, Homo sapiens
ataaagcaatactgaaaacttgagagaatgcaccttaggggaaggggctatttcaagactcaaaagcgggatcttagaaatacacatcctcctgctgaccctctgccttcaatagctatctatcttaaaagctgaagtttgaactgcagcatctgcttgacagatgccaggttccttcggcagggggacgatcactctatatatcttccgttgcctcagattcctgtggcccaaggatcccaccaatcctcgttccccctaaacatgctaacaaaaatcccttatcgtgggtattaaaataataacagttacactgtatgcatatttatgtgctccttttgtctggtttttcttttcatcatgtataagctgaattcagcattagtttctcacatcttcccccaggtatccccaacagaatttttatgt

SEQ ID NO: 45839 - DNA, 1212 bp, Homo sapiens
  misc_feature (1)...(1212): n = a,t,c or g
cggacgcgtgggcttatggacagttgtgtccccaaggaaggatgagaatagctactgaagtcctaaagagcaagcctaactcaagccattggcacacaggcattagacagaaagctggaagttgaaatggtaagtgaaactgtatccaagtaagcaggtaactgggcaaacttcctacggcacaaatggctttttagttacctcctagtgctgaatgcattaaataaatggcggattcttgtcttgttatgattaataagaaagtttgtaaatgcagcctggatgatgataagcaaatgctgactgaacatgaaggtcttaattagctctaactgactaaaggcatttgttagttttggcagggggtgaacactcatctgtggctattctaagaccactcttattcttaggtggagtccaacttgcctggaccagcttaatggttctgctcctggtaacgtttttatccatggatgacttgcttgggtaaggacatgaagacagttcctgtcataccttttaaaggtatggagagtcggcttgactacactgtgtggagcaagttttaaagaagcaaaggactcagaattcatgattgaagaaatgcaggttagtttaaactttgaaggaaatttttaaggtggcaaaaggttttggtggcatatacaccttaatctgtagatgggagtgattagctgtttaaaagttaaaatgtgactgagaaggaaattgagtagggcaaattttaaatgggtattatttttcatcttcaaacaggcagacctgttatcctaaactaggtgagtcagcttttggtacatgtgatgattttcagtgtaacccaatgatgtaatgattctgccaaatgaaatataatgatatcactgtaaaaccgttccattttgattctgaggttactctactaacaagcatcacacatttgtattttgccctgattaatatgttggcttcgctttcagggtttttaatgaccacaacaagcaagcatgcagcttactgcttgaaagggtcttgcctcacccaagctagagtgcagtggcctttgannnnnnnnnnnnnnnnnnnnnnnnnnnnnnnnnnnnnnnnnagcctcccagtggtctttgtagactgcctgatggagtctcatggcacaagaagattaaaacagtgtctccaattttaataaatttttgcaatccaaaaaaaaaa

SEQ ID NO: 45840 - DNA, 836 bp, Homo sapiens
gtcgactcctgtgaggtatggtgctgggtgcagatgcagtgtggctctggatagcaccttatggacagttgtgtccccaaggaaggatgagaatagctactgaagtaagttgaaaattccctctcaaaaaggtttaaagccattggatgtgccacaatgatgacagtttatttgctactcttgagtgctagaatgatgaggatcttaaccaccattatcttaactgaggcacccaaaatggtgagttggggaacatagagagtacacctaagttcacatgaagttgtttcttcccaggtcctaaagagcaagcctaactcaagccattggcacacaggcattagacagaaagctggaagttgaaatggtggagtccaacttgcctggaccagcttaatggttctgctcctggtaacgtttttatccatggatgacttgcttgggtaaaggacatgaagacagttcctgtcataccttttaaaaggtatggagagtcggcttgactacactgtgtggagcaagttttaaagaagcaaaggactcagaattcatgattgaagaaatgcagggcagacctgttatcctaaactagggtttttaatgaccacaacaagcaagcatgcagcttactgcttgaaagggtcttgcctcacccaagctagagtgcagtggcctttgaagcttactacagcctcaaacttctgggctcaagtgatcctcagcctcccagtggtctttgtagactgcctgatggagtctcatggcacaagaagattaaaacagtgtctccaattttaataaatttttgcaatccaaaaagaaaaaaaaagtcgacc

SEQ ID NO: 45841 - DNA, 1619 bp, Homo sapiens
gccagaacaagctgtttgaaagcatccaggaaggcaagtatgagtttcctgacaaggactgggcacacatctccagtgaagccaaagacctcatctccaagctcctggtgcgagatgcaaagcagagacttagcgccgcccaagttctgcagcacccatgggtgcaggggcaagctccagaaaagggactccccacgccgcaagtcctccagaggaacagcagcacaatggacctgacgctcttcgcagctgaggccatcgcccttaaccgccagctatctcagcacgaagagaacgaactagcagaggagccagaggcactagctgatggcctctgctccatgaagctttcccctccctgcaagtcacgcctggcccggagacgggccctggcccaggcaggccgtggtgaagacaggagcccgcccacagcactctgaaatgctccagtcacaccttataggccctaggcctggccaggcattgtcccctggaaacctgtgtggctaaagtctgctgagcaggcagcagcctctgctctgtggctccattcaggctttttcatctacgaaggccctgaggttcccatcaacccccatttccctagggtcctggaggaaaaagctttttccaaaggggttgtctttgaaaaggaaagcaatcacttctcactttgcataattgcctgcagcaggaacatctcttcactgggctccacctgctcacccgcctgcagatctgggatccagcctgctctcaccgctgtagctgtggcggctggggctgcagcctgcagggagaagcaagaagcatcagttgacagaggctgccgacacgtgcctcttccctctcttctctgtcaccctcctctggcggtccttccaccttcctctgtcctccggatgtcctctttgcccgtcttctcccttgggctgagcaaagccatcccctcaattcagggaagggcaaggagccttcctcattcaggaaatcaaatcagtcttccggtctgcagcacggaaaagcacataatctttctttgctgtgactgaaatgtatccctcgtttatcatcccctttgtttgtgattgctgctaaagtcagtagtatcgtttttttaaaaaaaaagtttggtgtttttaaccatgctgttccagcaaagatgataccttaaactcccactgcaagcccatgaacttcccagagagtggaacggcttgctcttctttctagaatgtccatgcacttgggttttaatcagcagttccctattattctgattttaagctgttcctgtgatgaacttagagacagcatcggtgtctgctgctgtgtccccaggtcttgtgtgggtggcacagatctgggcagttagatagtgctctgtgcctaaggtgaagccacactagggtgaagcctcacttccctgtttgagcaatgcagtgcctgctgcccgtgtgcatgaaggtacagccattcagataagtggaactattgagttacataaagaaaatagatttgcatttgtcaggcagacgtttatacaacaccacggtgcttttatacattgtgcttattttaataaaactgaaattctatgtgtggcctaaaaaaaaaaa

SEQ ID NO: 45842 - DNA, 1258 bp, Homo sapiens
  misc_feature (1)...(1258): n = a,t,c or g
gcagctgccttagccctctnggtttgaagttgatatcgatgtggagcacggagggaaaagaagccgcctgacccccgtctctccagagagttccagcacagaggagaagagcagctcacagccaagcagctgctgctctgatcccagcaagccgggtgggaatgttgagggcgccacgcagtctctggcggagcagatgagaaagatcgccttggagtccgaggggcgccctgaggcaagcctgtgcccctcccgccacctgggaccacggccagcctagtgatctgtggcctgcacctccgcctcatcctcagcacctctgcagccccacttacaaacccgagggagctgctgctgctgcagtgatgtctgtgccattaaagtcacgctgggaacctgctagaactttgtagttacttggtctttgtgagtggccactgttccccctagacccctgcagccttaactgcacgtgtgcatgcgtgctccccgactgtctgccaggagccagggccatggtcaggcttggcctgttgcgcgtgtctcctgtgtgctcatggtgagttttgttccaggaacagatggagtcggataactgttcaggaggagatgatgactggacccatctgtcttcaaaagaagtggacccgtctacaggtgaactccagtccctacagatgccagaatccgaaggccaagctctctggacccctcccaggagggacccacagggctgaaggaagctgccttgtacccacatctcccgccagagntggaccccgcggctgattgagtccctctcccagatgctgtccatgggcttctctgatgaaggcggctggctcaccaggctcctgcagaccaagaactatgacatcggagcggctctggacaccatccacgtggcaggacaaatcgcgcccatttagaggatgtggctgtaacctgctggatgggactccatagctccttcccaggacccctcagctccccggcactgcagtctgcagagttctcctggaggcaggggctgctgccttgtttcaccttccatgtcaggccagcctgtccctgaaagagaagatgggcatgccctccatttgtaagaacaatgccagggcccaggaggaccgcctngcctgcctgggccttggctgggcctctggttctgacactttctgctggaagctgtcaggctgggacaggctttgattttgagggttagcaagacaaagcaaataaatgccttccacctcac

SEQ ID NO: 45843 - DNA, 449 bp, Homo sapiens
  misc_feature (1)...(449): n = a,t,c or g
ttganaccttttgacntgattcgaatttaatacgactcactatagggaatttggccctcgaggccaagaattcggcacgaggccctctttaaggcaattggtgtgaagcctcctagaggaatcctgctttacggacctcctggaacaggaaagaccctgattgctcgagctgtagcaaatgagactggagccttcttcttcttgatcaatggtcctgagatcatgagcaaattggctggtgagtctgagagcaaccttcgtaaagcctttgaggaggctgagaagaatgctcctgccatcatcttcattgatgagctagatgccatcgctcccaaaagagagaaaactcatggcgaggtggagcggcgcattgtatcacagttgttgaccctcatggatggcctaaagcagagggcacatgtgattggtatggganaaccccngaaccc

SEQ ID NO: 45844 - DNA, 3717 bp, Homo sapiens
  misc_feature (1)...(3717): n = a,t,c or g
tattaacaaaaagttttttttttttaatcaaagtacataaaataaaggtggacacaactgtaagtgatcaccaaccaggggatgtttgggatttttagatgcattaaaagagagtatagagaatatccacctgcaagtaagattgtattcttttgcaaccctgcgattttcaaatggcaccccaacacagtctttggtcaggataagggatcctgcaggcctagccttaccgtccacatcaaatataggtggagggatgccatattctccacatttggagctctgtcaggctgctccctttccaccagtcctatccagtgatactgcagacaaagggtgaggcaacaggagacatcataccgatgttgatcaggagaggaagaaggtgcaatcttacttccaggatttcacatttggaagaatgccttgggagtggtgggtagcccaaggctgttcccaggaaaagaagcaggcacagggcccaggactcaggctccattttgacccaacgtttattgtccttttacaacatgtcattttttggtttagaaactgcttgtgattagttttccaacattaactcaaaagcatgtaaaataaatcaacctactctctatataaacatccagcaactgtggcccctacccacctacccaggttggatagggggaagggagggctcgggcagcattgagtcaagtgcagatgctttactgtggcaggtggcagtagtgccttggttcacaccccacacaggtcccctgcactgccccaaactacaacagaaatggcataggcccaaggcccaattccctgttggtaattcactctccgcctaccaaatgaaaatcgcttttattttatcgcttttgttttgtatttttgcaacagaaaccccctgtccagagtcagactgtagctgaactgttcagactggagaatggagcaggctgtgggcgcacccctggtccctctcctgggcaagcgcccccacccccagggaacaaggtccaggcaggccagctcactgcacgctggccaccaccacttagccatacaggtcatcatcattgtcttctgtgtatacactgccacctgtgccgcctccactgccctgactggggccagctccaccctggttccctgaagggaatctgaagctgccaaagccccgactctgctgaagggtctgggcaaacatctcatacttccgaatgtcattgtcactgacagaacggcgcgcaaagcgcatggcttcttcaaagtgatctcgacggatctcaggcactggatcatcctcttctacctccatggctgatgggtttgtctgcctctctcgttctcgcctaatctcactctcgatggattcacggatggccagcttgcaagcacgctggcaaatctctgtcaggtcagctccagagaagccattagtcattttagccaggaactccaagtccacatccttggcaactggggacttgcgcaggttagccttgaggatggcaacacgggacttctcatcaggaagtgggatgtagatgagctgatcaagacggccaggtctgaggatggcaggatcaatgatgtcaggccggttggtagcgccaatgatgaacacatttttttttgtggacatgccatccatttctgtcaggatctggttgatgactcggtcagcagccccaccaccatctccaatgttacctccacgagccttggcaatcgaatccagctcatcaaagaatagcacacagggggcagcttggcgggccttgtcaaagatttctctgacattggcctcagactccccaaaccacatggtgagcagctcaggacccttgatggagatgaagttggcctggcattcattagcaatggctttggccaacaaagttttcccacagccaggaggtccatagaacagaactcccttggaaggtgtcatgccaaacttcaggaatttgtctgggtgctccacaggatactggaccagctcctgtagctcacgtttgacatcctctaggcccccgatgtcttcccaggttacctgtggcacctctaccacggtttcccgcagtgctgatgggttactctggctcaaggcccaccggaagtcatccatagtaactgctagagagttcatgacctcggcatcaatggtctcatcctctaggtcaatgagatccatcttcttgcggatggcttgcagagcagcctctgagcacagggctgctaagtcagcacccacatgcccgtgagtctcattggctacctgttccaggtccacatcatctgccagcttcatgttcttggtatggatctgaagaatctctaagcgtcctgtagcatcaggaattccaatatctacctccctgtcaaagcgaccaaatcgccgtagagctgggtcaatgctgttgggtctgttggttgctgccataacaatcacatgtgccctctgctttaggccatccatgagggtcaacaactgtgatacaatgcgccgctccacctcgccatgagttttctctcttttgggagcgatggcatctagctcatcaatgaagatgatggcaggagcattcttctcagcctcctcaaaggctttacgaaggttgctctcagactcaccagccaatttgctcatgatctcaggaccattgatcaagaagaagaaggctccagtctcatttgctacagctcgagcaatcagggtctttcctgttccaggaggtccgtaaagcaggattcctctaggaggcttcacaccaattgccttaaagagggcaggatgtctcaggggcagttccaccatctcctttatctgagctagctgcttcctgcagccaccaatgtcatcataccctacttcattcaaggactcttcctcatcctctcgtttgataggctccccttcgcagtggatcactgtgtctggagcaacaatgcaataagggctaggatctgtttccaccactttgaactccacagcacngcatcccaccacggacaagaaaaatgtctcctttccggatgggtcgatacgcttccaggaagtacggcttaaggtatacctcgaagagattacccagtaatgccttccactgtgtcatcaatgggcagcacatggatacgtttgccgtacttcacatcagggcatggctggatgctgatgacatcccctaggcgtacacgaaggttattccgaacaactctattcatccgaatcttctcatcagaacaagtatcatcagaaaggacgatgcaaacagcttctcgtctcttctttcctttcagcaacactgtgtcacctcggaacaactgcaattcatccatcttgggctgggacaaggacaccacactgttgtcctcattgatggcttcatcaacaattaaccgattgggacggttcttctgtttgaagaatggctgttgataggtcatcaccttttgaatcggctccagaagccatggcgcgcgcctctcccgncggcggctgtggcggcccgcgggtaacggctacgagcggtggcaagcgaccgactgggccggggctcggctcttccaggcggtgggcgagcagcggcgacagaagcncaagcggcttccctctcgcttcctcccaccggcagcgaggcgtcgggcgaacaacgctggctcctgatccgcgaggtggcagtggcagngacagcggcagcggcagcgacgacntcaaac

SEQ ID NO: 45845 - DNA, 2305 bp, Homo sapiens
cgtcgacagacggttgaaactagagatggacaggctatcaacgaaacttctcagcatcacgatgaccttgaataaaaattgcacacactcagtgcagcaatatattaccagcaagaataaaaaagaaatccatatcttaaagaaacagctttcaagtgcctttctgcagtttttcaggagcgcaagatagatttggaataggaataatctagtttacagaaaaatcttgtgctagaatactttttaaaaggtattttgaataccattaaaactgcttttttttttccagcaagtatccaaccaacttggttctgcttcaataaatctttggaaaaaaaaagcagttttaatggtattcaaaataccttttaaaaagtattctagcacaagatttttctgtaaactagattatgttgtaaacttttttctaaatcttgtaggagtgtcggttgttaagaactagagcttattcctattccaaatctatcttgcgctcctgaaaaactgcagaaaggcacttgaaagctgtttctttaaggatatgggatttcttttttattcttgctggtaatatattgctgcactgagtgtgtgcaatttttattccaaggtcatcggtgatgctgagaagtttcgttgataacctgtccatctctagtttcaaccgtcttaaatcagaagtgtccctttttgagtgggtatcaaccagagggagtgaatcccagattagtttccctcaggttcagggaggaaaagtttggaagaggcagagaaatcctgctctcctcgccttccagcagcttcctgtaggtggcaatctcaatgtcaagggccatcttaacattgagcaggtcttggtattcacgaaggtgacgagccatttcctccttcatattctgaatctcatcctgcaggcggccaatagtgtcttggtagttagcagcttcaacggcaaaagttctcttccatttcacgcatctggcgttccagggactcattggttcctttaagggcatccacttcacaggtgagggactgcacctgtctccggtactcagtggactcctgctttgcctggcgcagggcgtcaattgttccggttggcagcctcagagaggtcagcaaacttggatttgtaccattcttctgcctcctgcaggttcttggcagccacactttcatattgctgacgtacgtcacgcagggcagccgtgaggtcaggcttggaaacatccacatcgatttggacatgctgttcctgaatctgagcctgcagctccctggatttcctcttcgtggagtttcttcaaaaaggcaatctcttcttgcaaagattcccactttgcgttcaaggtcaagacgtgcccagagacgcattgtcaacatcctgtctgaaaagattgcagggtgttttcggcttcctctctctgaaagcatctcctcctgcaatttctcccggaggcgcatgatgtcctcggccaggttgtcgcgctccacctcgacgcgggctttgtcgttggttagctggtccacctgccggcgcagctcccgcatctcctcctcgtagaggtcccctaggcgcgacttgccttggcccttgagctgctcgagctcggccagcaggatcttattctgctgctccaggaagcgcaccttgtcgatgtagttggcgaagcggtcattcagctcctgcagctccaccttctcgttggtgcgggtgttcttgaactcggtgttgatggcgtcggccagcgagaagtccaccgagtcctgcaggagccgcaccccgggcacgctgctccgcaggcgcacgggcagaggagcgcgtggcatacacgccgcccggggacgaggcgtagaggctgcggctggtgctggggcgcagcgcgctgcccaggctgtaggtgcgggtggacgtagtcacgtagctccggctggagctcggccggctcgcggtgcccgggccgccgaacatcctgcggtaggaggacgaggacacggacctggtggacatggctgcggagggtggcgatggcctgggcggcggcggtggcgcggactggctcccggagaagaggcgaacgagggcgcggtgggtgtgggtggtgggagcgcggctgcgtctctggcgcggggacctcggagcgagagtggcagaggactggaccccgccgagggcgctgtttttataaccccgttaggaaagagggtcccctcccactgccatcccagccgcggagcgcgccagccaatcgggacctagcgagaagcggggagggtgggcgggtggggtgggggcgccctc

SEQ ID NO: 45846 - DNA, 1808 bp, Homo sapiens
  misc_feature (1)...(1808): n = a,t,c or g
ggcacccctgccagtcctgctctgccgcctgccaccgctgcccgagcccgacgctatgtccagcaaaggctccgtggttctggcctacagtggcggcctggacacctcgtgcatcctcgtgtggctgaaggaacaaggctatgacgtcattgcctatctggccaacattggccagaaggaagacttcgaggaagccaggaagaaggcactgaagcttggggccaaaaaggtgttcattgaggatgtcagcagggagtttgtggaggagttcatctggccggccatccagtccagcgcactgtatgaggaccgctacctcctgggcacctctcttgccaggccctgcatcgcccgcaaacaagtggaaatcgcccagcgggagggggccaagtatgtgtcccacggcgccacaggaaaggggaacgatcaggtccggtttgagctcagctgctactcactggccccccagataaaggtcattgctccctggaggatgcctgaattctacaaccggttcaagggccgcaatgacctgatggagtacgcaaagcaacatgggattcccatcccggtcactcccaagaacccgtggagcatggatgagaacctcatgcacatcagctacgaggctggaatcctggagaaccccaagaaccaagcgcctccaggtctctacacgaagacccaggacccagccaaagcccccaacacccctgacattctcgagatcgagttcaaaaaaggggtccctgtgaaggtgaccaacgtcaaggatggcaccacccaccagacctccttggagctcttcatgtacctgaacgaagtcgcgggcaagcatggcgttgggccgtatttgacatcgtggagaaccgcttcattggaatgaagtcccgaggtatctacgagaccccagcagggcaccatcctttaccatgctcatttagacatcgaggccttcaccatggaccgggaagtgcgcaaaatcaaacaaggcctgggcttgaaatttgctgagctggtgtataccggtttctggcacagccctgagtgtgaatttgtccgccactgcatcgccaagtcccaggagcgagtggaagggaaagtgcaggtgtccgtcctcaagggccaggtgtacatcctcggccgggagtccccactgtctctctacaatgaggagctggtgagcatgaacgtgcagggtgattatgagccaactgatgccaccgggttcatcaacatcaattccctcaggctgaaggaatatcatcgtctccagagcaaggtcactgccaaatagacccgtgtacaatgaggagctggggcctcctcaatttgcagatcccccaagtacaggcgctaattgttgtgataatttgtaattgtgacttgttctccccggctggcagcgtagtggggctgccaggccccagctttgttccctggtccccctgaagcctgcaaacgttgtcatcgaagggaagggtggggggcagctgcggtggggagctataaaaatgacaattaaaaattatcacaacaattagcgcctgtacttgggggatctgcaaattgaggaggccccagctcctcattgtacacgggtctatttggcagtgaccttgctctggagacgatgatattccttcagcctgagggaattgatgttgatgaacccggtggcatcagttggctcataatcaccctgcacgttcatgctcaccagctcnttcattgtaagaagagacagtggggactcccggccgaggatgtacanctgggccctttgaaggaacggacaacctgcactt

SEQ ID NO: 45847 - DNA, 784 bp, Homo sapiens
acgccacctgcaggctgtttgaccttcgtgctgaccaggagctcatgacttactcccatgacaacatcatctgcgggatcacctctgtctccttctccaagagcgggcgcctcctccttgctgggtacgacgacttcaactgcaacgtctgggatgcactcaaagccgaccgggcaggtgtcttggctgggcatgacaaccgcgtcagctgcctgggcgtgactgacgatggcatggctgtggcgacagggtcctgggatagcttcctcaagatctggaactaacgccagtaggtaatgcagcagcccaaatgcccttctctgaggagaactgtgcgtgtttctcatagaacatttgaagttgtcattaacggtttctagataaatgttgatgtagcattgatttggaattgtgttgtgggaaacgtttacagaaagctgaagtcacgtgccctcagctgcagacactcatgcagtgatgggaagagcagtgacctgggctgtgcgtctgcactttagattctctgcctcttttcacatttctttaaactctgtttaaaacagcatgtggatgccatggagactggaagaccattccaacttggacgcgttaccatgagagcatatcctatccaaccgtactaacgtgggacaccctacacctcccctcagaacttcaaaagggcaagatcttttttccttcacttattgctgaaaccaagagcacaattcccattgagagaaagatctctgtgctgtaaactaaaacaaattgtgcattcctt

SEQ ID NO: 45848 - DNA, 2944 bp, Homo sapiens
cgacgagggcgctgagacaaatttacatgtattggagaccagaccagaagcccttctgaattaagatctcacattcttgaaggtggcattgaagagcactaagatcggaagatgagtgagcttgaccagttacggcaggaggccgagcaacttaagaaccagattcgagacgccaggaaagcatgtgcagatgcaactctctctcagatcacaaacaacatcgacccagtgggaagaatccaaatgcgcacgaggaggacactgcgggggcacctggccaagatctacgccatgcactggggcacagactccaggcttctcgtcagtgcctcgcaggatggtaaacttatcatctgggacagctacaccaccaacaaggtccacgccatccctctgcgctcctcctgggtcatgacctgtgcatatgccccttctgggaactatgtggcctgcggtggcctggataacatttgctccatttacaatctgaaaactcgtgaggggaacgtgcgcgtgagtcgtgagctggcaggacacacaggttacctgtcctgctgccgattcctggatgacaatcagatcgtcaccagctctggagacaccacgtgtgtccctgtgggacatcgagaccggccagcagacgaccacgtttaccggacacactggagatgtcatgagcctttctcttgctcctgacaccagactgttcgtctctggtgcttgtgatgcttcagccaaactctgggatgtgcgagaaggcatgtgccggcagaccttcactggccacgagtctgacatcaatgccatttgcttctttccaaatggcaatgcatttgccactggctcagacgacgccacctgcaggctgtttgaccttcgtgctgaccaggagctcatgacttactcccatgacaacatcatctgcgggatcacctctgtctccttctccaagagcgggcgcctcctccttgctgggtacgacgacttcaactgcaacgtctgggatgcactcaaagccgaccgggcaggtgtcttggctgggcatgacaaccgcgtcagctgcctgggcgtgactgacgatggcatggctgtggcgacagggtcctgggatagcttcctcaagatctggaactaacgccagtagcatgtggatgccatggagactggaagaccattccaacttggacgcgttaccatgagagcatatcctatccaaccgtactaacgtggacaccctacacctcccctcagaacttcaaaagggcaagatcttttttccttcacttattgctgaaaccaagagcacaattcccattgagagaaagatctctgtgctgtaaactaaaacaaattgtgcattccttccggggccatcgtctttgttttcttttttgtcttgaatgaattttaaaaggaaatatataataaaaatgttaaccagaaggtaaacttggagtgtaattgtcagacagacacacttttccaccagtgtatttgaattttagaccagtgaccctgttttgtggcattcatgcaaaacatgctgagggctttgttcatctgggtcatcgtgtccaaatttcagtcatgtttgtagcaagattttggaagcattgcatatttcctttttaaaatgtattcctttgtgttcaacagttaatcaaaaccagagagtctagggcagcctctctgatgttgtcaatgatgtaaattcagtccctggtttttaattttctgtctgatgtcacagatcattgttgcacacaaacgtggcatagaaaagaacatgttcagaagccatggggccaagcacatgcgggggacggtctcaaatgcgtgatcagagaatccttcacctttgctgaaaagtgagctcagatccagcaccatgttcctcctgacccatcctgtctatcttctcagttgagtttttaatctcactttggggtttccttgtgaagttgggagggaagtttataatagcctaacactaccccacccccaactaggaggaacctctgttttcaagagagatgcctgtcctgtgcttggatagtcagtcaattatttgtgtatgaaacaatgtacaaatcaatgttttgaaaataatgatctcagactttctaagttaaattttaaaaattttgattgtttgccatattgggtgggtttactccttagaatcgcatgctgtagaaatgctcaaaagtgcatatgggactcagtcccttaggtgttctttttcttttaagaaataacctcttacagttgtaaccattgcggctctgtccacttctcgttgctgctctgtggcacatatcgggaagcagtacagcgcgcggctctacacgcttgggtagcgggataagtcactgttttctttatttctttaaaaaaaaaaaagttctgttgcaaacgactgctgttggattctgagggtggggagggagagagagggagggagagggagtgaagagcctgccctcctatatggattcttcagggccctccacatctgaggtggctcattcccatcacacacagattgtcctggtgttcatttcaaggccagtgttcagcagcagcgtttggaaagcaggttctgtgggaccccccgccccgccccccgcactccttcatagcagcagtagtggcttctccatcctgttttctgcaacattctatacaaaactgtgctgtgaccttgcggtaggcctggatctggcaaagagaatacaaatgaaaccccttctttctctttccgtccaacaactctgtagagctctctgcacccttacccctttccaccttttgtatttaattttaaagtcagtgtactgcaaggaagctggatgcaagatagatactatattaaactgtactgttatttaagatgtaataaagcagtttgacatgagggaaaaaaaaaaaaaaaaagtcgacg

SEQ ID NO: 45849 - DNA, 444 bp, Homo sapiens
  misc_feature (1)...(444): n = a,t,c or g
catagataatttttgaattctgatagaatacaagtgtggtaaatgccatgtntgtactttatctaacatcttctctttcagnagtcttgttttttttatatcatgtgattgtttgtgtgtcccctttcctcttctttgcttaacacaattatcttgtgttaaggatctcaaagatttcatgagacaagctggggaagtgacgtttgcggatgcacaccgacctaaattaaatgaagggtcaagaagcaggtctcgatcccggaccagaagttcctctaggtctcgtagccgatcccgttcccgtagtcgcaaatcttacagccggtcaagaagcaggagcaggagccggagccggagcaagtcccgttctgttagtaggtctcccgtgcctgagaagagccagaaacgtggttcttcaagtagatctaatctccagcatctgtg

SEQ ID NO: 45850 - DNA, 2602 bp, Homo sapiens
gcgtggaggtcgacgactccgtcgcagactacggacctgtctgggtctcagccgccaaagaccccgtccggtaggtgagtggctcactttgagggcaagccttctcggatcgaggcttcttcatggccgctcagatcgtgagcggccggggctgctctctttgcggaggatggcgtctaatgagcgcagttgattcgaggaagtactagccggacatcatgagtggctgtcgggtattcatcgggagactaaatccagcggccagggagaaggacgtggaaagattcttcaagggatatggacggataagagatattgatctgaaaagaggctttggttttgtggaatttgaggatccaagggatgcagatgatgctgtgtatgagcttgatggaaaagaactctgtagtgaaagggttactattgaacatgctagggctcggtcacgaggtggaagaggtagaggacgatactctgaccgttttagtagtcgcagacctcgaaatgatagacggtatgtgaagggtggatggctgcattgaacaattattgtaggggtagcatttaagattcaggagtcattagcagtgatgattttgggacctgccgtataatctgttcttctattcccacgttagccaattgttcttgatgaatctatatgagtcatagaacacaaatctattgacggaagtcattagaatggcttgtgatatctgatggcttgaacttgcccacagttgaacacaagtgctgtcattgcatttcttccattgtgaatacgaattttcttcctcagaaatgctccacctgtaagaacagaaaatcgtcttatagttgagaatttatcctcaagagtcagctggcaggtttgttgaaatacagttttgagttattttgatgtggctttttaaaaaagttaatgggtagctaatgttgtattgttttattaaaagtagttttaaattaatggatttaatggaattgtaattttaaacatttaattaaatgtaatttgggggatattttgaactttaatattagtgatcaaatgtaaatgttttgaggatatttttcttgttttttaaaatcaatttttaaccaaatattaaaccctttatttgccagcctgtctgtgtcgttggccttatgacgaggagtgcctgtgggttatcctaatcgttgtcttggtcactcttggttgggcctggttgactttgccagtcagctcctacagtgatcagttggccacctctagatctgtgtttgccggtctagacgttatcggtgcacttccttgaagtcccagggttgcagcgatcccagagcgttgataacgtgatctgatccctaagttgagacctgtcttcctgtaacgcttccgaataagaggtccggtcgaaaagagttgaaaagatacgaaattaggtggtcgttggaatcctgatcgcagtaaagtggtccttggtaactgctcgagtagaacatgtcctgcatcccgcccaatagtccgctaatagggagggctgtgcgattaaaggcttccatcgattgggtagtgtccttcaagtgggtggcgaagagccagtcgggcatatgtcatgaaggtttctccgaccgattaatggtttgctgcttgactagcctagggaaataataataaaggtaaagtaaacttttttaatgacatatggggcacaaaataactggtgtcttgtaaatgttctgtttttttaaataaaacttctctactttagtctttactttaaaaatatgtactgtttccttttttgttgtttttttgtttgtttttttttcttttgtactgagctcagcatagactaatactaccttaatgttaaaatctgaatttcttttagcattttgcttaaaagcaatatgctatttgcttattccgtgccctgacatagataatttttgaattctgatagaatacaagtgtggtaaatgccatgtttgtactttatctaacatcttctctttcagtagtcttgttttttttatatcatgtgattgtttgtgtgtcccctttcctcttctttgcttaacacaattatcttgtgttaaggatctcaaagatttcatgagacaagctggggaagtaacgtttgcggatgcacaccgacctaaattaaatgaaggggtggttgagtttgcctcttatggtgacttaaagaatgctattgaaaaactttctggaaaggaaataaatgggagaaaaataaaattaattgaaggcagcaaaaggcacagtaggtcaagaagcaggtctcgatcccggaccagaagttcctctaggtctcgtagccgatcccgttcccgtagtcgcaaatcttacagccggtcaagaagcaggagcagggagccggagccggagcaagtcccgttctgttagtaggtctcccgtgcctgagaagagccagaaacgtggttcttcaagtagatctaagtctccagcatctgtggatcgccagaggtcccggtcccgatcaaggtccagatcagttgacagtggcaattaaactgtaaataacttgccctggggcctttttttaaaaacaaaaccacaaaatcccaacca

SEQ ID NO: 45851 - DNA, 544 bp, Homo sapiens
  misc_feature (1)...(544): n = a,t,c or g
attttgaannatttgaaaanccctntgacatgattacgaatttaatacgactcactatagggaatttggccctcgaggccaagaattcggcacgagaatggaccccaactgctcttgcgccactggtaagggaagctctgcgccctggaatccccatttcccagccctattacagagggtctctgggtttcaggaagtcgcattttaagttctgagcgacggggactccagtacttcgttagatgctttcttcctgatcacgcccctgagagcattgccctcatccctgggcctctacgtcagagttaagaatactgaggctcaaggctgaactgctccacatcacccagttggtcatgggcctgctggctgggccccagtgctctgtccaggctctgagcaatcagtgtggttgggggtgctggaaacattgactcttcagagttcaggacagaaggttctggctcgcagtctcaatattcctgggttgtatgtgcacgtgggaccttcctggtgcggtaaaacaggagggtccttgccttcc

SEQ ID NO: 45852 - DNA, 391 bp, Homo sapiens
ttttttttttttttcaggtctaaagtgtttaattatcactcacatatttcacaggaaaaggaatgtagcaaatgggtcaaggtggtataaaaaaaaaatccaggtttgtacatgtctctctgtttacatctgggagaaaggttgtcctggcatcagtcgcagcagctgcacttctctgacgcccctttgcaaacacagccctgggcacacttgctacagcccacggggcagcaggagcagcagctcttcttgcaggaggtgcatttgcactctttgcacttgcaggaaccagcgcaggtgcaggagacaccagcggcgcaggagcagttggggtccattgcaagccgaggagagactggactttccaagagagaagcgaagaagcagtggg

SEQ ID NO: 45853 - DNA, 1431 bp, Homo sapiens
tgatacttgatgacctgattacgaatttaatacgactcactatagggaatttggccctcgaggccaagaattcggcacgaggcacccactgcctcttcccttctcgcttgggaactctagtctcgcctcgggttgcaatggaccccaactgctcctgtgccgctggtaagggacgcccgggttctgtgccttgggatgccaaattcccagacaccatagagagtgtccctgggtttgaggaggtcgtattttgcgatctgagctgaagaggacttctttacttcctccgctgctttcctcttggccaagctcctgagggcattttcctcctccctgttcctctatgtcagagttgagggtcctgaggctcaaggctgtcctgctccacgtcacctggttggtcacagggctgctggctgagccccaattctctaacctgactctgagcttaccggattggataggagacattggataggaggggacattgcctcttccaggttcaggacagaaagtcgaagtcgaagtcttcctggggccatgtctgcagcctgggactttcctttggagtagaaataggagggtgcttggttttcccagcatgaatggagaggacatggggcttctcttcctctgctctgagtgggaaaggagctctgagggctggctctgcaacagagaagggggaagtggacactcattgacccactgctgtaccttctgcatctcactcaccgttcactggctttttctcttctagcaggtgtctcctgcacctgcgccagctcctgcaagtgcaaagagtgcaaatgcacctcctgcaagaagagtgagtgcggggccatctccaggaatctggggctgtggctaaggttgggagggaacccaaggctgtccctgagtgcgtgcttctggggaaccggccttcctttgtccctgtaggttgtcactgcctgtctagtcttctgcactttccagggcttatgtgaggtggggcagctttctcaaaggaagacccattccaatgtccaccagttgtctcctgacaaaaaccatgccatcatgaactaagggtcctctggggctggagggatggagacaggcctctgttggggcagggagttctctgatcgagtctgctctgacctctcaatctcctttcctccccaggctgctgctcctgctgccctgtgggctgtgccaagtgtgcccagggctgcatctgcaaaggggcatcggagaagtgcagctgctgtgcctgatgtcgggacagccctgctcccaagtacaaatagagtgacccgtaaaatccaggattttttgttttttgctacaatcttgacccctttgctacattcctttttttctgtgaaatatgtgaataataattaaacacttagacttgaaaaaaaaaaaaaaaaaaagtcgacg

SEQ ID NO: 45854 - DNA, 1791 bp, Homo sapiens
cccgggacggcagcaggtgggctgcacacggactctgggacaagtcgagctgaaaaccgcggagcaggggtggggtggagacgcccgcgacgccaaggctggggtcccggaacacgctgggaggagggtggaaggcaacctcggggaaactgggaaaggcggcctggacttcgggaacaccgcgtacctgcgggggcacagcccacccgagcgaacgggctccaaagggaaggtcccgcggtgcccaccggcagagctcagggggtggtgcgcccggcccttctgcggcgcacagcccagcccaggaacgcgggcggtgcggactcagcgggccgggtgcaggcgcggagctgggcctctgcgcccggcccgacctccgtctataaatagagcagccagttgcagggctccattctgctttccaactgcctgactgcttgttcgtctcactggtgtgagctccagcatcccctttgctcgaaatggaccccaactgctcttgcgccactggtaagggaagctctgcgccctggaatccccatttcccagccctattacagagggtctctgggtttcaggaagtcgcattttaagttctgagcgacggggactccagtacttcgttagatgctttcttcctgatcacgcccctgagagcattgccctcatccctgggcctctacgtcagagttaagaatactgaggctcaaggctgaactgctccacatcacccagttggtcatgggcctgctggctgggccccagtgctctgtccaggctctgagcaatcagtgtggttgggggtgctgggaaacattgactcttcagagttcaggacagaaggttctggctcgcagtctcaatattcctgggttgtatgtgcacgtgggaccttcctggtgcggtaaaacaggagggtccttgcccttcccagcgttagtggagaggacatggggcttctgttcctctgtcctgagtgggaaaggagctctgagggctggccctgcacagaggagggggcactggagactcactgacccactgctgtaccttctgcatctcactcactgcccactgcgttttcctcttccttgtaggtggctcctgcacgtgcgccggctcctgcaagtgcaaagagtgcaaatgcacctcctgcaagaagagtgagtgcggggccatctccaggaatctggggctgtggctcaggttgggagggaactcaaggctggccctgagtgcatccttctggggaactgggctttctttgccctcattgcccgtgtcattccctctccaggctttctgccctaaattcagatggggcaggacagcatttttctcgtgggacacaaaccccaactgtaccccctatggtttcagaacagagctgtgccagacgaaaaaaagcatcctctgggtctgggttctgagctcgagccaggcttgctattagggcagggaggtgcccggtcaagtctactgccacctctcactctccccttcttccccaggctgctgttcctgctgccccgtgggctgtgccaagtgtgcccagggctgcgtctgcaaaggggcatcggagaagtgcagctgctgtgcctgatgtgggaacagctcttctcccagatgtaaatagaacaacctgcacaacctggatttttttaaaaatacaacactgagccatttgctgcatttcttttttatactaaatatgtgactgacaataaaaacaattttgactttaaaaaataagataaaaaaaaaagttttgcgtcgacgcggccggcaatt

SEQ ID NO: 45855 - DNA, 604 bp, Homo sapiens
  misc_feature (1)...(604): n = a,t,c or g
tctgtcgagcagcggacncggtctctgttccgcagatggggtttgttaaagttgttaagaataaggcctactttaagagataccaagtgaaatttagaagacgacgagagggtaaaactgattattatgctcggaaacgcttggtgatacaagataaaaataaatacaacacacccaaatacaggatgatagttcgtgtgacaaacagagatatcatttgtcagattgcttatgcccgtatagagggggatatgatagtctgcgcagcgtatgcacacgaactgccaaaatatggtgtgaaggttggcctgacaaattatgctgcagcatattgtactggcctgctgctggccccgcaggatggaggagatgtataagaaagctcatgctgctatacgagagaatccagtctatgaaaagaagcccaagaaagaagttaaaaagaagaggtggaaccgtcccaaaatgtcccttgctcagaagaaggatcgggtagctcaaaagaaggcaagcttcctcagagctcaggagcgggctgctgagagctaaacccagcaattttctatgattttttcagatatagataataaacttatgaacagca

SEQ ID NO: 45856 - DNA, 315 bp, Homo sapiens
aagagactgtgaaatacttagccatgcagaatatgtgaccagaccagagcatgtgtaggaagactttacagtaatcattaactctaccccgaaatgatggactacaagttataatgtgtgttacctacacttcaatcagtaatattagcaaatctccaaatgttagtcacattggtttgtctcccttgtacattctttattcatgatattacagtgctgtaactgggtggtcctttttaaacaaataataccctctgtttttaaagcttttgtaaataaaggcttcaaaatgttttcttataaaaaaaaaaaaaa

SEQ ID NO: 45857 - DNA, 3279 bp, Homo sapiens
  misc_feature (1)...(3279): n = a,t,c or g
aagcttaggagctgaagaccctggttcaatcccgggcccagagatcatttattctatggctttaggtaagctatttattgatacttctgtgggcctcagtttcattattggtaaaaattatttcattattggtaaaattaggacttaagtcctaatccttaagtcagaacagatccaattcttagagaaaaaggatatccagagagaactttctgcggtgtctgggacgcaggcagtgccacacgaatggcagctgtgagtaatattcctcctctctggaaatgattcccgggagggactagggcaacgagagccactccaggtctgagaacatggagaacttgagatcagtgcttttggaagtgtggtcaacacagtttgtcaccaaagagataagggtctggcacccaaagataaatgaatgatgttacgaagcacactgtttaggtcagttggcgtatttttccagagcaaggcttctcnnnnnnnnnnnnnnnnnnnnnnnnnnnnnnnnnnnnnnnnntnnnnnnnnnnnnnnnnnnnnnnnnnnnnnnnnnnnnnnnnnnnnnnnnnnnnnnnnnnnnnnnnnnnnnnnnnnnnnnnnnnnnnnnnnnnnnnnnnnnnnnnnnnnnnnnnnnnnnnnnnnnnnnnnnnnnnnnnnnnnnnnnnnnnnnnnnnnnnnnnnnnnnnnnnnnnnnnnnnnnnnnnnnnnnnnnnnnnnnnnnnnnnnnnnnnnnnnnnnnnnnnnnnnnnnnnnnnnnnnnnnnnnnnnnnnnnnnncccaaaagactttctggatgacggaagcagtgtctagattcacattctgaggcaaaacctttattttgtcgtggacaattccagtttgtggcccttccttagggaagcactgcttttgttcccgctgcatgtgctaacttccattcattcatggttctatccctttgtagccttcccttcacacttctcacttgcgtttcttccatctctgggcagactgttccaccaacaacccctcccaggctaagctgcggcgggagctcgacgaatccctccaggtcgctgagaggttgaccaggaaatacaacgagctgctaaagtcctaccagtggaagatgctcaacacctcctccttgctggagcagctgaacgagcagtttaactgggtgtcccggctggcaaacctcacgcaaggcgaagaccagtactatctgcgggtcaccacggtgagctgtgtcccggccacatgctgtggctcgggagcccgacgtgtgatcgggagcaggggcatgtgtgcttttgactgagcatttatcacacggcagaaaatagaaaactttaggcgcccctgttgccttgaagcctcatcacccactcagggaaaatataaccctgctttacaaaggagcaaagtaagagaggttccacagcttggccaaggtgtgatagctagacagatgacttggacgggtatttgaaccatgcatgcctggctgccaagcctgtattttgttgttgttgtttttgttttggtgcacaaatctgtgaataaaccagaagcctctgttcttttctcaaagctacaaggctgccctctggcatgtaaaatggcttatgaattagtacatcactctctgccagtgataaaaacttctctctannnnnnnnnnnnnnnnnnnnnnnnnnnnnnnnnnnnnnnnnnnnnnnnnnnnnnnnnnnnnnnnnnnnnnnnnnnnnnnnnnnnnnnnnnnnnnnnnnnnnnnnnnnnnnnnnnnnnnnnnnnnnnnnnnnnnnnnnnnnnnnnnnnnnnnnnnnnnnnnnnnnnnnnnnnnnnnnnnnnnnnnnnnnnnnnnnnnnnnnnnnnnnnnnnnnnnnnnnnnnnnnnnnnnnnnnnnnnnnnnnnnnnnnnnnnnnnnnnnnnnnnnnnnnnnnnnnnnnnnnnnnnnnnnnnnnnnnnnnnataataaaataaagttaaaaaatcaaataaaacttatttctagtactgggaactcttctttttcttttctttcttccctccaggccctctggattccttttctaccctactctgaccaagggctgcctaaagcaaatgtttggaaaccacttttattctttggggtgctccctgggctggtcatttgcagatgacatttgccccaacacatgagtgtctgtgaaccaggtccgttctgtccactgagctgtacttacgtctagatgtataagaagcatggggtcagctctctaggtttccttggaggagcaggaggacttccttatcagaagcctgacttctgttgcagagcgcatgcattttgaccacagtgtttcagctcttcccttttctcttgttccatttaggtggcttcccacacttctgactcggacgttccttccggtgtcactgaggtggtcgtgaagctctttgactctgatcccatcactgtgacggtccctgtagaagtctccaggaagaaccctaaatttatggagaccgtggcggagaaagcgctgcaggaataccgcaaaaagcaccggtaagcaggcgggcctttcctgcggcctgcagggcccagtgagtctctgggagccacaaaaaaacaaacaaagtgcagactctatagcctggtgggaacgactccgcccggagccagagcccaagaacaaagccaggaagttacgggggaattttatttttcctttggaggatgttttactttggaggataactgttttttatttcagggaggagtgagatgtggatgttgcttttgcacctacgggggcatctgagtccagctccccccaagatgagctgcagccccccagagagagctctgcacgtcaccaagtaaccaggccccagcctccaggcccccaactccgcccagcctctccccgctctggatcctgcactctaacactcgactctgctgctcatgggaagaacagaattgctcctgcatgcaactaattcaataaaactgtcttgtgagctgatcgcttggagggtcctctttttatgttgagttgctgcttcccggcatgccttcattttgctatggggggcaggcaggggggatggaaaataagtagaaacaaaaaagcagtggctaagatggtatagggactgtcataccagtgaagaataaaagggtgaagaataaaagggatatgatgacaaggttgatccacttcaagaattgcttgctttcaggaagagagatgtgtttcaacaagccaactaaaatatattgctgcaaatggaagctt

SEQ ID NO: 45858 - DNA, 937 bp, Homo sapiens
ttttttttttatgctaccatgcaacgaaacctttattaacattttgaacaggttcagctattactgaaacttgtaatttctaaacttaagttggggcaaatggctatagtgcagagtaatgccatcactgggcactgcgaatgccatgactgaagaattaacagccacccctcaggcgcaggaccaggtgcagggtcgactctttctggatgttgtagtcagaaagagtgcggccatcttccagctgcttgcctgcaaagatgagcctctgctggtcgggggggatgccttctttatcttggatcttggccttcacattttcgatggtgtcactgggctccacctccagagtgatggtcttgccggtcagggtcttcacgaagatctgcataccaccttttcagacgcaggaccaggtgcaggggtcgactccttctggatgttgtagtcagaaagagtgcggccatcttccagctgcttgcctgcaaagatgagcctctgctggtcgggagggatgccttctttatcctggatcttggccttcacattttcgatggtgtcactgggctccacttccagggtgatggtcttgccggtcagggtcttcacgaagatctgcataccacctctcagacgcaggaccaggtgcaggggtcgactccttctggatgttgtagtcagaaagagtacggccatcttccagctgcttgcctgcaaagatgagcctctgctggtcggggggaatgccttccttatcctggatcttggccttcacattttcgatggtgtcactgggctccacctcaacgggtgatggtcttgccggtaagggttttcacgaagatctgcattttgacctgttagcggataccaggatcctgccaatcaccaaccacgtccacccacagggacacaaacaagctcacccaacaaagcc

SEQ ID NO: 45859 - DNA, 2221 bp, Homo sapiens
ttttttttttttttttgggaatgcaacaactttattgaaaggaaagtgcaatgaaatttgttgaaaccttaaaaggggaaacttagacaccccccctcaagcgcaggaccaagtgcagagtggactctttctgggatgttgtagtcagacagggtgcgtccatcttcccagctgtttcccagcaaagatcaacctctgctgatcaggagggatgccttccttatcttggatctttgccttgacattctcgatggtgtcactgggctccacctcgagggtgatggtcttaccaagtcagggtcttcacgaagatctgcatcccacctctgagacggagcaccaggtgcaggggtggactcttttctgggatgttgtagtcagacagggtgcgtccatcttcccagctgtttcccagcaaagatcaacctctgctggtcaggagggatgccttccttgtcttggatctttgccttgacattctcaatggtgtcactcggctccacttcgagagtgatggtcttaccagtcagggtcttcacgaagatctgcatcccacctctaagacggagcaccagggtgcagggtggactctttctgggatgttgtagtcagacagggtgcgtccatcttccagctgtttcccagcaaagatcaacctctgctggtcaggagggatgccttccttgtcttggatctttgccttgacattctcaatggtgtcactcggctccacctcgagagtgatggtcttaccagtcagggtcttcacgaagatctgcatcccacctctaagacggagcaccaggtgcagggtggactcttttctggatgttgtagtcagacagggtgcgtccatcttccagctgtttcccagcaaagatcaacctctgctggtcaggagggatgccttccttgtcttggatctttgccttgacattctcaatggtgtcactcggctccacttcgagagtgatggtcttaccaagtcagggtcttcacgaagatctgcatcccacctctgagacggagcaccaggtgcaaggtggactctttctggatgttgtagtcagacagggtacgaccatcttccagctgttttccggcaaagatcaacctctgctggtcaggagggatgccttccttgtcttggatctttgccttgacattctcaatggtgtcactcggctccacttcgagggtgatggtcttaccagtcagggtcttcacgaagatctgcatcccacctctgagacggagcaccaggtgcaaggtggactctttctgggatgttgtagtcagacagggtgcgtccatcttccagctgtttcccagcaaagatcaacctctgctgatcaggagggatgccttccttgtcttggatctttgccttgacattctcaatggtgtcactcggctccacctcgagagtgatggtcttaccaagtcagggtcttcacgaagatctgcatcccacctctgagacggagtaccaggtgcaaggtggactctttctggatgttgtagtcagacagggtacgaccatcttccagctgttttccggcaaagatcaacctctgctgatcaggaggaatgccttccttatcttggatctttgccttgacattctcgatggtgtcactgggctccacctcgagggtgatggtcttaccagtcagggtcttcacgaagatctgcatcccacctctgagacggagcaccaggtgcagggtagactctttctggatgttgtagtcagacagggtgcgcccatcttccagctgctttccggcaaagatcaacctctgctggtcaggaggaatgccttccttgtcctggatctttgctttgacgttctcgatagtgtcactgggctcgacctcaagggtgatggtcttgccagtgagtgtcttcacgaagatttgcatcccacctctgagacggagcaccaggtgcagggtggactctttctggatgttgtagtcagacagggtgcgcccatcttccagctgttttccagcaaagatcagcctctgctggtcaggagggatgccttccttatcttggatctttgccttgacattctcgatggtgtcactgggctccacctcgagggtgatggtcttaccagtcagagtcttcacgaagatctgcattgtcaagtgacgatcacagcgatccacaaacaagaaccgcgacccaaatcccggctgcgacggaacta

SEQ ID NO: 45860 - DNA, 25672 bp, Homo sapiens
  misc_feature (1)...(25672): n = a,t,c or g
atatgttcttttggaaaaccaaacatgctttatttcatttttttcacaatttatttaaacatctcacatatacaaaataggtacaatttaatttttctgcttgcccaagaaacaaagcttctgtggaaccatggaagaagatgaaaatgagactggcaaagaacaaatgctgaatctgaagaagaggacaactttgggcaaataatctgcatacttttaattgggaataagatggaaaatatgaatgctaaatcaaatttttttaaaaaatacaccacacgatacaactcaatacaggagtatttcttctcaaattcttctagcaccatcaacattcttcaagtatctgaaatactattaattagcacctttgtattatgaacaaaacaaaacaaggacctcagttcatctctgtctaggtcagcacctaacaatgtggatcacactcatgggaaagtgttttgaggtagtttaaacctttggaagtttgggttttaaacttccctctgtggaagatattcaaaagccacaagtggtgcaaatgtttatggtttttatttttcaatttttattttggttttcttacaaaggttgacattttccataacaggtgtaagagtgttgaaaaaaaaattcaaatttttggggggagcgggggaaggagttaatgaaactgtattgcacaatgctctgatcaatccttctttttctcttttgcccacaatttaagcaagtagatgtgcagaagaaatggaaggattcagctttcagttaaaaaagaagaagaagaaatggcaaagagaaagttttttccaaatttctttcttttttaatttagattgagttcatttatttgaaacagactgggccaatgtccacaaagaattcctggtcagcaccaccgatgtccaaaggtgcaatatcaaggaagggcaggcgtgatggcttatttgttttgtattcaatgattgtctttcccccattcatttgtctttttctgtttaaagagaagaaaatagatacacaaagcatcactatttctgaatctgataatatctgaacctttgatttaataagaaccactgtttggcatgtgtcattctgaagatgtctgtcccagataaataagttcatccttgaaataacagtatcaagggtgtctttagtggtaggggctccctatcagtctaacaaaaaacaaacaaacaaacaaaccaaaaaaaccaacaacatttcaacacacattccaagtgacctatctctacaaagtcatttttaggattgttgtgtgtatgtccctctatgtgtgtctttgggagcgggacctgggtgggtatgtagtcttgctgttagtgaattttaatttttcttatatttatagcatattgtagaaaaagcattaaaagttaaatgtaggccatactaataagtaaaataaaatacacataactataaattatagtttaggccactgaagtctcaagaaattttaagttctgggcacacattaccatttaaaaaacatgctaaagaaaaaacaatgcatggacatagtatacatttcagcatttcagaaggcactatctgataagaatactctgaatttatcatctgaatttaagtacgaaattaatacgtataaataaataaatataaaatacatacaaaaactgaatttacttatgaaataagttagttctctcattcttctgttcttttaacccccctttagacccccccttgggggcagtctaagttagaaccccctccatcccacttcccaaagctattcccatatttcactattacttacagagcagccatctacaagaacagtgtaagtgaacctgctgttgccctcagcaacaagttcaacatcattagagccctgtagaatgacagcctttttcaggttgccagtctcctcatccatgtatgcaatgctgttcttgcagtggtaggtgatgttctgagaggcatagttggccagcaggcgcatgaaggcaagttgggtagccatttccttggaagtcactccttctacattatattcaaactacagaaaataggatgaaattccagttaagtggagaaggactcagatactaagagtcaaacatgaaaaaaaaaaaaaagaaaaaaaaagatctcaggaagagtagactcagatccaagcttaggaaaagggtacttttaaagaaaacttaattcacttgtctttgaagtatcagttacctagatgaacataagacctactagactgaggcaaggtcatctaaaaaagttatctgtttcaattaatcctttttgcatatgcttcttctttagaataagagaatgaggaggtagaaattctgacatttttctttttctgtcattttgtaatttatggaattccagtaggcattcagtaaagttggtgaaaaggtttgattaaaaattcagaaaagctgctcacattctgaaaatgcatatgtatgagtgtggcatatagctggccagtgctccttcacactaaatgacattagtcagttttttcaatgattaccaattaagtcaaatttgaataataactttgaattacatggatgtgtccaatcaatccatcttctaatgtgcaatttaggacaaaattggaacccaggaaaggaacaggtctttttttaataagcccatttttgtcagagattaaaatgcagataattaacaaacagtcctaccaaaatattatttagcagaaggagaggtgtttgtgggattcctcacctggctgccagcattgatagtttctcctagccagacgtgtttcttgtccttggagctcctataccagttcttggctgggatgttttcaggttgggcccggatacaggtttcgccagtagagaaatcacagtatactttgatagcatccatagtgcatccttggttagggtcaatccagtagtaaccttttaagaaaataacattcagatcatgaaacttctcattgagcagaacacagattctaataataactaatgaaagatactgactctcataagtaacatttttgattgtctaccccatatttaagaggaagagggtggctatttttaagattagacagttccttccctcccctcctccatgaaaaatcaaatcagggtacttattactatgaaaagtgcaaaaatacattttaagggaaatgaggttgggtgctggttgggagaagatgacgctccattaattgggtgtgatttcacataatgtaatctttacccaaatgcattttcactctaaatgtcaatggaaactaattttgaaaagctcaacttgtgagaagggtcagtctggtctggacatcttgacctaccactgctccactctgggtggctgagtctcaagtcacggcatgtgcgagctgggttctttctagagccttcaggagtaagaagggtctcaatctggttgttgagagacttcagagtagcatcaacttcatagtccttgggtctgagagaaggtgctgagcgaggctggtcagccctgtagaagtctccatcgtaaccaaagtcataaccaccaccgcttacacctggaggtccaggagggccagggggaccaggggggccctgcaaaggtgaaagtgagataggagaggctttatattttgttacagtgagagacatccatggcagcagattttcagttgagcttcacacggaagcatgttctcatcagtaaaaaataatcaagttcacataaataaataacgagcccccaggcacacttgcagggatggacttaacaagcccattgcatatagacaatttccagatattttagaggatatattgaaatggggctaactttaatgggttgtcaaagttgtcttggtttagtctgaagaaaacattccttaggtccgtgatcttctttattatttccccaaatcatacttacagcagggccttggtgaccctgagggcctcgaatgccagcaggtccaactgtaccaggatgtccagtgcgaccatcttttccagcagggccagaaggaccagcagggccctaaggaagacagacaccaggtacatgtgagctggtgaatcccaccaagggagcagcagcctggggctcactgctcgctttagcctctatttcagagatgaactgtcttctcttgagtccacctaccctaggaccagcaggacccacggagccaggagcaccttgatcaccatggtgaccctttaaagacagaagaggaaaatcacactttcagagcacatgtcaagagacatattttttttttttttccaaattgaatgggaaactttagttaaatggactccggattgagaaaattgaaaatgtaaagtggggctcttttctcccattatgtctattatattcaatttttttttcacaacctatttcagcagtgcaatattagtcattcctctaattatgtttattttaagtggggttgaaggacattgttaccaggagattttattgtatgtctatttctatctcccttaatcctcacctttcatgttggtatgaaatagcattacctccaagagtgagatggagttagccagagaatgggaaatggatattatataggctatactggaacaatagcagtgaaaatatgaaaatccttctgagctgaaggccttcaggatcagtttatgtgcgagatggctacagtttacttannnnnnnnnnnnnnnnnnnnnnnnnnnnnnnnnnnnnnnnnnnnnnnnnnnnnnnnnnnnnnnnnnnnnnnnnnnnnnnnnnnnnnnnnnnnnnnnnnnnnnnnnnnnnctataaagaaacagaaggatggataagacttaccgttttaaaaaaatggcactcacttcaccacaaatactgcttaattcgtttacaaaggtaactcaggacatgtaatggtttagctaggctctcacctctgctggtaatctgctttagttgtgctatctgtaaagtggctagatccttgtaattgtttaatacaaacaagcataagagatttaaaatagctcaagttatttgtatcaattctcagcatggactgaaatttttaaaaaatattaagtctagctgatatattgtttattttcttaacagatgttttggactgattctctctaaatgttagtgttgcaaagaaatcttcagcatgtacatacactagnnnnnnnnnnnnnnnnnnnnnnnnnnnnnnnnnnnnnnnnnnnnnnnnnctgtgaaatgaaaaagaaaaacacaacttagctaggcccaagatacccctccccactcctccaccatccccaagtgtggggaagtcagaagtgaagcccacgagaatgctgcactgagggactggtattcacaaacttacagtttcaccacggtttccatgtttgccagcaggacccacggggccatgaggaccaggtgcacctgcagcaccaacgggaccaatattgccagggtaaccgcgctctccctaccaaaggcaaaatgaagcttagcatcaatctgggttgcattttaatcacttttgaattagagaaagatgaaaagtgtactgaccttgtgtccgggttgaccatcgcgacctgggggaccatcgttcccagggttgccctgtgaagacaccacacaaattaaggctgttggtgaggctctgctgcctaccagcccctatgttgtagctactctgtcttcatcacttccagtgctcagtaacgaaccctctttcagactgttaaaactagggataaaaacctgccaacctagatattttttagagatgttttaaatacttgggcccagttttgcagtgtgctattgaaaagcccattctttggcctaagcaattttcatattttcagtactaggtgtagatactatggagaagctgaccatcttgttcagaaatttggaagaagagaacctcagctcaggacataaagtttcacacaatgaaatcctgctcagttttattttacaaaccaagtgttggactcacatcacgaccagcttcaccaggagcaccgttgactccaggactacccacagcaccaggaggaccacgggccccaggagggccggcaatgccaagaggaccaggttcaccctaaacaggcagagaagataaaatgacattccccttattcgatggaatgctaaccttcccctccaaaacaaccctactcaggagattctagtttgaaggaagaaggtaaattgaatgtgaatgggtcacacaatggtaagaagtatcattagtatcatctctgccctccttctccacatgtagatggccagctttatgtaatcacgggatgttgctctgtaaaaagtgagcctcgtgtcattcagtatcccaaatgaaatgaattcaaaaagttgatatattttatggagatgagatggtttctagttgttgtcacgtataaggtttaatggaacgattcagaacttccagagtttcattcttcctacaggataaatgatgccagcatttcatattgcagaggagtaaacgcaattagagattgtatcattcctaagtgcgtggaaagaacaaaaatcattctgcataattttaagctgtgtctttatagtgtgtgtctaagtaaggtggtattaaagcttcttagataagtgacatgtgatctgtataaagaaaatgccatgaataaaaatcttaagtgaagttattcagtgatcaatctgtcacatttgaagtggcagcttttaaaatcttttcttatgttaatggagtcagaatactgtcaagcactcaccacagcaccagcaacacctggtagaccacgttcacctctcgagccagggagacccagaataccaggagcaccaagaagaccctgaggacctggagtgccaggaggtccctaaatagagaaaaaatactgagtattatgggtaagaccctaggtgataacacaggttggcttgaagattgtgagaataaactgtcttcagcttagaaaaaggctaatgacctcctattactaggacatatccttggatatcttttctctagtgatgacggtgagtttacatcttggcatgaatacttttgtatctgattcatccttgagaccaatggcacaacatttaaaaatatgtggttgagatttataaagacacttggggtggtgaaatagagtttttatagcctctaggcagggaaacaaataaaaaaatttaaattgttatggatacataatagttgtacatagtaggaggnnnnnnnnnnnnnnnnnnnnnnnnnnnnnnnnnnnnnnnnnnnnnnnnnnnnnnnnnnnnnnnnnnnnnnnnnnnnnnnnnnnnnnnnnnnnnnnnnnnnnnnnnnnnnnnnnnnnnnnnnnnnnnnnnnnnnnnnnnnnnnnnnnnnnnnnnnnnnnnnnnnnnnnnnnnnnnnnnnnnnnnnnnnnnnnnnnnnnnnnnnnnnnnnnnnnnnnnnnnnnnnnnnnnnnnnnnnnnnnnnnnnnnnnnnnnnnnnnnnnnnnnnnnnnnnnnnnnnnnnnnnnnnnnnnnnnnnnnnnnnnnnnnnnnnnnnnnnnnnnnnnnnnnnnnnnnnnnnnnnnnnnnnnnnnnnnnnnnnnnnnnnnnnnnnnnnnnnnnnnnnnnnnnnnnnnnnaacaaaaacaaaaaggaaatcagtaaaatcagtatatcaaaaggaagcaaattttgactttggcctctaaggtctaataggggcacctttcagagtagcactaatactggacagtgtatgtttaagaaattggtagcctactgagattgattaatatgtagtaggatggccacagcaatgggactctgttctaatcctggtaccagtaaggtgccttcaatagctttaagggctttgtgataaaactgagttccctcatttattgtcttcccgattttgtgctttctgagcatcttggaagccacagcccctcagtgtgtgctggacagatttcctggctcaactgagctctacttgagagcctgcaatactcatcaacaaatagatgccacttgaagatttgtgtaggggctttattttaattcagcataaggtattaagaaagaggagttggaaatcacttacagcagtaccagcctctccagagggacccttctcaccagcgaagccagggggaccaactgcacctacttctccagttcggccaactggaccttggtcaccacgaggaccacgaagcccttctttcccagcaggaccagggggaccaggagggccagaaataccctatgagcaaatgtacaaggtcatttcctttctgttaatcaccaagggcctggaagagagcagcaaagattctagatcttaagatgcaaacaatgtgatgcaataaaataataccctggccatttgggggaaatatttatagtttttaaccttctttcttgcagaaagaagcaactcctgtcttcctttatgaggctgtaaccaaccaaataatggaggagagactatggcaaatttctatgaggaaaaacaatgtcatgccactggtaccctggcatattggaatcagaactatgtagaatgataggagttaatgataaatgaatgggactctgagtttcgaaggactttgccttttcttttttcttctttttttttttttttaaagaaagccaatatacgtgttttgttcataattgaggaatcccacacacttctcaactaggtttaattaaatgcctacagggaatgaagatttttctgttatgaacctgtaaaaggattccaagaaatcaacatctttgctatttttttttcccagaaaccttaaccagaagacttaatccttggtaattaattaaattttcttgagtcctgacaggagagtctgaatcagaattaaattagaggccaaaccacctttaaattcaggaacaattataccttaacaatggaggcagaatgttagccataaaggataattagatatagaaatatctgatatgtggctaaaactgttcgtttttttgtttttttttttcaaaaagaccatgcccctgaaaggggactggtgttcacatgaataaaagcctcttaaactgatattataaaatataacttgtgatgaaataccttaatggttcagaaaagctgacttcagaccaggagagtaatagcgaatattagtgatgtgttttcatgaagagtttcttaccagtttcctatcagaagccaggccttttggctagagtaaatgaagacacgtttacagtgatttacttacagagggtcctgggggaccagtccgtccagcagcaccagggaaaccagtcataccctaagagccaagcacattagaattccacagtcaacatcaactccaagaatttgggtaagatgggaatttctttgttttggaaaatcagtacatgtgaccaggaatagaccaaggagtaggaggtaggcagcttcatatagggcattatttagccaggaccctgaaggccctccttctccacacatcttccttaccagcatattaccagttgcaatgcccatattttgcgttaaggtttggatggtcctttctgaaatgctgacatattatcttatggttgtaaaggtatgaagataagacactatgtcattattacacattaatgtgtatacattaataactatctttaccacctggctgagtggtaaggaaatggacacttaataggtaatggtgttcatggacaaaagaataacaaatgacctagataattcagcactgtccagtgagagaagaagtcagtaaagttcatttttggggagctctgggtctctagagaattgttgtgatagcattgcctgcaaaggagaaggacatggtcaggcagaagaaggggcatattaataaacgccaaaaggaatattttttccgactttacaattaaactgcctagggcccaccttggttattacctcaagtgagctgatagcaacatacactgagttccagctgagttcaagttaacatcaatatcggaattgctctgaatagaatgaacttgaatctcaaaagtttcctcatggtagtccaaatttaccaaaaatttcaaaactttcaagtgtccttaatagattctgaaaaaagaaaagcggcgagagtccattgtaaatactcacaggggggcctccatcaccacgacttccagcaggaccggggggaccatttggaccctaaatgcaaacaaaaagatggagtcaaatcacaaacaaacccttgtaaatgctactcttttcttcaagtggatcattcccgcatctcttagaagaaaatatagaaataaaaaatgactatctgtgtcagaatgttcttcaatattaccacccttatgaggttatcagagaattaaaataaaacaatattcatgaaacttttatactttgtaaagcagtgtgcaaatgttaatccttccgttattttccatcttctatctggtatattccctgttgcatagcaggcacttgacggatatatatttaattggaagatctaatgggtagctgctgtgtggaccaccagtgaattcaacttacagctgggccagcagctccaacggggcctgtgggaccaacaacaccgttttcacccttaggccctttggctcctctttctcctttagcaccaggttgaccagcagcaccctgttggaaataaacagttacagctctggtattccgacccactctactccccaacttaggatgttttcagattaatcttcattatgtgatactcacagcaggaccagcaaatccattggggccagcaggaccgacctcaccacgttcaccctaggtgggagaagggatttaaaaatgtgttatcaatcctaggttcatcaatgtctaaacattgtgaggtgtgagtatacaaaatgacccaggttcttacttacagggcttccccgaggaccagcaggaccagcaggaccagcagccccagcttcgccctataatgggaccaaagatgaatctgttaatgtgcctgacatagatgctcaaagaactgggagggagagagaacagtggtggacagacagagtctgtagttgccttggaagagataactgacgcacatctcacagagtaaaatgaagtggatttttacttaatgctatattcattttgggggttaagtagtatgggttatacacttgagaaaacactataaatcagtgcctacaataccaggaggaggacattttaatttttagatggacacggggctgatctatttgtggcaatctttgcaatacaataaataagatctattttaagtggagagttcaatgtgaaatgggcacactatgtattttattgattttttggtaataattgaaggctttgagaagcctcagtgcattaggatattgttaatgcgcaacatggagagactttaaaacaaatgctagggattagagtatagatcagatagctggcaaatctataggaagggaaaagtaattttaaacacacagcatttgtttcctgctgctctatcacaatagctaggtttttaaataagtaggctttataccaagccataaaaatgaattgctggggctctttgggactagggaaggcgggaaattttagatattgctgttggcttagtgaaaatgcatgcttacccggtcacctgtggctccagcaggaccaggggcacctacagcaccaggagcaccctagtaccaaaaaggaaacatgtcttattaataacaccccgtatcatcaaaagtgaaccttgtcattctttttttctgtgcttatacagtgactgaacactttcactgcactctggttggatatctagaaggcctctgatgtattttggttctaattaacaagactattagaagccactctcagaaggagggtactccagtaataaaggttatggaaatgtgtaagtcaatagcaggtcagaaatttgggagatctgaactttccgctattgtaaaattccctggagagcagcaaatgagtagccttgtttgaaactgttagaactacgtgattcaaaagaaagactattacagatgtgctacagtcagttttcagctctgaaggagaggtgaataaaggaatccaggccgactgtggcctagaagacccatgaggctgacatacgagataaggtaattagactgtcatgggattatctttggcatcttcatggcattaacagctaatctttggggctgctctttgggtgataaatttctagggagtaggtttgaataactatagaatcttgttagaggtcccggcttcctaaagcataggagacttatttatttatttattttaatctctgttatcacttgaagcaatcatttaatattctattaaacctaaagcttttggtctatagtttgtagttggtatcattgacactagggaagttagaaaattcaggatattattttcaaagaggttaaatcccatttaatttttcctttggaacatgtaaaatgatattattagtcatagacccaggagagaaaggaatattattttattaaacttgataaataaagtgtgtgtagttctaatttggaaaacttctcaattcaaacataaaaaaaaaatccaagtacgaagaaacatacaaacaaaattctactcacacgagcaccatctctgccagggttaccaatttcacctctgagaccaggttcaccctgaaagtataaagcaagagcaactttttgttttctgaccaaaattttgaatcgaaattaatatgaagtttttttcttttttacagaagatgctatgataccttcagtcatttaagatttttagcaatgtctcgattccttaccattctgtagaatgttaatcgagaaaaataatgaggaaaaaataattcaaggccatttccagattattgttaaacaatcttttctaatttccgtacactctcctgaagcataatcaagcaaggtacagattcatgtggacagaattgtaaggcaacatcacaatgggctgcagcgcctgatcactcttacggcataactaatgcagcagcatggttgacagctgttcaatgtagcttcttcccattaattaggacaggatgaggcattattgttagtggcattaaaatgagcctcatgtattactcaacaccatctgtttgtgtgaaattccatggtagcaaggaattttgccagattagtgagtttagaaatgtgtaggtgctaggtggcagagggaaatgtatatagatagatatgaaaatgctaccagaccacctgccaagaattgtgaaaacttgggcatccttgtgcagccttctttactagagttcatcaacaatatgtaataggggtcaacacgtaccttttctcccttgcctccaggtatgccagcagcacccctctctcctgggagtccactaggaccagatggaccagcagtgcccacagcaccaaccacaccaggttcacccttgagtcaaacacatgtgaaatcaattttagtggagaaagaagaaaatgaagaatcaaactctagaagaattccaatttaaacagctagctagacaggcttcttgcctgctttgaaacacaaagaaggctgggctattgaaaggagggagaatatagcagagagagatgctgttaatgacatggtgactgaagagatgagggtagtgggagtgcacagctgcgattcctctataacctgcttcagtcctcttaaggatggcaggcatggagaagaggataggacaatgggaagcagagagtaaaaaatgtttacccacaaacatttttcaaggataagtctcttagcccagatagaaagcatggaaagagaccttgtcaattgaggagatgtttgtgttttaatctccttaagagtagagactgtatcttccatttttatataaaaccctacaattccacatacttaaaacctgttgactagcttctgagatacatagatccctttgaaagtactacctcacaaaaccgtggtttctttatttcctctctcccttttatgtttttatttttttcccaagaacatccttccatacactaaaatagctttttgcaactaatgtttacattttttcccctagagttaagaatgaaaataatatgtgttgtcttctttttattgtggttaaggtaatctctttttcaggaatgtatattaaatctattttaaaatctaaaccacagattctattttggaacacaagtttccagacaaatttttgggggtgaatgtattgcccaatgaattttcatcatcataaactcttattattaaaagtcagactacttgttgaaattttactctatgggatgagatgttaagataaaaagttattttctctgaaaataatgtccaatgaatacaatgtttctagattaaaacaaaagcataaacagcgtgaggagaaaagagtgacaacccatactaattcatttatgttttgggaactctgaattttcccccacagtttgttgctattgtttgtttgtttagaataattcaggtccactggaatcggattgctgtttactgagagggaagtcatcacagaactggaaataaataaaaatctgaaaaacaattatctttctattgtaaagggtctacttattccaggcagactgggccaaaccagcaatatagaaaacataagattttaccttgtttccatcaggccctgggggtccagaaggacctcggcttccaataggaccagtaggaccggcagcaccactctcacctgggggaccgcgttccccctgaaaaaagtgattagaagaagtgttgcaccattcatcactttcagtgatactgttttacatatgagagtttacatttgtgtagcttccgagccctggtttgcatttattagcaaattaaaatttcttttgttcctaatctctccactagtaaaatgaagagattgatgagatattctctaaagtgtcacttagctctaatgttccatgactacgactccagaattcgttgcttctagagtataatattcaatttttgcaattcattccccttctttgaggagtcttttctgtgataaatccataggtaaaaacagatgccagttatgtgtagtattcaaagaaaagattgtgtcattttagttgaatagcaatggcaggtgtagataacattagatattctcctatctatgccccctttttataaccctgtgtaataatgatataacagttacaatattcatatgtatatttgatatatgtatttgtgtatatatatatatgtctgtctatctaaatatctcccaatttacatctaaatatcactagagcatagcattctatagcccaaaatatttatcacataggtccacgttgtaactgtttcaaaggaccttgttataagttggttctttgagcttcctacatatgtgttaactagtgacatgatggaatactttcagggcaaattaatcatttcagtgatgctaatacccatagagaaactaagtttttttttctttatatgactactcataagttcggctttaggctttgaacatcaacacacatggccaaaattaactttatatcttagtaacatattatttttccttagctcaagttgagccactgtcacaaatgtagcatagttgtctatataaatcactgactataatatatattgatttatgtgtttcttataactatgtaattattgaataggaaatatgagcaatgaaacaaaaaattctactatcaacttagaaatctaatgctttctacagattacatttgactatagaagagcatcagagacttgttgcagggtcatcagtggctttaaggagaaagcactactacttttaaaaacacattgccagagtttatgaaagttaatgaagtaacacttactcttggaccagcaggaccagggagaccaaactcaccatggagaccctagacaaaacatgagaataaagcatgaaatctgtgtgtgatctctaaattcacttatgattaaaatatttgaaaaatttggaaagagtgaaataaacctggcagtatctacatgagtgcataagtacacaggctaataagaacaacttttagtatggaaagatacagaaagagagaattttattggtgacaaaaatgtatccatcccagaacttggtatcaaaaaatttgtttcccattatttagtttattgctttttaaaaagtgacagactatttccttcaataataagataaataataatgaatattagacattgcctatttttagctgtataacagatcgtcttcttaagagaaattatcatattctgtacattgcctagttaattgtatacccaagtgtatctcttttattactgaccagctgtctccttaatatgtcctactgttgacaaaggagaccaggccacagaatgtaactaaataggggcacattcatcacaattagagagaaaatgactcagaactcatgccctgattgtgtatagtagtgtcatgtctgaatgccaagaaaaacacaaaaggaatttttcgggatctagtttgattgaaaattgtgcatttactttttcactatggggaaggaaataatttgtatcttaacgttatcaagaacaatacaaaaagtaaggctattaaataaaatattcattgatagattttactttcataaggtgatgtttcattaaatctgtaaaacaaagtaatcagaactaaagtaatttggctcattctctccatcagcaccaaagtatgtaaaacactatcattaacatatgaaatacgaaattttcttttacatattataattgcatagcagtggggtattaaacagggggaaattctcaagtttagtagttactacttactattacttgttttactcaccctttctcctggtttgccaacttcaccagcgggacctgaggggccaggcagaccctaaaaatgaaaagaaatacaaatctcaatcccatggctacgttcaggagatttgctaataattgagtttgggggtggtggctaccaaatatcaacatgagcacgattgtatgttattaagcattacacaaaagtttgtttgaaaaaaatgcacctttctttgcttcagtcctgaaatcatgtttattgtggtggagaagagaggtacggtatggtgatttacagctcaataggctgaccaaaggcagtattgtatatgtttgagttgacttacctggaagcctggaggaccagggggaccctgttcaccttttccaccttgaacaccctgaaagtgacaggaaagagagcataaatagcaacgtatgtcaccactgttgtctagctgtataacttttggactgaaaatggagatggccagtttgaggactatatacattctagtgcagaagagcacaagagtgggagaaatactcacctgtggtccaggaggtccctgagcaccattgtttccatcaggacctggagcaccctaaaaatatttaacagaaaggctgatggttagctgcaagccaggtagtttaagatgtctcaaagcctcaggtattacttccttaaaacaagtttgtcattttagcatgaattaaactcattgtgggttcccacgaaagcccaaatactgcctactaactttttaaatnnnnnnnnnnnnnnnnnnnnnnnnnnnnnnnnnnnnnnnnnnntttgcctactaacttttgatatgactcaagcgaagtatgcgacacaaggcaatttataaaggccagagaatgctactacatattcatacccttttaattacaaaatgaataaaataaaagccaagtgcttctgtatttttgacctaatgtatattctgatttgtttttgctcactgttttataagtttggtttttaaaaaggcattttatgatagtaaaaggacccctggggatgccatcttgaaaagaaagtgacaaaatgatatcagatggtgtaaaaaaaaaagtgtggttcttagatgaatgctatgtgaatagatctgtacacaagttagcacctacccgagcaccagcaagaccagcatgacctttatcaccgtttttgccaggatcaccctagagtaaaaatgaaaaacaaaacaaagaacagctttgcacatttaatgtcaaattaaccacggtgattttgcaatgttgaatcctgcttgtttttgtgttcttttgagatccctagtctgtggtttctgttatctaaggatgatccatcaccatgcagctccatgtacagtaagatgtccctgtgtctgtggaagcatggggctcaggagatggatttttagcagggatataaggatacactagaggtaaacttttaatgtgataagtggcctgcagttttcctgtgttgaaaggaaactccctgagactggactgattcgcaggagataaatactagagtttggtaaaatttggctacagaaagtgctgagggtaagaaagttgtggtgattcttacagtggggcctttgggtccagggaatccaatgttgccaggctctcctcttgctccagctgggccaattgggccaggcctgccgtcgatgccagggaggccctgaaagcagagttatttcaagtttactcagtgtcaacatattctcacaacctcaagcttatgatgctgccacggatgaaacagaatagttttctgaatgcatagagcttcttgtataaagcgttaataaattatgaatccattttccttttctaactaggatgtcagtacacacatagccaattcaatctcgtatgtatgcaatttccctcattcccttctcttgcatccccttgtcacctgcttcaattttccctgccatgtttttctctcccctgctctgctttcagtcctgtattcatttggactccataattacaatctattactctgcattcccagatgatgtatgtgtctgatatttattttcaatgtgttcatgtataaataagccacaaaatagacttgataagggtgcaataagtgtccttgaaaatataatggaaaatgagcaatacttacgacaggaccttcttttccagcggggccgatatttccaggggaaccaggaagaccctataaaataaatgaggatgtttttatattggcactttaacttacatactcaagccttagattaactgaagtctaacaaaggcaccttttcccccgactttttgtttgttgcctagggtaaatcattaggaatattagccactagctgggaagtgtgaaaagagttctgaaatttttcttctatttttttgtggctttccttttattgaaatttagtgcaactcatccttttatagatatctcaagaaactgttaagcaacatgtatatgggcaaaatgtatcacgttatttacctcataatagaaaaactaatacttttagtaaacaatttccaaagtggatttcttattgctatatttggtgtccctattacttgtttatggtacaattacagttgatattcacccataagaggcaatggaggcaaaaaaattactctattgctatggattagtgtgtctatggacctagaggttatttctccatagctagtgtgatgctgaatacattacagcactttgtgattgctaggaaaaagacttcacttatgaatctaataaaccaaaaatgtatagtcctaatatatttcatgaacaccttatataaaactcacaaattaagataaaagattcatgctgataggaggaccaatctaatttggatatattaaaatagatctattcttccaaaaacctcatagccattgtatcaagtaataaatagaaaatttatgaactaattaaatgcatgaaaatatctactgagctttgataaagtcaaaaatgcaactgtcagcaagactactaacaaatttacttttgatgtttttattgttatcttcaatattaaccaaccctttaaagaaggaagtaatgccaggtgtgatttgctcagaatcagtttgaaacttactctgggtcccatgagaccaggctccccagggcgaccagcatctccattaggtcctcggactccagcagggccacttgcaccacgactaccaggagggccctattcaaaaaaaaaaaaaaaacagatagaggaggaggatgctaaagctaatgacacacccaccaccagaagcagcaagcccctttctaggaagtaagtgatagacagcttaccatgacgccagctctgccatcagctccaggaagaccacgagaaccaggactaccctgcaagaaagtacatgaaatagagagaattaaagaaatctcttggctttgataaggtagagtttgtaaaaaatagcatgatctccttacaggggagatacagacacaaaccaagccaaaacacttcacccaacccctagaggaattcatagatgagcatcctgcaaaagtaggtcaacattgtttccaggccaattttataacatattaaattgagagtcactgatttaataaggcagatggaaagcagatgctttttttgcctaagaaaacacagtcagtaattttgaccaattcccagtgaaggggtatcataatctgcctctggtgtgttagggtgttgggagcatttgaaacctactctcagcccaggaggtcctggagggccggcagatccagcttccccattagggcctctctttccttcttcaccactgggaccaggaggaccttggggcccagcagagccctgtttaatgaaaagaacaaaagaagagggagtaaaaaaataattttaatactatgtccagctggagaaactggaatgagaaaaacaattaactttataaaagtgtgatgatagagctacttacgggctcacccttgttaccgctctctcctttggagccagctggaccaggctcaccctagggttcaatacagaacagtggtcaaaggacaaacatttgttgaaactctcttgcagacaaatctcttagaatatttgtgggtcaaggtaaagagaagctcaagttctctaggaaatgtaccctgttcatatttaaattgagtacaggggaatggtattattggtcgaagggacaaaactgatattgtagaactttgcctcatttaccttgaggtaatgatttaagataacaggaagggcatgtctgtgtgcatatagcagacgggagtgtacatatatatataagaaatataaactaaaaatgctaaggaagagaaaaataggaataataaaactacaagtggaagtctagatagtgatgaaatgatggcagaggtggtatttcaggatgatgagaaccacagtcatgaccacttacaacaagtcctctggcaccagtagcaccggcagcaccaacagggccaggaataccgcggggtccagggaggccgggagccccagcaacgccgggaaggccctgtgaaggaaaatgcagtgtggtccattagggaggtgatgggctgtagaggcagcacacattaaatgcctttaaaatcatagcagcacattttagctacgcaggtatactcacagcagcacccttggcaccagtaaggccgtttgctccaggattaccctatgaggaaaaggaaaggagaaggatatcagttaattggaatatttcggttcttctttgaccccatcttcattcttcttcttccccatactccacctttgttttcttttactcaataaagtttaaagacagtggctacttacaggaggtccaacggggccggagaggcctggaagacccacttcaccacggggaccggcgggaccagcaggaccagcgttaccaacagctccaatttcaccctaaaagaggaaattaaaccaaggaattaaccagcaaataatgaaacagcatatctgtttttaagatgccaagttttatgaaatgtcttcataaaacttcaaaattgcaattatttttcttatccgttttattacaagatttgagtttggtttcctattttccttgcttgattctgccatcttggctactgttactaccttccctctccttctgtctctctgtggttgactctggttctcagtcagtcctaactaactagtcctagagacaatttccatgttgtcatctatatcgatgggcacagtgcacagtgcagagaaatgatctatttcaaatgtagagtgagaaaactggtcattctatgtccattttgaagggaaggaataattaaggtaactgtttcgtaattatctctttatctgcaaacacagttccaatctttcacatcacagtaaaaagtttatcaaagtagtgacaatggtcaccagtgtttttaccttggggccaggggcacctgggaagcctggagggccagcagacccaatgggaccctgaaatcaaagcagaaggtggtaagaaatttcctccaagtaaattaagaaaacaataacaatggcagaagattgaagttgcttacagtggcatgacactgtttatattagtaaagaaaaaaactgacaaccagtctgttgtcgttaggatctcatcaaaggcaagacattcatggtatccagggtggggatattttgctttatacatcaatcaaaagttcaggtacttataaatggcttacactacttataaatggagccttcaaaagacctcacagaacatttggtaaagtgtctgaaatgatgctatttcgtaagagattaatgaagaagacagcacccaccccacattctcaactcctttcaaactccccagtgtcaaaacttacagcaggacccacgggacccacacttccatcactgccacgggcaccctaagaagaaaataaagggaagatcaggtggaaacttaaatgacagccattagaagattttttaaaaggatgaaactgaacaaaaatggaagcacttacagctgggccaggggcaccaacacgtcctctctcaccaggaagcccacgggctccctagaagcagaaatattttcaataaaatccagaatgctaatttaaaaaaagtcacaggcatcatttgctttgttcagtttccaacctgtacaagaatacactaaaaataaataagttgccttctaattccaactaaacagtagtggatttcaattaagtatcagaaggctattagaaaaacatcaaagaatacaatgctgaaggatacagtgattagcaaaaacattaaagaagttccatctcataaagagtgtacacatttaaatttacaatgaagtagtcaatacttactgtttgacctggagttccattttcaccaggggcaccaggttcaccctacatggagaaggattgagtttttgttcattaaatataacaattatttttcctgatagtgcaattttactctattttttttactttgaaccattcatatacttcataatatttcttacacatatagattgtttttcaattatgccagacacacagattttaaaatgtgctaacatgagtttttattcagatagtaccacatatccaggttctaaggagatgtggttatttgagtgtacctcctccccaatttctcccttagattcaggatatcaattatatactagaaacaatatcataaaaagagatggcaaaggataaatttgctttcaatgtaaccatatttatcctttttaaagttattttgaacactcagtgttatcactttcataaaatgtgcatgaaaaattgaagcttcatggtattttttagagccatcatatttatttccaatctatattcttatcctgagtaaaaaccagggtagtagtagtagtagtagtgggatttaatactatggcacatgtaaaagaactttttttaaagataatctgatttagatataggggaaatatggtttaagagacctcataaggacccttaatttccaggattctatgtgaagtctattctttgggaataagcattgaagtggcaaggggggatcatttctagcctatgactttctaacctctagatgtgtgactttgggcaagtcaattgctctcacgaagcctcagtttcccacctctgcaaaatgagggggtctccaaagctccttgcagctctaacattttatgatacagtgattagtagtctgagctgttatatcgggctcttgggagaatgagtttgaccttatccatttgtgtggcagctggaaagttagaatagattctccatattcatgttcatttctggtcccgctagtattcgttactcattaatttgtaattacgttggtattcactttaatatcacattatctccttaataggaaagagaacattttatagttgaaaacgctgtcagagaagagcctagccaagagataacacacttctgagactttaattacctaattaaaatttttttgagtgtgcacagataaatcacaggaaagaggttgaaaagtgtatagcgacatgaatgtacctatctaattagtgtgtggcaaaggagaatttacagtttaaaataatacagagtgtcgtaatctctgattatatgtttatttacttttattttggctgcagagatacactggaattatagagggaggaaaggaaatggaacaagaaactattaatattatttttatctcaattgtttaatagatattgaattttaataaatattaataattgaccttttttcacagactctcatagtccccatccttgagggatttgaagtacaggaaagaaaaaaaataaaaatactttttgtaatatgggtagtcttcagtataatatacttttttggaggtcatggggaatttcaatcaagtgcttaaaaacagtgcttctaatttaatatttaccttcacaccaggagcaccgggctgtcccttcaatccatccagaccattgtgtccctgaaaggaaagccttattataaaatgctgttccatgatagtgtttggtcaaataaaaattgtattgtatatctttgccattaatctctcttgggtaagtcttgtctgctgcagtagaaagaagtccagtgttccaggtcccagcaaactcagtctattgccctagataggtcacttaactttcttgccattgagagagaaggatggaggactaggtgttctctcacatcttttccatccttaataattttatgattttcagacggttgtaaatactcaataagtaatacatgttctatataattttctctgtagtgagcctgttttttggtagctatgaacagactgaaaaaattgcaccccactttactttcaagaaatctgactctttaactctttcttccctttggcaaactccagggatttgaaagtgagtatatgtcacccaagattttaaacatacttgagttttttccaaaaattaataggcattttctctcttctgagtaaagaatgtgctcaccctaatgcctttgaagccaggaagtccaggagttccagggaaaccacgagcacccttagaaagaaatacagaagatggtgaataatgttttaccataaataaaaagacagtgacttcttccctccaaagtatttattctcatcaaagttcaagctt

SEQ ID NO: 45861 - DNA, 1650 bp, Homo sapiens
gacgccgcccgaccctgcgactacgctgcggactcccgcccgctcccgctcgctcccgcggtcctcgctcgcctcgcgccggtagttttgggcctacacctcccctccccccgccagccgccaaagacttgaccacgtaacgagcccaactcccccgaacgccgcccgccgctcgccatggatgccggtgtgactgaaagtggactaaatgtgactctcaccattcggcttcttatgcacggaaaggaagtaggaagcatcattgggaagaaaggggagtcggttaagaggatccgcgaggagagtggcgcgcggatcaacatctcggaggggaattgtccggagagaatcatcactctgaccggccccaccaatgccatctttaaggctttcgctatgatcatcgacaagctggaggaagatatcaacagctccatgaccaacagtaccgcggccagcaggcccccggtcaccctgaggctggtggtgccggccacccagtgcggctccctgattgggaaaggcgggtgtaagatcaaagagatccgcgagagtacgggggcgcaggtccaggtggcgggggatatgctgcccaactccaccgagccgggccatcaccatcgctgggcgtgccgcagtctgtcaccgagtgtgtcaagcagatttgcctggtcatgctggagacgctctcccagtctccgcaagggagagtcatgaccattccgtaccagcccatgccggccagctccccagtcatctgcgccgggcggccaagatcggtgcagcgacgctgcgggctacccccatgccacccatgacctgggagggaccacctcttagatgcctactcgattcaaggacaacacaccatttctccgctcgatctgggccaagcttgaaccaggtggcaagacaacagtctcactttgccatgatggcacggcggggaccggattcgccggaattgactccagctctccagaggtgaaaggctattgggcaagtttggatgcatctactcaaaccacccatgaactcaccattccaaataacttaattggctgcataatcgggcgccaaggcgccaacattaatgagatccgccagatgtccggggcccagatcaaaattgccaacccagtggaaggctcctctggtaggcaggttactatcactggctctgctgccagtattagtctggcccagtatctaatcaatgccaggctttcctctggagaagggcatgggggtgcagctagaaccagtgtaggttcccctcaataacccctttctgctgttctccccatgatccaactgtgtaatttctggtcagtgattccaggttttaaataatttgtaagtgttcagtttctacacaactttatcatcccgctaagaatttaaaaatcacattctctgttcagctgttaatgctgggatccatatttagttttataagcttttccctgtttttagttttgttttgggttttttggctcatgaattttatttctgtttgtcgataagaaatgtaagagtggaatgttaataaatttcagtttagttctgtaatgtcaagaatttaagaattaaaaaacggattggttaaaaaatgcttcatatttgaaaaagctgggaattgctgtctta

SEQ ID NO: 45862 - DNA, 3718 bp, Homo sapiens
ctaatttaatacgactcactatagggaatttggccctcgaggccaagaattcggcacgagcagtgagagacttcggcggacatggctcccagcgtgccagcggcagaagcccgagtatcctaaaggcatccgggccgtgctgctggggcctcccggggccggtaaagggacccaggcacccagattggctgaaaacttctgtgtctgccatttagctactggggacatgctgagggccatggtggcttctggctcagagctaggaaaaaagctgaaggcaactatgggatgctgggaaactggtgagtgatgaaatggtagtggagctcattgagaagaatttggagacccccttgtgcaaaaatggttttcttctggatggcttccctcggactgtgaggcaggcagaaatgctcgatgacctcatggagaagaggaaagagaagcttgattctgtgattgaattcagcatcccagactctctgctgatccgaagaatcacaggaaggctgattcaccccaagagtggccgttcctaccacgaggagttcaaccctccaaaagagcccatgaaagatgacatcaccggggaacccttgatccgtcgatcagatgataatgaaaaggccttgaaaatccgcctgcaagcctaccacactcaaaccaccccactcatagagtactacaggaaacgggggatccactccgccatcgatgcatcccagacccccgatgtcgtgttcgcaagcatcctagcagccttctccaaagccacatcctagtatcagaaggccaggcgagactgcaacactgctcatcaccccgcggcgtgatccctgctcttaggtgctgggcagaggggaagggtggtcagggtgaggatggtgagggagggctggtgaggggctcagaggaatacttggaacaacagcagtgttattgtagtgtggcagtttcttttatacataggtgagagtttttaaagtgtaagggaaaaattaattttttaaaaaacaccatgcttggagggtgggggtagaaatagacacaatattatttctaaggaatcgggttttcatttactctggactggtgaaaatattttttaaagccagtgctctaagacctcagcttttatctcagaaccccatgggttccagaccaagagtacaggaaatcaaattgttgtcctgtctgtctatagcttggaacagggagctttgattactgactccggttccacacactgtaagatcaaaaaaccatctccacatttgaaagagatgtaaggtgtattcatagggatggtggctcaacaaatcaagcaaactggaatcaaggggagggggaagggaatgaaatggaaagggaggctgattcccttcccctgacttaccactaatttactaggctacctactctcatgagtaacctctcacagctacccagcacatgccacaatcctatgctcttgccttcttttatctgcactgtgtgaagggactcttttaaataaatgagcaagtgtcctaagctatgtcatccaaagattgtcctttccattctcaaatcctgtgactgggatcactcaacagcactgtgatgtattattttcaatgaggtgcctttcttaactgaccaaatgctgccttgtttggcccctaaatcaataaaatatgttaaaatttgtatcccctgttgtggcattttttttagataatctaagctagaaaaatgacattgaattctggacctggctggaaggaaaagaagccctttcttgtcgctgggcagctgtgtggtagggaggtccaagtatgtgcatatgagataagcctgcaacctcttgaccttcagctcctatgcaggcttctcttgagcccagagacaaggcagcttgggtctagtggagatagcactgtgcttggagttcaggggacctaggacaaatcccagccagttagttattcactgtgctcctgtttcctcagctgaaaaaggaagttggttatgccaccttcttggccttaatggcattaaatgaaatttataggaagaaggtttttgctcagtacctggcatgcaacagacattggataaatgttagttggatccagatatacacagaaagatatctgcttcctgccaggctggataactgttgaatggacacttgtccatagtctagaaagccagtgcttctaatccttaagccagatctttgactaccttttcagttgcttctttaacactctttgttgcttctctgtgtgtcctagtttaaattcatttcctctccagcaaaagtgagcttaaataatttctccaaactaaagctctcatgtttttggaagggctgcctttgcaagtgaggtttctgagaaatgactgttgttcccaaaacaagagggagctgggctggaagcaccactattcttctttaggcatcttgttacagagagaggcagggtcttcactgacatattaaatcctgttccctgaaccagcccctccctcttctgctccacttcctcacctgtgcagagtcattttcaggtgttagccttactgatttgcactgatctgtttgttccctgagctttttaaataccctgtgaaaattttctttcctcccttggtcatcatgcatctaattgtggggaaatgtttgtcaaaccaacctgcaaagcagcatggtgtagttgagaagaataaacagagaagactgggtgagctattgtttgtttgcttctttgggcctgggtttcctcatctaatctgcaaaccaagaatgcagactagtcctaccactcccggaagactgacgttgtgccaggtattatgcaaaggcttcatgtaaccctcgacttcacgtaaccctcacacagcaccctgtggagtcagaactgtccttcacttttataggtgaggaaaccagactcagagaggtgaagtggcattcctgaggtcatgcataagaggcagtcaggactgaaacacagtctctaacacttatccgtccccttgatcttgttgctgaagtgatttaattacttgcgtagctctgcacacaggaagggctgctctgaataagagctcttttccatggacactcagcgctgccggaactgattttgaagaagtcactgccggctctgagggcctagggtatgtgtcttaggatctcctgtgtgcacaaagtgtcactgacagaacacagcaggatggagagcagcctcctcagaagcctcacaagtctttcctcagatgaagacagagcaacgagtcagaagacagatttcaacagcgacttcaccatgcgaccttggacaagttatctcacctcatcagtagaataggaatgatccctacccctcaaaggtgctgatgacactagtgaccaagatactcatgtgggttggactgcccaggacacagcagatgcttagtaaacacagatggaattcagagggaaaatgtaggcattgaagaaagttgtcttactgaccatccggaaccaggctaaggatcccctagaaatcatagacctctgaaattatatgcagaattctttatgtgttttcataattaataatagtctaacatattaaattcttagctgtgtgagaggttctgcatgcattatctcatttattctcctcgataaccctgtggaggtaagtattgctattatctctatggtatgtctgtagacttt

SEQ ID NO: 45863 - DNA, 1176 bp, Homo sapiens
  misc_feature (1)...(1176): n = a,t,c or g
gcttctccatccctatctgaatcctccctgctgtgtggcctcccctggtctcatccgtaacacagcccagcttagtgggcctctgttcctgcgggtggccagcctgtctgtgtggctgggctggggaggccatgtctggtatctgaatgctatcggtgggttggggtggaggaaccaggagagggctggagggagggagatggtctcagccccacagagtttggagtcctcagtgtgctgagcaaacgtggagacaccatttccctcctctagacctcatcttggagagagagatgttggatggggccatctattccagctttattcacacaaatcatgtctgttggcctggaaattggaaaaccagttaaaccaaaaacatgatattaagaaaacaggcaggcttcaccatagtaaaaatgctgaaagccaaagacaaaattgggagaacaaaagaaaagcgtcttgtcacatacagaaggtccctgataaagttagtagctgccctcatcagaaaccaggcccaggcagtggggacacatccagagtgctgaaagaacctcccccaggtcatcctatccccaagagtgatgcccggcagcattcccagctcagggctaatggttcacggaagccaggaatcaaactgcctgggttccagtcccagctctgccagttatgcccagctgtggggacttgggcagctcgtttagtagcaccgtgcctcagtttcccatatgtaaaaggccattttgagtgcctttcacagccctgcataaggcaggtgtctcagtgttcactgctgtctctccagctcttagtccagtagctgcatggtgagtgagcgtagggcgcaccctggaaggctgccaagcccaaagttgtgcagagcgctggggactccagactccccacagcagcagagactcgggactgaggcatcctctgttcacaggacatgctggcatctactgggtcagggctctgctgctcggtgnnnnnnnnnnnnnnnnnnnnnnnnnnnnnnnnnnnnnnnnnnnnnnnnnnnnnnnnnnnnnnncgtgtcgatagaccctactactcagggttgatgagaagattaaatgtgcaaaacctgcttgactgtgcccacaaatcctgattgtaggaataaattaatgactttttataaataaa

SEQ ID NO: 45864 - DNA, 1529 bp, Homo sapiens
actttgtgagaccagatctccatttttttccaatgggaaattattgcaagttcctacatcttgatattgctttcataatttatactaacataaaataatatttttcactgttttgcaatgtctttttaatttctgtattgcagctagaggaagtccaaagaaaacttggatttgctctttctgacatctcggtggttagcaattattcctctgagtgggagctggaccctgtaaaggatgttctaattctttctgctctgagacgaatgctatgggctgcagatgacttcttagaggatttgccttttgagcaaataggtagatggtttggtggtgtggaagcttggaagcggtcaggtagttggctactttctgcttggatctattaaatacctggcagctctctgtctttttgtgggttggttgccctgtgattagttctgctttttaacccactccctggatgcatttttccctccttgcatttccctcttttcctggagttcatactagagaatctgcactatgtttttccctttttgtcttgagatgaaagttttaaaataatccacctctgtcatttccactctctgaacatcccaagctgtatcctggcctcttttctcagactaaggttccttacttgggacctagaactggattggattggcatgctcctgatcagatgagacctttgattatttgccccttccttaggaccttacactcctgtctttctttgacttgcctttttgtttctttccttcatcttagtccctcttcatgcagtatggtcattgctaggtagaggtatgtccttttatgtaatggccaccgcatttagtattacataaactttcttttaacaatctgtgcatagtacatgctgctctgttccatttagagatttgacagaggtttcagtttagtatactcaaatcttattttagtgcttgggaaatcaattcagaatatcacatcctctccaattctctcttactcaaattgctgggaaactctcatgttactaactttgttgctctaactctgccatcttggtttccccatcccttctcttcctcatggtacgtgtgctcctaatattagcgttggttgagattttcagtggtccaatattcctcttccctctggttgcctttcctgagataatccactaagaatattttgtgtttcttttctcagggaatctaagggaggaaattatcaactgtgcacaaggaaaaaaatagatatgtgaaaggttcacgtaaatttcctcacatcacagaagattaaaattcagaaaggagaaaacacagaccaaagagaagtatctaagaccaaagggatgtgttttattaatgtctaggatgaagaaatgcatagaacattgtagtacttgtaaataactagaaataacatgatttagtcataattgtgaaaaataataataatttttcttggatttatgttctgtatctgtgaaaaaataaatttcttataaaactcgggtctaaaaaaaaaaaaaa

SEQ ID NO: 45865 - DNA, 2504 bp, Homo sapiens
cagggcttcaacatcagccatacacaaacccgcctgctctccatggccaagcctgtgtaccatgctatcaccaagcactcgcccaagaagcctgtcattgtctttgtgccgtctcgcaagcagacccgcctcactgccattgacatcctcaccacctgtgcagcagacatccaacggcagaggttcttgcactgcaccgagaaggatctgattccgtacctggagaagctaagtgacagcacgctcaaggaaacgctgctaaatggggtgggctacctgcactgaggggctcagccccatggagcgacgcctggtggagcagctcttcagctcaggggctatccaggtggtggtggcttctcggagtctctgctggggcatgaacgtggctgcccacctggtaatcatcatggatacccagtactacaatggcaagatccacgcctatgtggattaccccatctatgacgtgcttcagatggtgggccacgccaaccgccctttgcaggacgatgaggggcgctgtgtcatcatgtgtcagggctccaagaaggatttcttcaagaagttcttatatgagccattgccagtagaatctcacctggaccactgtatgcatgaccacttcaatgctgagatcgtcaccaagaccattgagaacaagcaggatgctgtggactacctcacctggacctttctgtaccgccgcatgacacagaaccccaattactacaacctgcagggcatctcccatcgtcacttgtcggaccacttgtcagagctggtggagcagaccctgagtgacctggagcagtccaagtgcatcagcatcgaggacgagatggacgtggcgcctctgaacctaggcatgatcgccgcctactattacatcaactacaccaccattgagctcttcagcatgtccctcaatgccaagaccaaggtgcgagggcttatcgagatcatctccaatgcagcagagtatgagaacattcccatccggcaccatgaagacaatctcctgaggcagttggctcagaaggtcccccacaagctgaataaccctaagttcaatgatccgcacgtcaagaccaacctgctcctgcaggctcacttgtctcgcatgcagctgagtgctgagttgcagtcagatacggaggaaatccttagtaaggcaatccggctcatccaggcctgcgtggatgtcctttccagcaatgggtggctcagccctgctctggcagctatggaactggcccagatggtcacccaagccatgtggtccaaggactcatacctgaagcagctgccacacttcacctctgagcatatcaaacgttgcacagacaagggagtggagagtgttttcgacatcatggagatggaggatgaagaacggaacgcgttgcttcagctgactgacagccagattgcagatgtggctcgcttttgtaaccgctaccctaatatcgaactatcttatgaggtggtagataaggacagcatccgcagtggcgggccagttgtggtgctggtgcagctggagcgagaggaggaagtcacaggccctgtcattgcgcctctcttcccgcagaaacgtgaagagggctggtgggtggtgattggagatgccaagtccaatagcctcatctccatcaagaggctgaccttgcagcagaaggccaaggtgaagttggactttgtggccccagccactggtgcccacaactacactctgtacttcatgagtgacgcttacatgggatgtgaccaggagtacaaattcagcgtggatgtgaaagaagctgagacagacagtgattcagattgagtcctgaggcatttacttttgggtaaaggagagttgagcctgaattaggaatgtgtacattgtaggaatcctggttgtggggaccaggtctgtgggcctcaggtctggccagccagggctggtgctgtccccgcctacctccacttcctttcccttgctcactctggatccagtgacagcaggtgtcatgggtcaagcataaatcatatatagcattttcaggcatgttcctggtagttcttttgagtctgacattctaataaaataatttgtagaaaccatttgtctttgtagtgattccaaattaaaagttttctttctccaacctgagggcacggccaaaaagatctggttattttttagccaggaacgtgcttgttaatgagtatgtctggaggacagacctgctcattaggtgtgctgtcccctgtagcctcgtgagtcagcccagaggagggtacatgcgactgtggcctggcctcagtggtacccacacatcagcactaccacaagaaccaacactgagcctcggaagctagatcacaggttaggggtttctctagatgggggttctgaaatttgcagtgtctgctcctgggaggcagcaccagaaagggcactgaaatgtactagctggatgtgacccagtcttaataaacaggttttctaatcc

SEQ ID NO: 45866 - DNA, 1730 bp, Homo sapiens
tacagggcaaacacatttcttaataagtgcagtttgttaaaatcatgttaaaacatatgagtcaaggggaagtaaaaataaagggtatcactgtaggaaaagcttttgggtctggcacctgggagaccactggagaggaggcagtgggagaaactttttttccttcttttccaggagtagctggaaattaagatcgggttccttttctgccagcttggaagggcaaccccatgactgattgcgattctgaggatgtctatgcaaagttggattcttgttacagtgtatccaatctgaagtattgcacatctgaactggggactgttaacactgatgcccaatacagtgtggggtgccagaaagtgtctgctgatatttgtgggaaaaaaaatctattttgtttacctactgtatcaaaggggagtctgggggagaatggtagtattttttttttttatcagctgtgaaaaaaatgttacagatctgcacattttcgtgtgtactatggtgtgtgtgtgtatgtgtgtggtgtgtgtgtgttttaagtttagccttttgtttttgttttttggttggcagtaaccgattttaatgactagcttttaaaaatacagtacaaagactttgtaaatgtgattcagggcccccagcacccctgtgtctgcagagtgccttcaaaactcagctgttccagccggtgccaacctgtgaacttcccaccatatcccagaatctgctattccccaaaccacttcccagtttcctttcagtaatctttctgaaggagccaggacaatagggcctgttgtttagtgaatttctttattattttcagcctttaaaatgtaatttccatctcttgcaatgaatttgtttcccttttttttgcttcattttgtttaaattttcaggtatttagctcccctttcatattatttttaaattttttaattacctgttgtagggtgttcctccagaagcaaagagcaaaattttactgttgtgatgtaccaattctaactaattgtaatttttaatttcatgcgtttaatcattgtctcttcattttaagacttttaatacaaatgtcatttttaaagaaacaaacccaaaactattgtttgtgtttctgtgtttcatattcagtgatttaatacagtatcatggctgaggtggatggggcaggtgcatgatactcttcagagctatttgtgaaattttaaagacagaagtgtctcagtgacaagttggatgacactactcccaactttttaaatttggagaaaaccatcaaggtcgaggaagccctgggtatggccattaccatctgattagaagatgaacaggtattttgaatctgatctgacatggaacagtttacctcattgtaggtagggaacaagagaacccatctattaaaattgccttagatctgggaaagtaaccatccttctggcaaagtaggatggcacttttaagtttttcttccttttttccctctgtttatattgcacatcaagtcaaaaacatgtttgggaaagatggttttcaattctgaagttatacctagtgatgttttttgcagtacatttgaatggattgtagacactgcctcaacccttttgaggttttgatttggaaatagatttaaaagaaaacaggctaagataatatccttgttctcatttacaccctgcagtttggaccacatttgacctcataagtttttg

SEQ ID NO: 45867 - DNA, 807 bp, Homo sapiens
aaaccaaacctaatgctaattgtgatatgttatttattctcacctgatttgaatcattggattcaattaaatgagtttaattatcattaaataattctaagagaaataatgtctattcggatggtgggaattttctttctacatgcagccccattctgaatgaatgaaatcaaatcacgtgaagatcagggtcctagagtaacttaatattttgtacattggttatttgactcctcatttttatattacatgttatatcaagggagggggtataaaagaaatacaaaaattgcagaggtatctggaatgtacctatttgttaattctatttgtcatttcttttgtttcatcttttgagtaataagctgcttggaaaagtttctgttctttagctgattttttagctataaaaatgtatttgaaaagctcataaatttcaggattgaaaagataattgaaagtttaaaaaaaacctaattcattgaagtaataaccaaataattttcaatcttgattcaactgtgattcaaatcttacaccatttgcccacttctatggaattttatgtataaaattttttaagagtcagagtttttttttcttgattaattggatgtatttcacagaatttccaactgctcacgttagttttcttccttttagagttgatctctctaatgtattagatcttcatgcctttgatagtctctctggaataagtttgcagaaaaaaacttcagcatgtgccaggaacacaacctcccttgatcagagtattgttacaatcacatttgacgaccaggaaat

SEQ ID NO: 45868 - DNA, 2300 bp, Homo sapiens
ggcggtcggtctcgccttgtcgccagcatccattttcctctctttctcttcccctttccttcgcgcccaagagcgcctcccagcctcgtagggtggtcacggagcccctgcgccttttccttgctcgggtcctgcgtccgcgcctgccccgccatgaatgaggagtacgacgtgatcgtgctgggcaccggcctgacggaatgtatcctgtcaggtataatgtcagtgaatggcaagaaagttcttcatatggatcgaaacccttactacggaggagagagtgcatctataacaccattggaagatttatacaaaagatttaaaataccaggatcaccacccgagtcaatggggagaggaagagactggaatgttgacttgattcccaagttccttatggctaatggtcagctggttaagatgctgctttatacagaggtaactcgctatctggattttaaagtgactgaagggagctttgtctataagggtggaaaaatctacaaggttccttccactgaagcagaagccctggcatctagcctaatgggattgtttgaaaaacgtcgcttcaggaaattcctagtgtatgttgccaacttcgatgaaaaagatccaagaacttttgaaggcattgatcctaagaagaccacaatgcgagatgtgtataagaaatttgatttgggtcaagacgttatagattttactggtcatgctcttgcactttacagaactgatgattacttagatcaaccgtgttatgaaaccattaatagaattaaactttacagtgaatctttggcaagatatggcaaaagcccatacctttatccactctatggccttggagaactgccccaaggatttgcaaggctaagtgctatttatggaggtacctatatgctgaataaacccattgaagaaatcattgtacagaatggaaaagtaattggtgtaaaatctgaaggagaaattgctcgctgtaagcagctcatctgtgaccccagctacgtaaaagatcgggtagaaaaagtgggccaggtgatcagagttatttgcatcctcagccaccccatcaagaacaccaatgatgccaactcctgccagatcattattccacagaaccaagtcaatcgaaagtcagatatctacgtctgcatgatctcctttgcgcacaatgtagcagcacaagggaagtacattgctatagttagtacaactgtggaaaccaaggagcctgagaaggaaatcagaccagctttggagctcttggaaccaattgaacagaaatttgttagcatcagtgacctcctggtaccaaaagacttgggaacagaaagccagatctttatttcccgcacatatgatgccaccactcattttgagacaacgtgtgatgacattaaaaacatctataagaggatgacaggatcagagtttgactttgaggaaatgaagcgcaagaagaatgacatctatggggaagactaacagcagtacatgttattatgtaattaggacacatttaaaatttggcaaataatgcatataatgaaatcaatattgtaaggcctgcttttgtaatgaaaatggagagaatgaagagcgctgtgccagtaaatactccccttcacctttctaattattaacttgttttcatggagtggctattcagcattggcagttaccacattctgttcaatttaaccaaactggctttttttttttttctagtgaagttaaacaaacattgggataccgacacagacaacttgagacagtttttttaatcttttaatcagtgtagctatgtgctgctgctgctcaagagctggatccatacaggttgtgtgtcatctgtcctcttgaggttcaggagattctaaattgaatattccacggtttgggacagcatccggaagttttccctatgactttatattttgtattatgtcaaatgttatggcagggcccaaatagcatagccacaagtttggtttatgtgggcataaaattctaaccaaaccccagacatagggagtcatttggagaaagcctgtatgtggtgttttaacctaataaagttgatgagagagaaggggagaggaagcgaacataaagcgggtcaagtgtagtgcatcttttgtatctcaggcgtggcttcttcagtggaccaagctgcaatgcagtattgacttgacagagcctctacttctgtctcaaaatggctccaaatgatttctgtactgcaaaataaagccaaattctggaaactaaaaaaaaaaaaaaaaaagtcgacg

SEQ ID NO: 45869 - DNA, 5638 bp, Homo sapiens
  misc_feature (1)...(5638): n = a,t,c or g
agatggcggtcttggcacctctaattgctctcgtgtattcggtgccgcgactttcacgatggctcgcccaaccttactaccttctgtcggccctgctctctgctgccttcctactcgtgaggaaactgccgccgctctgccacggtctgcccacccaacgcgaagacggtaacccgtgtgactttgactggagagaagtggagatcctgatgtttctcagtgccattgtgatgatgaagaaccgcagatccactctctccttcctgcttcctccttgctgtggtggctgggatgcttcttccatgattttttgaatctagactgggctgttctctgtgttaaaccaatcagttgcgaccttctcttaacagtgtgaagtgagggggtctctctccctccttctccttcctctgtgattcaccttcctttttaccctgccctgcggcggctccgccccttaccttcatggacgactcagaggtggagtcgaccgccagcatcttggcctctgtgaaggaacaagaggcccagtttgagaagctgacccgggcgctggaggaggaacggcgccacgtctcggcgcagctggaacgcgtccgggtctcaccacaagatgccaacccactcatggccaacggcacactcacccgccggcatcagaacggccggtttgtgggcgatgctgaccttgaaagacagaaattttcagatttgaaactcaacggaccccaggatcacagtcaccttctatatagcacccatccccaggatgcaggagccggggcagattgtggagacctacacggaggaggatcctgagggagccatgtctgtagtctctgtggagacctcagatgatgggaccactcggcgcacagagaccacggtcaagaaagtagtgaagactgtgacaacacggacagtacagccagtcgctatgggaccagacgggttgcctgtggatgcttcatcagtttctaacaactatatccagactttgggtcgtgatttccgcaagaatggcaatgggggacctggtccctatgtggggcaagctggcactgctacccttcctaggaacttccactaccctcctgatggttatagtcgccactatgaagatggttatccaggtggcagtgataactatggcagtctgtcccgggtgacccgcattgaggagcggtataggcccagcatggaaggctaccgggcacctagtagacaggatgtgtatgggccccaaccccaggttcgggtaggtgggagcagcgtggatctgcatcgctttcatccagagccttatgggctagaggatgaccagcgtagtatgggctatgatgacctggattatggtatgatgtctgattatggcactgcccgtcggactgggacaccctctgaccctcgtcggcgcctcaggagctatgaagacatgattggtgaggaggtgccatcggntcaatactactgggctcctttggcccagcatgagcgaggaagtttagcaagcttggatagcctgcgcaaaggagggcctccacctcctaattggagacagccagagctnccagaggtgatcgccatgcttggattccgcttggatgctgtcaagtccaatgcagctgcatacctgcaacacttatgctaccgcaatgacaaggtgaagactgacgtgcggaagctcaagggcatcccagtactggtgggattgttagaccatcccaaaaaggaagtgcaccttggagcctgtggagctctcaagaatatctcttttggacgtgaccaggataacaagattgccataaaaaactgtgatggtgtgcctgcccttgtgcgattgcttcgaaaggctcgtgatatggaccttactgaagttattaccggaaccctgtggaatctttcatcccatgactcaatcaaaatggagattgtggaccatgcactgcatgccttgacagatgaagtgatcattcctcattctggttgggagcgggaacctaatgaagactgtaagccacgccatattgagtgggaatcggtgctcaccaacacagctggctgccttaggaatgtaagntcagagaggagtgaagctcgccggaaacttcgggaatgtgatggtttagttgatgccctcattttcattgttcaggctgagattgggcagaaggattcagacagcaagcttgtagagaactgtgtttgccttcttcggaacttatcatatcaagttcaccgggagatcccacaggcagagcgttaccaagaggcagctcccaatgttgccaacaatactgggccacatgctgccagttgctttggggccaagaagggcaaagggaaaaaacctatagaggatccagcaaacgatacagtggatttccctaaaagaacgagtccagctcgaggctatgagctcttatttcagccagaggtggttcggatatacatctcacttcttaaggagagcaagactcctgccatcctagaagcctcagctgggagctatccagaacttgtgtgctgggcgctgggacgtatgggtcgatacatccgctctgctctgcgtcaagagaaggctctttctgccatagctgacctcctgactaatgaacatgaacgggtggtgaaagctgcatctggagcactgagaaacctggctgtggatgctcgcaacaaagaattaattggtaaacatgctattcctaacttggtaaagaatctgccaggaggacagcagaactcctcttggaatttctctgaggacactgtcatctctattttgaacactatcaacgaggttatcgctgagaacttggaggctgccaaaaagcttcgagagacacagggtattgagaagctggtgttgatcaacaaatcagggaaccgctcagaaaaagaagttcgagcagcagcacttgtattacagacaatctggggatataaggaactgcggaagccactggaaaaagaaggatggaagaaatcagactttcaggtgaatctaaacaatgcttcccgaagccagagcagtcattcatatgatgatagtactctccctctcattgaccggaaccaaaaatcagataagaaacctgatcgggaagaaattcagatgagcaatatgggatcaaacacaaaatcactagataacaactattccacaccaaatgagagaggagaccacaatagaacactggatcgatcgggggatctaggcgacatggagccattgaagggaacaacacccttgatgcagaagatttagcaccactatctccgttccatctgggcttatatgtacttttattttttggtggtgaaattgactgatgattttcctttttcttcgctggactattgtgccaactgccaggctgcctcctgcccttacagccctaagtggctgccttctttccatcaactcccaacttcttcctgtgaagtttaattgtctcaacgcctccccctcccccattccctccatttttctcccaagaaacctgactcaattatttgcatattttgagaaactgctgcagattagttctttttgccagttttccctggaactcctggccttttgtggaggggagggatggagagaataggaatcttcactagaagccgtgggaagaattggaagttacatgctgtatatgcaatgtccagcagtctgataaactgacgattcttaatcaagatttttttcctgatggggaagggacttttattttcttttagagaggggaaagtgtgagctcttcccttattcctaatggctatttttgaagcaaagaaggccagcaacattggcacatgccacctggcaaaggacccttgagtaagtgaaggtctcctaaaactgggattaagaaaccttgctctcctcatctccaaggcagggaccatcaagaacctacagactccatctcttctgcaagcctcatgccaaccctgggctattgctgctgccccttaaacacaggctgtccttaacccacctctcctgccctgtgatatgtctgctgagttggcctggccatttccaagaggctgtagaaaggggagaatgtcaaggaagacttttggtagagaaggagcagaaagatgtgtttttgggaagaagaagacctctaggaggagctagtaggaatgtacatgaagcaattagtctgaaactggcttccccactcccccgtttctccttttcctatccttataggcctgtcccttggcctctgccctggattggttggcaaactaaaggacttgatgtacataactcctgtcccttttcccttacaaggtgggggattgcccctggctttgcctcttctttgtgcctttggcctggggtgcatctcctcccgcccttccatgtgcctttctttgcctctgcagtctcatttctcataattttgcaaattatattttgttgctttcttacctactattggccctaaatagcagaaagaagagaagtgaccgagagaacctcagattcttcattgaggattggtatagccatggatttcagtcatagcaagcttttgctcaacagcatatggggtggggattttgcaaaaatcctattctgatgaatctcaaagtaaggctggtaagagaagtgagtggtgtgactcttactccttaggtgcccagaatttaccatcatctctgaaggagttacaggggaagtgggtctccccaattctcccctccctccagtattgccccctctcactttagcatatattaattagcaggttgggctagagaaatcagctgctatgcgggttgattattattattatttctaatccttttccttatttgccttctactccccttaatctaatctaaaagctctgttccatgcaactgggagttccttatccctctcttccccttcccttatatattgaggctatggggtaggagaaaagtgcacaacccaccaccccctttactcgtgcattaaaatttcttatttacccttttcccccttcccatttcttcccactttcatctaccttttctggcaaaaaggagccttttgctctctgtgaccctaagagcacactggcacagggaaaattgccccatccagacctggctccactcttgatctctcttgtcctcttctgctcttttcttggtgctcttttttctcggtggggtgtgggtaatagaacagccgtgggcttttggggacctttaacttttttttctctcttttgtttataaaaaacactaaacattcaattccagagaaccaaaaatcccaccttcccaccgaacactactaaggggcttgtgttctgctccataccttttctcttttctttctgtcttgttaatgcttttaaaaacaaatgagttttttatataaataaagtttttaaagtgtgtatgtggggggtctgtgtcatttcttcacttcaagctgttatttcttccctgctttggaatctttgttacttccttatgtatcagtgtcctttccagagcaaccagaaggaggttataccaggatttattttgagctcagccccaactctttatcaagcaacattcttgttaactatatgtgaaacattttttcttctgaagattcttaaaaattgaatgg

SEQ ID NO: 45870 - DNA, 574 bp, Homo sapiens
ggcggcgagtgggggccgtgcgacggttactctggttactggggccgcgccgcgctggcgagagccgccgccgcgcgagggatgctggtgaggaagccgtcgggagccgccgccgccatctgagggaggtaccctggaaaccaccttttatcggtggggaagtgcagtcgcggtgggcggctctgggggccagcgaaacgggaggcctctaaatctttaggttggggctgcattgccctggagccgcactcttgagtccgaggccatcttttgttggagaaggcgtcggcgttggcgttttcccgaggttgggctgtacagtgtctccgtccgcggaaaaagaagcctctgaacccgcgccggcccgcagcccccgtgccttccggccgctgctcgccgtcgcccagaggctaggccacgtttcccccagtgccgaggtgtttctgtgaccctccctccactcccattcccttctgaaagggcacctgctcttggtgagaaaagaaattatagcacgaagagccagtatcagaagagtatccatcacccgcagcaaccgctcagggaacaccat

SEQ ID NO: 45871 - DNA, 2127 bp, Homo sapiens
agagctggcagtgcctgaccggcgcgtctgacgcggagttgggtggggtagagagtagggggcggtagtcgggggtggtgggagaaggaggaggcggcgaatcacttataaatggcgccgaagcaggacccgaagcctaaattccaggagggtgagcgagtgctgtgctttcatgggcctcttctttatgaagcaaagtgtgtaaaggttgccataaaggacaaacaagtgaaatacttcatccattacagtggttggaataaaaattgggatgaatgggttccggagagcagagtactcaaatacgtggacaccaatttgcagaaacagcgagaacttcaaaaagccaatcaggagcagtatgcagaggggaagatgagaggggctgccccaggaaagaagacatctggtctgcaacagaaaaatgttgaagtgaaaacgaaaaagaacaaacagaaaacacctggaaatggagatggtggcagtaccagtgagacccctcagcctcctcggaagaaaagggcccgggtagatcctaccgttgaaaatgaagaaaccttcatgaacagagttgaagttaaagtgaagatccctgaagagctgaaaccctggcttgtggatgactgggacttaattaccagacagaagcagcttttttatcttcctgccaagaagaatgtggattccattcttgaggattatgcaaattacaagaaatctcgtggaaacacagataataaggagtatgcggttaatgaagttgtggcagggataaaagaatacttcaacgtaatgttgggtacccagctactctataaatttgagagaccacagtatgctgaaattcttgcagatcatcccgatgcacccatgtcccaggtgtatggagcgccacatctcctgagattatttgtacgaattggagcaatgttggcttatacacctctggatgagaagagccttgctttattactcaattatcttcacgatttcctaaagtacctggcaaagaattctgcaactttgttcagtgccagcgattatgaagtggctcctcctgagtaccatcggaaagctgtgtgagaggcactctcactcacttatgtttggatctccgtaaacacatttttgttcttagtctatctcttgtacaaacgatgtgctttgaagatgttagtgtataacaattgatgtttgttttctgtttgattttaaacagagaaaaaataaaagggggtaatagctccttttttcttctttctttttttttttcatttcaaaattgctgccagtgttttcaatgatggacaacagagggatatgctgtaggagtgttttattgcctagttgacaaagctgcttttggaatgctggtggttctattcctttgacactacgcacttttataatacatgttaatgctatatgacaaaatgctctgattcctagtgccaaaggttcaattcagtgtatataactgaacacactcatccatttgtgcttttgtttttttttatggtgcttaaagtaaagagcccatcctttgcaagtcatccatgttgttacttaggcattttatcttggctcaaattgttgaagaatggtggcttgtttcatggtttttgtatttgtgtctaatgcacgttttaacatgatagacgcaatgcattgtgtagctagttttctggaaaagtcaatcttttaggaattgtttttcagatcttcaataaattttttctttaaatttcaaagaaaaaaaaaagaaaaccagaaaacaacaacaacaacatgaaaaaaaaagaccccacaaaaacctcattcagaggtcagcaacctcaaagactgaagatagatagcccccaaagatgagaaagaatcaatacaaaagcactgaaaactcaaaaagtcagagttcctcttctctaaatgactgcaacacccctccagcaagggcacagaacccaggctgaggtggagatggctgaattgacagaagtcggcttcagaaggtggataacaacaaactttggtgagctaaaggagcatgttgtaacccaatgcaaagaagctaagaatcatgatcaaacaatacaggagctgatagccacaacagccagtttagagagg

SEQ ID NO: 45872 - DNA, 454 bp, Homo sapiens
tttcaaaacaagaagagggtcctgctgggagaaactggcaaggagaagctcccgcggtactacaagaacatcggtctgggcttcaagacacccaaggaggtgcggggaacctcagaagaaagaaggggaacctggcgttcctgcacgtgtgcccacgacgagttgccctgcctgcatctaagtggcttctggggctgctgggaattgtagttgcttccctgaggccacgcccctggctcttttaaggaaccgcccgcccaaggctcactcctttatctttcctatcctttcaggctattgagggcacctacattgacaagaaatgccccttcactggtaatgtgtccattcgagggcggatcctctctggcgtggtgaccaagatgaagatgcagaggaccattgtcatccgccgagactatctgcactacatccgcaagtacaaccgcttcga

SEQ ID NO: 45873 - DNA, 1237 bp, Homo sapiens
gcccaagtatcaagagggagagtgagacttgcctgcttctctggcccctggtcctgtcctgttctccagcatggtgtgtctgaggctccctggaggctcctgcatggcagttctgacagtgacactgatggtgctgagctcccgactggctttggctggggacacccgaccacgtttcttgtggcagcttaagtctgagtgtcatttcttcaatgggacggagcgggtgcggttcctggagagacacttccataaccaggaggagtacgcgcgcttcgacagcgacgtgggggagtaccgggcggtgacggagctggggcggcctgacgctgagtactggaacagccagaaggacttcctggaagacaggcggggccgcgggtggaacacctacttgcagacacaactacggggttggtgagagcttcacagtgcagcggcgagttgagcctaaggtgactgtgtatccttcaaagacccagcccctgcagcaccacaacctcctggtctgctctgtgagtggtttctatccaggcagcattgaagtcaggtggttccggaatggccaggaagagaagactggggtggtgtccacaggcctgatccacaatggagactggaccttccagaccctggtgatgctggaaacagttcctcggagtggagaggtttacacctgcccaagtggagcacccaagtgtgacgagccctctcacagtggaatggagagcacggtctgaatctgcacagagcaagatgctgagtggagtcgggggcttcgtgctgggcctgctcttccttggggccgggctgttcatctacttcaggaatcagaaaggacactctggacttcagccaacaggattcctgagctgaaatgcagatgaccacattcaaggaagaaccttctgtcccagctttgcagaatgaaaagctttcctgcttggcagttattcttccacaagagagggctttctcaggacctggttgctactggttcggcaactgcagaaaatgtcctcccttgtggcttcctcagctcctgcccttggcctgaagccccacagctttgatggcagtgcctcatcttcaacttttgtgctcccctttgcctaaaccctatggcctcctgtgcatctgtactcaccctgtacgacaaacacattacattattaaatgtttctcaaagatggagttaaatatcatctggtccatttggctccaaagacaaaaaaaa

SEQ ID NO: 45874 - DNA, 523 bp, Homo sapiens
  misc_feature (1)...(523): n = a,t,c or g
gnnnnnagnnaattaaanttanaaaatcggaaantcgaanancngttatgacatgattacgaatttaatacgactcactatagggaatttggccctcgaggccaagaattcggcacgaggcaactcaaaggactcaaagcaacggacaacacaagagttgtcttcagcccagtgacacctctgatgtcccctggaagctttgtgctaacctgggactgcctgacttcctttagcctggtcccttgctactaccttgaactgttttatctaacctctctttttctgtttaattctttgctactgccattgaccctgctgcaggatttgtgtcattttcctgcctggttgctgagactccattttgctgccacacccaaanangaanaagcaggctttaattgccaaagcacagtttgagcagtagaaaacaacatggtgtatatctcaaattgcctgacatgaagaggagtctaacggggaagtttcacttttcatcagcatcatcttttcacatggtcattat

SEQ ID NO: 45875 - DNA, 522 bp, Homo sapiens
  misc_feature (1)...(522): n = a,t,c or g
tttgnanacccgntttgacatgattacgaatttaatacgactcactatagggaatttggccctcgaggccaagaattcggcacgagcaggctttaattgccaaagcacagtttgagcagtagaaaacaacatggtgtatatctcaaattgcctgacatgaagaggagtctaacggtgaagtttcacttttcatcagcatcatctttcacatgttcattatcatccgctcttattcttgcatgtttaaacacttaaaatttttagtataatttttagtgtgttttgaagtggtgactaggctttcaaaaacttccattgaattacaaagcactatccagttcttattgttaaactaagtaaaaatgataagtaacatagtgtaaaatattcctttactgtgaacttcttacaatgctgtgaatgagaggctcctcagaactggagcatttgtataataattcatcctgtcatcttcaattttaacatcatatataatttcaattctatcaattgggcccttaa

SEQ ID NO: 45876 - DNA, 423 bp, Homo sapiens
  misc_feature (1)...(423): n = a,t,c or g
aancccttgactgattacgaatttttgacgacncctatagggaatttggccctcgaggccaagaattcggcacgaggtcaaatttacagttgtcaattgatcttcaagctgcagggtgcctagaaatgggccgttgtctgtagccctggcatgtgcacacggacatttgccaccactgcaagcaaaagtctggagaagttcaccaacgacaagaacgattagggaaaatatgctgctgtgggttaacaactcagaaagtccctgatccacatttggctgtttactaaagcttgtgattaactttttggcagtgtgtactatgctctattgctatatatgctatctataaatgtagatgttaaggataagtaattctaaatttattattctatagttttgaagtttggttaagtttcctttcac

SEQ ID NO: 45877 - DNA, 457 bp, Homo sapiens
  misc_feature (1)...(457): n = a,t,c or g
accgnttngacatnattacgaatttaataccgactcactatagggaatttggccctcgaggccaagaattcggcacgagaaacacttaaaatttttagtataatttttagtgtgttttgaagtggtgactaggctttcaaaaacttccattgaattacaaagcactatccagttcttattgttaaactaagtaaaaatgataagtaacatagtgtaaaatattcctttactgtgaacttcttacaatgctgtgaatgagaggctcctcagaactggagcatttgtataataattcatcctgttcatcttcaattttaacatcatatataatttcaattctatcaattgggcctttaaaaatcatataaaaggatataaaatttgaaaagagaaacctaattggctatttaatccaaaacaactttttttttccttcaatggaatcagaaagcttgca

SEQ ID NO: 45878 - DNA, 487 bp, Homo sapiens
  misc_feature (1)...(487): n = a,t,c or g
aancccnanttgntatccacatgattacgaatttaatacgactcactatagggaatttggccctcgaggccaagaattcggcacgagcggcacgagctcaaattgcctgacatgaagaggagtctaacggtgaagtttcacttttcatcagcatcatcttcacatgttcattatcatccgctcttattcttgcatgtttaaacacttaaaatttttagtataatttttagtgtgttttgaagtggtgactaggctttcaaaaacttccattgaattacaaagcactatccagttcttattgctaaactaagtagaaatgataagtaacatagtgtaaaatattcctttactgtgaacttcttacaatgctgcgaatgagaggctcctcagaactggagcatttgtataataantcatcctgttcatcttcaattttancatcatatataannncaattctatcaattgggcctttaaaaatcatata

SEQ ID NO: 45879 - DNA, 1431 bp, Homo sapiens
acgaagccctgcatggtggtgtggcttgtggatccctcacagagattacaggtccaccaggttgtggaaaaactcagttttgtataatgatgagcattttggctacattacccaccaacatgggaggattagaaggagctgtggtgtacattgacacagagtctgcatttagtgctgaaagactggttgaaatagcagaatcccgttttcccagatattttaacactgaagaaaagttacttttgacaagtagtaaagttcatctttatcgggaactcacctgtgatgaagttctacaaaggattgaatctttgggaaggaaggaaattatctcaaaaggaattaaacttgtgattcttgactctgttgcttctgtggtcagaaaggagtttgatgcacaacttcaaggcaatctcaaagaaagaaacaagttcttggcaagagaggcatcctccttgaagtatttggctgaggagttttcaatcccagttatcttgacgaatcagattacaacccatctgagtggagccctggcttctcaggcagacctggtgtctccagctgatgatttgtccctgtctgaaggcacttctggatccagctgtgtgatagccgcactaggaaatacctggagtcacagtgtgaatacccggctgatcctccagtaccttgattcagagagaagacagattcttattgccaagtcccctctggctcccttcacctcatttgtctacaccatcaaggaggaaggcctggttcttcaagcctatggaaattcctagagacagataaatgtgcaaacctgttcatcttgccaagaaaaatccgcttttctgccacagaaacaaaatattgggaaagagtcttgtggtgaaacacccatcgttctctgctaaaacatttggttgctactcgtgtagactcagcttaagtcatggaattctagaggatgtatctcacaagtaggatcaagaacaagcccaacagtaatctgcatcataagctgatttgataccatggcactgacaatgggcactgatttgataccatggcactgacaatgggcacacagggaaccaggaaatgggaatgagagcaagggttgggttgtgttcggtggaacaccataggttttttttttttaactttctctttctaaaatatttcattttgatggaggtgaaatttatataagatgaaattaaccattttaaagtaaacaattccgtggcaactagatatcatgatgtgcaaccagcatctctgtctagttcccaaatatttcatcacccccaaaagcaagacccataaccattatgcaagtgttcctatttccccctcctcccagctcctgggaaaccaccaatctactttttttctatggctttacctaatctggaaatttcaaataaatgggatcaaatagtt

SEQ ID NO: 45880 - DNA, 3633 bp, Homo sapiens
gaaacgcaggaaatgctgatttctttatggagggggagacgaggaggaggaggacatgacttttcttgcggtttcggtaccctctttttaaatcactggaggactgaggccttattaaggaagccaaaattatcggtgcagtgtggaaaggcttccgtgatcctctcgctgcacccttaaaaacttcaccgtcttcaaactccatttccatggttctgttaattctcaaggagcagcaactcgactggttctcccaggagcaggaaaaacccttgtgacatgaaacatctcaggcctgaaaagaaagtgctctctcagatggactcttgcatgttaagactatgtcttcacatcatggtgcaaatcacatgtacccaatgactccggctttgacacaacaccttaccatcatcatgccatgatggcttccacaaagcattaaacctggtaaccagagattactggtggctccagcgttgttagatgttcatgaaatgtgaccacctctcaatcacctttgagggctaaagagtagcacatcaaaaggactccaaaatcccatacccaactcttaagagatttgtcctggtacttcagaaagaattttcatgagtgttcttaattggctggaaaagcaccagctgacgttttggaagaatctatccatgtgtctgcctccatatgcatctgggcatttcatcttcagtcccctcattagactgtagcattaggatgtgtggagagaggagaaatgatttagcacccagattcacactcctatgcctggaagggggacatctttgaagaagaggaattagggctgtggacactgtcttgaggatgtggacttccttagtgagctccacattacttgatggtaaccacttcaaaaggatcagaatccacgtaatgaaaaaggtccctctagaggatggagctgatgtgaagctgccaatggatgaaaagcctcagaaagcaactcaaaggactcaaagcaacggacaacacaagagttgtcttcagcccagttgacacctctgatgtcccctgggaagctttgtgctaacctgggactgcctgacttcctttagcctggtcccttgctactaccttgaactgttttatctaacctctctttttctgtttaattctttgctactgccattgaccctgctgcaggatttgtgtcattttcctgcctggttgctgagactccattttgctgccacacacagagatgtaagaggcaggctttaattgccaaagcacagtttgagcagtagaaaacaacatggtgtatatctcaaattgcctgacatgaagaggagtctaacggtgaagtttcacttttcatcagcatcatctttcacatgttcattatcatccgctcttattcttgcatgtttaaacacttaaaatttttagtataatttttagtgtgttttgaagtggtgactaggctttcaaaaacttccattgaattacaaagcactatccagttcttattgttaaactaagtaaaaatgataagtaacatagtgtaaaatattcctttactgtgaacttcttacaatgctgtgaatgagaggctcctcagaactggagcatttgtataataattcatcctgttcatcttcaattttaacatcatatataatttcaattctatcaattgggcctttaaaaatcatataaaaggatataaaatttgaaaagagaaacctaattggctatttaatccaaaacaactttttttttccttcaatggaatcagaaagcttgtcaatcactcatgtgttttagagtaattacttttaaaatggtgcatttgtgcttctgaactattttgaagagtcacttctgtttacctcaagtatcaattcatcctccatacatttgaattcaagttgttttttgtcaaatttacagttgtcaattgatcttcaagctgcagggtgcctagaaatgggccgttgtctgtagccctggcatgtgcacacggacatttgccaccactgcaagcaaaagtctggagaagttcaccaacgacaagaacgattagggaaaatatgctgctgtgggttaacaactcagaaagtccctgatccacatttggctgtttactaaagcttgtgattaactttttggcagtgtgtactatgctctattgctatatatgctatctataaatgtagatgttaaggataagtaattctaaatttattattctatagttttgaagtttggttaagtttcctttcactcaattgatttattttgttgttaatcaaatttatgttaattggatcctttaaattttttttggcattttccaacaaaaatggctttattcataagaaaggaaaaaaatcaatggaatttgatatctaaagaagttagaaagggagcaaaataaaaaacataaaggagatagatgaattagtaagcaaatcagtagtcgagtttttcaaactggcaaaattaattaattgacttttagcccaaatttacattgttaattaaatcaagaaggaagaagatctaagagctcccattgataggcaagcctagagagaactagctaaatttatcatgctaggatattgaaacacagaaagtttacatacatttatgaagggtcaatttagtttggacagtgaggtatttgtcttagtggaaaaaaggagaattagtctgatcaaatcgtgaagtaatacagtgaacttgcaggtgcacaaaataagagggccacatctatatggtgcagtctggaattctgtttaagtttgtaggtacctcttggacttctgaattgatccagttgtcatccaccacagacatctcacatcagatacagacagttccaagattgacaacagagaacaacctgctggaaagacctgggcagaaatgggagagccctgcgggaaccatgctacattttcatctaaagagagaatgcacatctgatgagactgaaagttctttgttgttttagattgtagaatggtattgaattggtctgtggaaaattggcattgcttttatttctttgtgtaatcaagtttaagtaataggggatatataatcataagcattttagggtgggagggactattaagtaattttaagtgggtggggttatttagaatgttagaataatattatgtattagatatcgctataagtggacatgcgtacttacttgtaaccctttaccctataattgctatccttaaagatttcaaataaactcggagggaactgcagggagaccaacttatttagagcgaattggacatggataaaaaccccagtgggagaaagttcaaaggtgattagattaataatttaatagaggatgagtgacctctgataaattactgctagaatgaacttgtcaatgatggatggtaaattttcatggaagttataaaagtgataaataaaaacccttgcttttacccctgtcagtagccctcctcctaccactgaaccccattgcccctacccctccttctaactttattgctgtattctcttcactctatatttctctctatttgctaatattgcattggctgttacaataaaaattcaataaagatttagtggttaagtgcaaaaaaaaaa

SEQ ID NO: 45881 - DNA, 2517 bp, Homo sapiens
ttccagcgttgcgagacggtcggttccaagtgggcctgggcgcgggggagaggcgggtctgtcctcgggaactgcaaggccctgtgagcgggaggactgggatcccggccgcggctgctggaagcgtcgaagctcagcggggccgcggacactgacctgtgcttagaactcatcctggcccgcagagcctgccgcgagtccctggcgtcccctgtggcgggctcttggagccactttcccgagcggaagtcagcccgcggctcggactccggcgggacctgctcggaggaatggcgccgcgggtttcaagcactgtcttcctgttggccctgacaatcatagccagcacctgggctctgacgcccactcactacctcaccaagcatgacgtggagagactaaaagcctcgctggatcgccctttcacaaatttggaatctgccttctactccatcgtgggactcagcagccttggtgctcaggtgccagatgcaaagaaagcatgtacctacatcagatctaaccttgatcccagcaatgtggattccctcttctacgctggcccagggccagccaggccctctcagggatgttgagatctctatttcaaatgagaccaaagatctgcttctggcagctgtcagtgaggactcatctgttacccagatctaccatgcagttgcagctctaagtggctttggccttcccttggcatcccaagaagcactcagtgcccttactgctcgtctcagcaaggaggagactgtgctggcaacagtccaggctctgcagacagcatcccacctgtcccagcaggctgacctgaggagcatcgtggaggagattgaggaccttgttgctcgcctggatgaactcgggggcgtgtatctccagtttgaagaaggactggaaacaacagcgttatttgtggctgccacctacaagctcatggatcatgtggggactgagccatccattaaggaggatcaggtcatccagctgatgaacgcgatcttcagcaagaagaactttgagtccctctccgaagccttcagcgtgggcctctggaagctgctgtgctctcgcataatcgctaccacgtgccagttgtggttgtgcctgagggctctgcttccgacactcatgaacaggctatcttgcggttgcaagtcaccaatgttctgtctcagcctctgactcaggccactgttaaactagaacatgctaaatctgttgcttccagagccactgtcctccagaagacatccttcacccctgtagggattgtttttgaactaaatttcatgaaccgtcaaattttccagtggttattatgacttccttgtcgaagttgaaggtgacaaccggtatattgcaaataccgtagagctcagagtcaagatctccactgaagttggcatcacaaatgttgatctttccaccgtggataaggatcagagcattgcacccaaaactacccgggtgacatacccagccaaagccaagggcacattcatcgcagacagccaccagaacttcgccttgttcttccagctggtagatgtgaacactggtgctgaactcactcctcaccagacatttgtccgactccataaccagaagactggccaggaagtggtgtttgttgccgagccagacaacaagaacgtgtacaagtttgaactggatacctctgaaagaaagattgaatttgactctgcctctggcacctacactctctacttaatcattggagatgccactttgaagaacccaatcctctggaatgtggctgatgtggtcatcaagttccctgaggaagaagctccctcgactgtcttgtcccagaaccttttcactccaaaacaggaaattcagcacctgttccgcgagcctgagaagaggccccccaccgtggtgtccaatacattcactgccctgatcctctcgccgttgcttctgctcttcgctctgtggatccggattggtgccaatgtctccaacttcacttttgctcctagcacgattatatttcacctgggacatgctgctatgctgggactcatgtatgtctactggactcagctcaacatgttccagaccttgaagtacctggccatcttgggcagtgtgacgtttctggctggcaatcggatgctggcccagcaggcagtcaagagaacagcacattagttccagaagaaagatggaaattctgaaaactgaatgtcaagaaaaggagtcaagaacaattcacagtatgagaagaaaaatggaaaaaaaaaaactttatttaaaaaagaaaaaagtccagattgtagttatacttttgcttgtttttcagtttccccaacacacagcagatacctggtgagctcagatagtctctttctctgacactgtgtaagaagctgtgaatattcctaacttacccagatgttgcttttgaaaagttgaaatgtgtaattgttttggaataaagagggtaacaataggaaaaaaaaaaaaaaagtcgac

SEQ ID NO: 45882 - DNA, 4287 bp, Homo sapiens
ttttttttttttttcctggggagttgtgaggatgtttttgtttggttggttttggttgggatgtttttttaagagcgtcatatagatatttatatatataaattattagtgtggggaaggggcaaggggcatacattgcagagggggcgcgcacacagggatcggggaggggcaggggtggcacacgatgctacgcaaaacagccacatctaacagatgaaataatcacaccaacggggcaggggaggggcggcggccacaggggttgggcatgggggaggagaaaagcaggggggacaaggaagagagacctggtccaagattctgtgcgctttctgtccccatcctcgccacctccccacctctgcacaccacatcgggccttggccttctgtctgtccctccctcccccactctctgtccagctgcggaggccctgcaactgagcagcaccctcttggctctgggtggcaggccaagggcacggtggggggagggtgggggtgctccaaggtccaatgtaggagccatggtgctctcttgatcgcaggttctacagtggcttgtcgctttccttcttcaggtgactgtagtagtcctccctgggcaggcagcggcacactgtgcagcgggtgatgggcatgcagccactgctgctgttgccagcgccaagcgctgccagctcagctgactgtgcgtgcatggcctgcagctgatgagctgctgacatcggggcagaaagggaggccggcaggtcccggtaaggggcagcaaagagctggtgacgaagaacttcgttctcgtgcagagggtgaggaagcagggggttagggagagttccagctgggtaggggatccgggtaaggtgagaccctgaggccagggggtcaatgagagggtgcaccgaggcagaggctgcatggatagcatcttgctggtgcaggtgcaggtgcgagtggatgtgggagtgctggtggtgatggggagtcacattgagcatctgcagccgggccagtgggtcattgcccagggccgccaccctttctgcgtgctgcctctcagctgccagccgctcagcataggacatgtcaggccgcagggctggcccagctgccagcgctagacgttctcgctccaggggccccaggctcggatgaaaggggaaagggtgcaggccaggtgggccagggctgcagaggccagggccccccatgtcggggaaagggatccaagcccggcccaggggaccccatgtaggggttccagctcactaggcttcacctcaaagccaggcttgaggcggtcacggaggtctcgttcacgggcttcccgttccctctcccgggcagctggatcactgctgtacagggccgggacattgtaacccaggagccccgggtccactgcccccaggggcacgtagaatggatggttgcgattgccaggagacatgacatgaggccgggcatattcactgagagtgcgcaaggctggagtgtcaggacccaggtaggggggcactgtagccaccgcactgcccggttcaaatggagggcgatggggcactgggcccagagatgggcattccaccggagcacggccctcctgagccaacttcacgctgcgttcaagctcgcgctccttctcgcgctcgcgctctttctcgcgttcccgctcgcgctcgcgctccttttcttcgcgcgcgcgctgctcggcctcgcgccgcaccttctccaccaggtcggcccgcttcttggccagcttggagccctccagtggcacgaagtacaggtcgctgcgcgcgcacgagttgaagccgcgatccaggtgtttgttgaacctggcagactgactggcatggctgggtacatctaccaccttgggagggggcgaggggctgcgggctgggggcaccgggctctcgggggtctcatactcctcagccggctcctgtttgatctgcgtggcgctcaggggcggccctgaggcaggggccgcaggtggtggtggcagcgatggcaggcctgagggccccgcaggtggcaggggcccaggtcccacggtgggcgagcccggcttgaaggtccctgggcctgcaggtggcgaggttcctcgatagcccggtggggtccccgttcggaaggagggaggcgacccgggtttgtatccgggtggggtggctgtcttgtaggcccccggggacggggctctctttccgtacggtgggggcccaggtggggaggccgttttgtagcctgctggcgaggaagccacggtggcaatgaccgtggaaagggtagccgaagaggtggtgaccgtaggcaccggtgggaaagggtagggcgccccttgagggccctgggaaggggaggggtgtgaacatgggtaggacccttgagaagtggaagaggaagagttggaagaggaagagactggagggccattggggcctgcttggctgtaggacacctggctgtgaggtgggggcaggtgtgctggccctggtgggtagggcctcagagaccccagggagggagacatggcgtaagggtgtgcgtggtgggagctaccgccctccagtgggtggggaaatgctccaggaggagggggcccagagtttccgtgatgctgctgctgctgctgctgctgctgctgctgttgctgttgctggtggtgatggtgatgtgttgagactggtgggtgggcggtggactgggccccagtagagggagggaaggggcctggatgggcattgctgttggctaagaggcggccatagggaggaggtggtgggggaccctggctccacacagcctgggatgggagagaaggctgagtatacttggggggctgattggagacagagaggcttgttgggggagggaaagagtgggggtagctgggcaatgcctgggaagctgggaagggggaggcagaggaagaggaggaagaactggaagaggaggctgctgcagagctactactagaggatgaataaggaaacctcatggggggcgctggagcagaagaggaagcaggaggcagagagtggggtgaaggagccagagttgggcccttctctgggccaggaggaagtccacccataccctgtcccatggcgtggggagagggcagatgaccaggtagtggttgggcccccaggccagggggagaggctgatgcattgttgaggggtctcagggcaggtgggggaggcaggttcggtgtcacatgggggaagttggctggtggtggagcagaaggtaggttcccaccacccactggagtggtaggcggctttgttgggggagcaccactagccccagagcttgatactgaaatgggagtagtgggtggggggtgctgcttacccccattagggccccccactgatgaggcagcccctccccccttgggacccattgggggtccagacaaaactccaccagtgcccccaggatagagctgtgggtgagggggaggggccccaggaggagcctggaacattcgagatgtggggggctccatgggagcatgatatccagtgggtgtcacagaaggatggggttcaaagctagcctctggctgtcgaggggtgctgtctggcggttgaggggaaggaggaaagagtggaggtgggtggtaggggcgggctgggccctgggacaggccagaagatgagtcagagtcattctccacacttccagggctgtagatactgggggacgtgcttcggttgtcctggtcgatatccctagggtcgctgctgccatcatcattaaggctccgcccgtccaagctatccagatcggagggagactgtggccgagggagttcctgctcagttttggtcttttttggtgcattggtctcctcactttcactctctgagatctcctcactccgaccctgcttgttgacctttggggtggaggcttcctctactcgggccttcttggctgtctgcctggacttctcagctttgccatcactgctggacgtgctgacccctccaggggaggcccggcccctcgatctcagttcttcccggggcccaggggcctctttcttccgtccactcctcattgacatcgagtctttattctgtcgtgtcttcattcttcaggctgtggagaccccattctcctctgcctgggcagctgaatacagaaacttctctgctccaccccaagttccccacagctgtggtctgggaagcaggatctccaagtttccagtgtgggcacctggaacttttgcaggatctgttttcaatgaaacctgctg

SEQ ID NO: 45883 - DNA, 1235 bp, Homo sapiens
  misc_feature (1)...(1235): n = a,t,c or g
tttttttttttttggagattttaattaatttttataaaatctgagctggctgaacttcagagtacagcgacagctcaaggaagggtgggatttatctgctggtccccacctccccaagacggggagaaggaggtctcatgccaacagctgcaactcctttcagctcccagtcaaggctcaaggctcaagcagaggggaggggataggcaaagggggagggggaagctcctgaggctcagacactgcttgcttctcccttctccccattcccttcccttcccagcagaacctggctggccctgggcagagctgaggcccaggagcagctgaaaggaggtggatggggacagagcaccaaggggaaggggccctcggcccaaggggggaggaacctagcccccaccccgctacagctccccactgaattcacagcacagagaacacctctcgcccaacaactccacatggaggtataccaagtccaggggtcaaaggagcaggtgggtgacagatgggcaggggcagtgaagatgacagcaggctcaggaggggaggtggcagaaacttcctcctacccatgggaggagacgatggggcgactgatattgctgttggtggtcatggcattcagctcccacctgatatcatgaggcaaacaggactggtctaggttatactgaatcacggccagtttgcacagagtcttcagactagggcctttaagggagaagttgtggaaaggagatggtcaaaggtgaggaaaggatccagtcctggatatcaccacccaaagacagggaccttgatggcaggagcaattcaggaataactatacttactaaagtccaaaatgtgtaagtcagaatgatctataaggtcaaattcatctcccaggccttcctcaggagatggactggtacccccaaagaggacaatcttgtcaccaacaatacagcagcactggcgccggcggggacatggccccttccccttcggttcaatctttttccaggtaaaggacacaggattaaacttccagaggtcatggaagtgccggttcagccttgcattataaccaccaaagatgtacagctccccattgtagccaaagnccgagtgggctccggcggcccctcaaggcagcactgggagtcggggggacagtccagccaagcctcagttctgggtgtcaaagactcgaatgcnggttgcaggtaaatctcattgnttggaat

SEQ ID NO: 45884 - DNA, 761 bp, Homo sapiens
  misc_feature (1)...(761): n = a,t,c or g
atcaggcataaatattctgatggttaattttagacatctacttgactggattaagggacacacatagctggtcaaacacgatttcagccatgaatcaggcataaatattctgatggttaattgtagacatctacttgactggattgagagacacacatagctggtcaaacacgatttcagccatgaatcaggcataaatattctgatggttaattgtagacatctacttgactggattgagagacacacatagctggtcaaacacgatttcagccatgaatcaggcataaatattctgatggttaatcgtagacatctacttgactggattgagagacacacacagctggtcaaacacgatttcagccatgaatccggcataaatattctgatggttaatcgtagacgtctacttgactggattgagagacacacacagctggtcaaacacgatttctgggcatatctatgagggtgtttctggaagacactgagataaccatgacccaatgtggatgggcacnnnnnnnnnnnnnnnnnnnnnnnnnnnnnnnnnnnnnnntgaattgtagttcctgtaaatacctacatgtcgttgggagggaccccaatgggnagggtgactgaatcatggttggtggttaccgccatgctgttctcatgacagtgagtgagttctcatgatctgatggttttataaggggcttttcccctttgggtcagcacttcttgttgctgccatgtgaagagggatagctttg

SEQ ID NO: 45885 - DNA, 1039 bp, Homo sapiens
tttttttttttttttttttgaagtccttgtcctttattgggcaaggggtgagggaagcagacagaccggttggacatagtagatgggtgtgtgaggacaaaatgctaccagagagccagccaatccacactcccctgaaatggatgctaacacccttcaaaccctgggcattggtttcatacacagcctcttccagggataaaaggggttcttgtacagcttgttactcaaccatggaggcaagttctgagttctggttttcctaggacactaactctagtcacaaagatctctggaatgatcatacatggtggagtggcagggtgaggtatttcaaaaggataagtagaacaggagtcttgcccaagccctgtcatgtcagtgtgtgtgtgtggcctcccagcccaaccagaaattgacagacaggcatgtatatggtgaaaagatatatatatatatatatattcagaattaggcagctggactcagtttagatgatcccaattttgttggcaacatccaaagcatcgtaatcaggagccagtcgaacatatgccttcttctctccatcaggccgaatcagggtgttgaccttggccacatcaatgtcatacagcttcttcacagcctgtttaatctggtgcttgttggctttaacatccacaatgaacacaagtgtgttgttgtcttctatcttcttcatggcagactcagtggtcagcgggaaacttgatgatagcatagtggtcaagcttgtttctcctggggagcgctcttcccgaggatatttgggctgtctccggagtcgcagtgtcttcgggccgccggaaggtgggtgacgtgcggatcttcttctttttgtggctgtggacacctttcaacactgccttcttggcctttaaagccttcgctttggcttcagctttaggaggggcaggagcttccttcttcgctttcgctcgtgccgaattcttggcctcgagggccaaattccctataggagtcgtattaaattcgtaatcagtcaaggggtttccaa

SEQ ID NO: 45886 - DNA, 888 bp, Homo sapiens
gtgcgcaggcgcgccgacagccgagttttctgcgcttccttctccctctctccagacgtcgtggtcgttcggtcctatgtcgcgccgggccctccggaggctgaggggggaacagcgcggccaggagcccctcgggcccggcgccttgcatttcgatctccgtgatgacgatgacgcggaagaagaagggcccaagcgggagcttggtgtccggcgtcccgggggcgcagggaaggagggcgtccgagtcaacaaccgcttcgagctggaaaaatggacattttcctctccccctaaaaaaagataaaactccttcctggttattaactgaaatgctgatcgagctttatcctaaagaagatcagtcgtggacaagaaccttgtgaaatgttccccatttgagaccctaaaactaatgaaaatcacagcttttggataaacattgacgatcttgaggatgaccctgtggtgaacggggagaggtctggctgtgcgctcacagacgctgtggcaccagggaacaaaggaaggggtcagcgtggaaacacagagagcaagacggatggagatgacaccgagacagtgccctcagagcagtctcatgcaagtggctgggggtctgaaccgcaaccagggcctgaacaggctgatgctggctgtgcgcgacatgatggccaacttccacctcaacgacctggaggcgccgcacgaggacgacgctgagggggagggggagtgggactgacgtccgcagaggtgaccgaaaagccgtatgatgatgttcccgatttctctgttggtcggagtcggccagttgcctgaagtagggaagctgagtgtgtcgctccctggtccactgtttctcctataaatgtaaatgggtcacgc

SEQ ID NO: 45887 - DNA, 616 bp, Homo sapiens
  misc_feature (1)...(616): n = a,t,c or g
ggtattttcccttgtattaaaagctagaaatctgtctgttaatttccattccttggtcttaggcagtggagtgctttgtcataatttccgaccaggtgtccttctgctctgccagaaatcacgcctctcgccatctgttctctgcttaatactcttcaacagtcccgtgtgaccacagagtccaggtctaagctcttttggcctccgtccctgtaggcgtccctcaggatctgcacgccccgctttgaggaaagcagtgggattttgctttttgttttggaagccatgttgtgtggtctgtggacctgcttgctttttttgaatgtgagctgctctcaaatctccatcatttgcaccttgcctatttgaaatgttttaaatctaaacagaagacttgtgtattccagggaagctgcgctggttgtgatctgctctttagtcaagagacggtgatgaagtttgtgccgcggtacagcctcgtcctagaactcagcgacaggntngccttccggagaagcctgcatgatcccgatgggctggtggccacctacatcagcgaggtgcacgaacacgatgggcacctgtacctgggctctttcaggtcccccttcctctg

SEQ ID NO: 45888 - DNA, 2095 bp, Homo sapiens
tttttttttttaggcttgtactcctgcctttatttcaaagcgtcatcaaaggaaacagagcagcagcagcacctagctgaattctagatgggatataaataaaatatatatagaagaaatctaaaaacaagctaagtaaagaatccttgcagtgaggtgtaatgcaacttcatcactttattcaaatcttcaaaatagtctttattctacatttttagtataaaaattccacaagttaagtgcaccacagtgtagagagagacatacaacgctgaacttccataacagtcaatggtacagtcaaacatcacatgtacagaacacacaatttagatgaactgaaattataagataaaataaaataaaatccaatttcagaaaacaaaaatcaaaacattaaggatccctgaaatattcttaaaccctaatgagatttcactggactcaagtcattttgtagtgagacattcacaatatgaccctattaacccagtctaggaattctggggagccgaatgagtggccgcatcagacactctgacaaaaaatggtaaccagtttttgatctgaaaactcctcttaatttagctctgaacacatcaatcaagcttttgaaatgcatcctcctccttgcccctcatattttaaaccaactgttgttcacagtacagtttgcacgacatctttgttcaaacatagctcagtttttctggcaccaaagcaaatttgggttaggttcgtgtatgcagagacaacctatgaggagggcccataaggcaccctccacttttgcctgaggagatacgaaagcagaagtaatgggatctgtacttggggcacagagagggtttcagaggatccttgtgaaacactagttaaaagatgacgagtggggagaagtgcgaggaaagaaggaaattagtctgactggctttctgtcctgcaccattgattcaatggagactggcgggaggaaatggaagactagggttggagatgggatgggtggggcaagggatggaaaggaaaaggcagacaactaatgcgttccatttataacaagtaatatatatcaaagacttaaaggagattaaagaccaatcagaataatttggcaactttaattcttaggaagatcaaagttccctccaaacctaatttgatgttttattactaaaagcaaagaccagtatggtacagtattactccagagaaattaaaggaaaatccttagggcggcttcacccacattcattttatgaatggatacctcccctacctcaaaatgctttagggaggtactgctaccattacatggttccttattaaatttgaaaagtgcctgaaagtttgggcaccagaaagacaccccaacaacatgtgtctaaactgcaacttcaggttaatatgactaaagcagttacattgtgagaagtgctgaaggtatgtgatgtctttcccggcacaaaggtggccttggttcctcaccagatggtgtagccaccatctgaaccacccatgaagaagttccccttccgctgagttacgaggacgttggctccctgcatgactgcaagctgagcagcattgggagggcatccaggaggtggaggaggaatgttgccagcagtagccccagctccaaatctggcacctgcatcataccctccttccaccagcactgtggagccaggtggatagatgggaccgactggataataagccatggggattgtggaacctaaaggcccaacagccacagacttgggccatgggaagatacagagaggctcccaggaaatgcggctgacatggtggggactgtggccagcccctgggtgcacaaagctcggacgatagagctctgagtaggcaggtggagcatcggtatagggtggagcctgaggaagatgcaaggtctgagggtaaccctcttactcgctctctcaactggattcccaggaggctgcacagggtaggttggctgtgttggatattgacctttgctgttcatggtggttgcgggtccggtttgtctcggcgtcgcggacggttatttttttcgtcctcttcctgttcggagctacttccgtgt

SEQ ID NO: 45889 - DNA, 1049 bp, Homo sapiens
agattcggaacgaggcctaatccagttctcctggttttcccccgtccccgtctctcgtatttgtggtctccttgtctcctctctcccctttttcccctcccccttctctgtctcttgcttggtgttggttttctgtgtgtctctgtgtgtccccgcgccaccccctgtgctgtgtcccaaaactctgcctggctggtgcctgtcttctctcttgagggcatctgtcacctcttctgcttggtcatctgtgttcctctttatttcttcctggccccatcttgctctctccccacaccgcctgtgtctaccctcctctccccgatcccccacttctccctctctcccctggggccccaatgtcttggactctcctaccagtggcgcttgaggctacaagtccaagtatcttcagctcaagaagaagttagaagatgagttcccggccgcctggacatctgcggcgagggaactccccaggccaccgggttctttgaagtgatggtagccgggaagttgattcactctaagaagaaaggcgatggctacgtggacacagaaagcaagtttctgaaagttggtggccgccatcaaagccgccttggctcagggctaatgcgccctgaaaggcagagtccagggaccttgacccagcccctctcagcagacgcttcatgataggaaggactgaaaaagtcttgtggacaccctggtctttcccctgatgttctcgtggctgctgttgggggcagagattgacgcccccggtctttgcctctgagcgggagagtctgtgtgtatgtgtcttccccggaatccacaccaccccaccctcctcctgtcccgtggtttcatcatatctctttgcataccccatgtcttccccagttgtcccctggagtttggggggacatcccgcctcaggcatccttctcaaggggaagccaagagaggcatcaggatgggtgggtttctgattgtggcaacgtttgcaaccgttcacgattcaataaatattggatgaatttaaccgaaaaaaaaaaaaaaaaaaa

SEQ ID NO: 45890 - DNA, 412 bp, Homo sapiens
attttccgtacagacccgatttaaggctgcaaggaaggagtcctgggagcatggctttccctgagccaaagccgcggcctccagagctgccgcagaaacggttgaagacgctggactgcgggcagggggcagtgcgagccgtacgatttaatgtggatggcaattactgcctgacgtgcggcagtgacaagacgctgaagctgtggaacccgcttcgggggacgctgctgcggacgtacagcggccacggctacgaggtgctggatgcggccggctcctttgacaacagtagtctctgctccggcggcggggacaaggcggtggttctgtgggatgtggcatcagggcaggtcgtgcgcaaattccggggccacgcagggaaggtgaacacggtgcagtttaatgaaaaagc

SEQ ID NO: 45891 - DNA, 5307 bp, Homo sapiens
cggcccagcggaccccagcctctgccaggttcggtccgccatcctcgtcccgtcctccgccggcccctgccccgcgcccagggatcctccagctcctttcgcccgcgccctccgttcgctccggacaccatggacaagttttggtggcacgcagcctggggactctgcctcgtgccgctgagcctggcgcagatcgatttgaatataacctgccgctttgcaggtgtattccacgtggagaaaaatggtcgctacagcatctctcggacggaggccgctgacctctgcaaggctttcaatagcaccttgcccacaatggcccagatggagaaagctctgagcatcggatttgagacctgcaggtatgggttcatagaagggcacgtggtgattccccggatccaccccaactccatctgtgcagcaaacaacacaggggtgtacatcctcacatccaacacctcccagtatgacacatattgcttcaatgcttcagctccacctgaagaagattgtacatcagtcacagacctgcccaatgcctttgatggaccaattaccataactattgttaaccgtgatggcacccgctatgtccagaaaggagaatacagaacgaatcctgaagacatctaccccagcaaccctactgatgatgacgtgagcagcggctcctccagtgaaaggagcagcacttcaggaggttacatcttttacaccttttctactgtacaccccatcccagacgaagacagtccctggatcaccgacagcacagacagaatccctgctaccagtacgtcttcaaataccatctcagcaggctgggagccaaatgaagaaaatgaagatgaaagagacagacacctcagtttttctggatcaggcattgatgatgatgaagattttatctccagcaccatttcaaccacaccacgggcttttgaccacacaaaacagaaccaggactggacccagtggaacccaagccattcaaatccggaagtgctacttcagacaaccacaaggatgactgatgtagacagaaatggcaccactgcttatgaaggaaactggaacccagaagcacaccctcccctcattcaccatgagcatcatgaggaagaagagaccccacattctacaagcacaatccaggcaactcctagtagtacaacggaagaaacagctacccagaaggaacagtggtttggcaacagatggcatgtgggatatcgccaaacacccaaagaagactcccattcgacaacagggacagctgcagcctcagctcataccagccatccaatgcaaggaaggacaacaccaagcccagaggacagttcctggactgatttcttcaacccaatctcacaccccatgggacgaggtcatcaagcaggaagaaggatggatatggactccagtcatagtacaacgcttcagcctactgcaaatccaaacacaggtttggtggaagatttggacaggacaggacctctttcaatgacaacgcagcagagtaattctcagagcttctctacatcacattgaaggcttggaagaagataaagaccatccaacaacttctactctgacatcaagcaataggaatgatgtcacaggtggaagaagagacccaaatcattctgaaggctcaactcatttactggaaggttatacctctcattacccacacacgaaggaaagcaggaccttcatcccagtgacctcagctaagactgggtcctttggagttactgcagttactgttggagattccaactctaatgtcaatcgttccttatcaggagaccaagacacattccaccccagtggggggtcccataccactcatggatctgaatcagatggacactcacatgggagtcaagaaggtggagcaaacacaacctctggtcctataaggacaccccaaattccagaatggctgatcatcttggcatccctcttggccttggctttgattcttgcagtttgcattgcagtcaacagtcgaagaaggtgtgggcagaagaaaaagctagtgatcaacagtggcaatggagctgtggaggacagaaagccaagtggactcaacggagaggccagcaagtctcaggaaatggtgcatttggtgaacaaggagtcgtcagaaactccagaccagtttatgacagctgatgagacaaggaacctgcagaatgtggacatgaagattggggtgtaacacctacaccattatcttggaaagaaacaaccgttggaaacataaccattacagggagctgggacacttaacagatgcaatgtgctactgattgtttcattgcgaatcttttttagcataaaattttctactctttttgttttttgtgttttgttctttaaagtcaggtccaatttgtaaaaacagcattgctttctgaaattagggcccaattaataatcagcaagaatttgatcgttccagttcccacttggaggcctttcatccctcgggtgtgctatggatggcttctaacaaaaactacacatatgtattcctgatcgccaacctttcccccaccagctaaggacatttcccagggttaatagggcctggtccctgggaggaaatttgaatgggtccattttgcccttccatagcctaatccctgggcattgttttccactgaggttgggggttggggtgtactagttacacatcttcaacagaccccctctagaaatttttcagatgcttctgggagacacccaaagggtgaagctatttatctgtagtaaactatttatctgtgtttttgaaatattaaaccctggatcagtcctttgatcagtataattttttaaagttactttgtcagaggcacaaaagggtttaaactgattcataataaatatctgtacttcttcgatcttcaccttttgtgctgtgattcttcagtttctaaaccagcactgtctgggtccctacaatgtatcaggaagagctgagaatggtaaggagactcttctaagtcttcatctcagagaccctgagttcccactcagacccactcagccaaaatctcatggaagaccaaggagggcagcactgtttttgttttttgtttttggttttttttttttttggacactgtccaaaggttttccatcctgtcctggaatcagagttggaagctgaggagcttcagcctcttttatggtttaatggccacctgttctctcctgtgaaaggctttgcaaagtcacattaagtttgcatgacctgttatccctggggccctatttcatagaggctggccctattagtgatttccaaaaacaatatggaagtgccttttgatgtcttacaataagagaagaagccaatggaaatgaaagagattggcaaaggggaaggatgatgccatgtagatcctgtttgacatttttatggctgtatttgtaaacttaaacacaccagtgtctgttcttgatgcagttgctatttaggatgagttaagtgcctggggagtccctcaaaaggttaaagggattcccatcattggaatcttatcaccagataggcaagtttatgaccaaacaagagagtactggctttatcctctaacctcatattttctcccacttggcaagtcctttgtggcatttattcatcagtcagggtgtccgattggtcctagaacttccaaaggctgcttgtcatagaagccattgcatctataaagcaacggctcctgttaaatggtatctcctttctgaggctcctactaaaagtcatttgttacctaaacttatgtgcttaacaggcaatgcttctcagaccacaaagcagaaagaagaagaaaagctcctgactaaatcagggctgggcttagacagagttgatctgtagaatatctttaaaggagagatgtcaactttctgcactattcccagcctctgctcctccctgtctaccctctcccctccctctctccctccacttcaccccacaatcttgaaaaacttcctttctcttctgtgaacatcattggccagatccattttcagtggtctggatttctttttattttcttttcaacttgaaagaaactggacattaggccactatgtgttgttactgccactagtgttcaagtgcctcttgttttcccagagatttcctgggtctgccagaggcccagacaggctcactcaagctctttaactgaaaagcaacaagccactccaggacaaggttcaaaatggttacaacagcctctacctgtcgccccagggagaaaggggtagtgatacaagtctcatagccagagatggttttccactccttctagatattcccaaaaagaggctgagacaggaggttattttcaattttattttggaattaaatacttttttccctttattactgttgtagtccctcacttggatatacctctgttttcacgatagaaataagggaggtctagagcttctattccttggccattgtcaacggagagctgggccaagtcttcacaaacccttggcaacattgcctgaagtttatggaataagatgtattctcactcccttgatctcaagggcgtaactctggaagcacagcttgactacacgtcatttttaccaatgattttcaggtgacctgggctaagtcatttaaactgggtctttataaaagtaaaaggccaacatttaattattttgcaaagcaacctaagagctaaagatgtaatttttcttgcaattgtaaatcttttgtgtctcctgaagacttcccttaaaattagctctgagtgaaaaatcaaaagagacaaaagacatcttcgaatccatatttcaagcctggtagaattggcttttctagcagaacctttccaaaagttttatattgagattcataacaacaccaagaattgattttgtagccaacattcattcaatactgttatatcagaggagtaggagagaggaaacatttgacttatctggaaaagcaaaatgtacttaagaataagaataacatggtccattcacctttatgttatagatatgtctttgtgtaaatcatttgttttgagttttcaaagaatagcccattgttcattcttgtgctgtacaatgaccactgttattgttactttgacttttcagagcacacccttcctctggtttttgtatatttattgatggatcaataataatgaggaaagcatgatatgtatattgctgagttgaaagcacttattggaaaatattaaaaggctaacattaaaagactaaaggaaacagaca

SEQ ID NO: 45892 - DNA, 1833 bp, Homo sapiens
gctcgacaaccaagtgattcattccaaggacaggcagcctagtctggtgtttggaatgacgacagtatgttctaatacccgatttacaattacattgaactacaaggatcccctcactggagatgaagagaccttggcttcatatgggattgtttctggggacttgatatgtttgattcttcaagatgacattccagcgcctaatataccttcatccacagattcagagcattcttcactccagaataatgagcaaccctctttggccaccagctccaatcagactagcatgcaggatgaacaaccaagtgattcattccaaggacaggcagcccagtctggtgtttggaatgacgacagtatgttagggcctagtcaaaattttgaagctgagtcaattcaagataatgcgcatatggcagagggcacaggtttctatccctcagaacccatgctctgtagtgaatcggtggaagggcaagtgccacattcattagagaccttgtatcaatcagctgactgttctgatgccaatgatgccttgatagtgttgatacatcttctcatgttggagtcaggttacatacctcagggcacccgaagccaaagcactgtccatgccggagaagtggaagttgagcggggtgtataagctgcagtacatgcatcctctctgcgagggcagctccgctactctcacctgtgtgcctttgggaaacctgattgttgtaaatgctacactaaaaatcaacaatgagattagaagtgtgaaaagattgcagctgctaccagaatcttttatttgcaaagagaaactaggggaaaatgtagccaacatatacaaagatcttcagaaactctctcgcctctttaaagaccagctggtgtatcctcttttggcttttacccgacaagcactggaacctaccagatgtatttgggttggtcgtcctcccattggaactgaaactacggatcttccgacttctggatgttcgttccgtcttgtctttgtcctgcggtttgtcgtgacctctttactgcttcaaatgacccactcctgtggaggtttttatatctgcgtgattttcgagacaatactgtcagagttcaagacacagattgggaaagaactgtacaggaagaggcacatacaaagaaaagaatccccgaaagggcggtttgtgatgctcctgccatcgtcaactcacaccattccattctatcccaaccccttgcaccctaggccatttcctagctcccgccttcctccaggaattatcgggggtgaatatgaccaaagaccaacacttccctatgttggagacccaatcagttcactcattcctggtcctggggagacgcccagccagtttcctccactgagaccacgctttgatccagttggcccacttccaggacctaaccccatcttgcccagggcgaggcggccccaatgacagatttccctttagacccagcaggggtcggccaactgatggccggctgtcattcatgtgattgatttgtaatttcatttctggagctccatttgtttttgtttctaaactacagatgtcaactccttggggtgctgatctcgagtgttattttctgattgtggtgttgagagttgcactcccagaaaccttttaagagatacatttatagccctaggggtggtatgacccaaaggttcctctgtgacaaggttggccttgggaatagttggctgccaatctccctgctcttggttctcctctagattgaagtttgttttctgatgctgttcttaccagattaaaaaaaagtgtaaattaaaaaaaaaaaaaa

SEQ ID NO: 45893 - DNA, 2907 bp, Homo sapiens
ttttttttttttttccattaaaaaaactttattttcattttttacaaagaatatccccatctggggtaaaaatatatctggttaagtacaaaatatagtctttaccatacaaaaagatacataatacaaaaacatgaaaccaaccatcttcagcccacactttctggctgtaataactctcagaaaagggtggagctcagtgctctgacacaggacagtgaacaaagtgctatggctgagagtgactgaccaagtgctggcagctgcagtgaggggccaatatccctatctcctaacacagggcaggaagggggttcaaagggcttttatgaagacctgccctctagtttctcatggcagtatttgggaggttctgaacacagggttggggcatcttgatcaagagttccctccttgggtttgaagtcacagtgggcaaggctgacagcagcaacccctttcacatgatttaagcgttagaattatataattctgtacattgggggcaatctcaaaagtagtaaaattttttttgtcttttggcttaaccctagagacacagtagaccagtttcagcttacatttaagatggcagaaggggagaacaaaaaatttgacaggaattaaagtgctaagaacatcaccttagaatcaattccaaggacttacatgaagagaaaaccatcctcccatatgaaaatatttgcagtaggagaacacagtgcaataggctccaaaaatggcttttaagacctttggtggggcagttactactgctttaaaagccaggttaaagtatactctaagcaaagatgaccgtagagcagctagcttccttttttataatcacagggaaagctctctccattgtccatcaaatcagctctagaaggtttttcttttttttctacaagtgcacaaaggggaaacactgattttaagaacctccttttcccaaagttttggccacaatttcccttttcatcttcctagtttgttaaattggctcttctccacatgatacgtaagttcaaggtccaaagttcctatcacaatttacaaaaagcctccaaaaaaccttgaaaagcttacgccaggaggccatttttacctgacccgaaactatcgaaaaggcctcaattttcaaggagatctgaggaaaatggatgggcctgagtttttctagttatttttaaacccatccaacaaacacccctgtatcacaacatgggcgctggctgaggatgagtccgcatcctttaaggcccaggagattgcctgctgaccacctcctacattaggaagtcagaggctaaggtggacccacactccattgcagagactgttgagtctctgaaaaagtgagtgtccaggaagagagacaaaaagaaacaagtaggtaaagctgcttcttttcttccacatgctcactgcacattgttgttgaggatgcagggatccacctcagtataagtcggtggtggcatgaacttgaactcaggggcatacataaagatagggctgtcttgagagccatccatgtcatctagcagaggagtggttgggctctccaatcggtgatcttcaggaatgacatccatatagcagggaggagcttctggggtatcagggatgttcagatctacccaactcatctcagagctggttcggctggccatgctggatgttctgctgcttagacctgatctgctgccaattaccaggggcaggtcaaggatgaccttcttggatccaggaacgctaacatagatcagtaaggaatattcaactcgaaggatgttgcagcccaggatagaaggcctgatcttctgaacccgaaggctcttgccacgccatgatgcgcatgtccctgagataatatgattgcctctgactgatgacaacttctgagtcagcaccttggtctggccattggcaaggtaagtgtggcgggccacaatggcagctttggggaccacaattcgggaacatgtattctcaaagtcagcatggatggaaatctcatcaccttcacagaatccttttctgtcaattcgagcagagacagacacccgcccatcaggaatgaacatgcaggaaactttcttttcttttttagcagacacaggtgccattaaatcaggggtattgacatccaccagatccactacttcaaagtttttctttgtctcttgagttggctggctcgggcggtcaagaaaagccttcacccagtagtctacacacccatattttcctttgaaggatgttcccagaggcccctgaggaagctcaaagccgaacttgtactcatatttgtttccaggtctcatgatcaccatctcattctcacctgttggctggtcttccagaagaagcgtgtcttcatagcgcaggtactccgaagtctgtttgcactgctgggatccctgcatccaaagcactttagccactccgcaagccaggatcctaacggctttgacacgagtaacttcacacacctccactatcacccggccagccaccttctcgccactgccgtacaccttttcagggtcgttaaagaccacctcaaaagacttgatcttcttgaacatcaccatgatggaactgagttggttttaagagttagaaatgacggtggaagaaaaaaaaaagctccaaatcggaggaaacccctttgcaaaaaattatttcactttaaggaattaaggtattcttaagcagtttgagcttaaaaataaaataagatttaaacaaatgaatattaactactaggttttcgaaaaggcgcctaaaaaatatacgccgctggttacactaagcgaattcagagaaaaagccttctttcccccaattgctggagaaaagatccgatctccacaagcactcctttggagaaaaatg

SEQ ID NO: 45894 - DNA, 4893 bp, Homo sapiens
  misc_feature (1)...(4893): n = a,t,c or g
gggtgattcagcgcccggcgaggcggaacgggccgcaagaggaggaggggagagcccgtccgcgcctgggctcccggggtggcacgagcccgcggccggagtgcgaggcggaggcgaggaggccgcggggacgggaggcgaggccggccgggcccccgaagccatggagaacgcgcacaccaagacggtggaggaggtgctgggccacttcggcgtcaacgagagtacggggctgagcctggaacaggtcaagaagcttaaggagagatggggctccaacgagttaccggctgaagaaggaaaaaccttgctggaacttgtgattgagcagtttgaagacttgctagttaggattttattactggcagcatgtatatcttttgttttggcttggtttgaagaaggtgaagaaacaattacagcctttgtagaaccttttgtaattttactcatattagtagccaatgcaattgtgggtgtatggcaggaaagaaatgctgaaaatgccatcgaagcccttaaggaatatgagcctgaaatgggcaaagtgtatcgacaggacagaaagagtgtgcagcggattaaagctaaagacatagttcctggtgatattgtagaaattgctgttggtgacaaagttcctgctgatataaggttaacttccatcaaatctaccacactaagagttgaccagtcaattctcacaggtgaatctgtctctgtcatcaagcacactgatcccgtccctgacccacgagctgtcaaccaagataaaaagaacatgctgttttctggtacaaacattgctgctgggaaagctatgggagtggtggtagcaactggagttaacaccgaaattggcaagatccgggatgaaatggtggcaacagaacaggagagaacaccccttcagcaaaaactagatgaatttggggaacagctttccaaagtcatctcccttatttgcattgcagtctggatcataaatattgggcacttcaatgacccggttcatggagggtcctggatcagaggtgctatttactactttaaaattgcagtggccctggctgtagcagccattcctgaaggtctgcctgcagtcatcaccacctgcctggctcttggaactcgcagaatggcaaagaaaaatgccattgttcgaagcctcccgtctgtggaaacccttggttgtacttctgttatctgctcagacaagactggtacacttacaacaaaccagatgtcagtctgcaggatgttcattctggacagagtggaaggtgatacttgttcccttaatgagtttaccataactggatcaacttatgcacctattggagaagtgcataaagatgataaaccagtgaattgtcaccagtatgatggtctggtagaattagcaacaatttgtgctctttgtaatgactctgctttggattacaatgaggcaaagggtgtgtatgaaaaagttggagaagctacagagactgctctcacttgcctagtagagaagatgaatgtatttgataccgaattgaagggtctttctaaaatagaacgtgcaaatgcctgcaactcagtcattaaacagctgatgaaaaaggaattcactctagagttttcacgtgacagaaagtcaatgtcggtttactgtacaccaaataaaccaagcaggacatcaatgagcaagatgtttgtgaagggtgctcctgaaggtgtcattgacaggtgcacccacattcgagttggaagtactaaggttcctatgacctctggagtcaaacagaagatcatgtctgtcattcgagagtggggtagtggcagcgacacactgcgatgcctggccctggccactcatgacaacccactgagaagagaagaaatgcaccttgaggactctgccaactttattaaatatgagaccaatctgaccttcgttggctgcgtgggcatgctggatcctccgagaatcgaggtggcctcctccgtgaagctgtgccggcaagcaggcatccgggtcatcatgatcactggggacaacaagggcactgctgtggccatctgtcgccgcatcggcatcttcgggcaggatgaggacgtgacgtcaaaagctttcacaggccgggagtttgatgaactcaacccctccgcccagcgagacgcctgcctgaacgcccgctgttttgctcgagttgaaccctcccacaagtctaaaatcgtagaatttcttcagtcttttgatgagattacagctatgactggcgatggcgtgaacgatgctcctgctctgaagaaagccgagattggcattgctatgggctctggcactgcggtggctaaaaccgcctctgagatggtcctggcggatgacaacttctccaccattgtggctgccgttgaggaggggcgggcaatctacaacaacatgaaacagttcatccgctacctcatctcgtccaacgtcggggaagttgtctgtattttcctgacagcagcccttggatttcccgagggctttgattcctgttcagctgctctgggtcaatctggtgacagatggcctgcctgccactgcactggggttcaaccctcctgatctggacatcatgaataaacctccccggaacccaaaggaaccattgatcagcgggtggctctttttccgttacttgggctattggctgttacgtcgggcgctgctaccgtggggtgctgctgcatgggtgggttcattgctgctgacggtggtccaagagtgtccttctaccagctgagtcatttcctacagtgtaaagaggacaacccggactttgaaggcgtggattgtgcaatctttgaatccccatacccgatgacaatggcgctctctgttctagtaactatagaaatgtgtaacgccctcaacagcttgtccgaaaaccagtccttgctgaggatgcccccctgggagaacatctggctcgtgggctccatctgcctgtccatgtcactccacttcctgatcctctatgtcgaacccttgccactcatcttccagatcacaccgctgaacgtgacccagtggctgatggtgctgaaaatctccttgcccgtgattctcatggatgagacgctcaagtttgtggcccgcaactacctggaacctggtaaagagtgtgtgcagcctgccaccaaatcctgctcgttctcggcatgcaccgatgggatttcctggccgtttgtgctgctcataatgcccctggtgatctgggtctatagcacagacactaactttagcgatatgttctggtcttgactgacagttttccataaagaagatgtttaacttaatcaattaatttttttattgtttaaagcaactgtctatttctgctgaattttcacatgaacatactggctggtgatggaggtttcatactctagattttgttttgctttttctgactccagtggggcaagattttccttttttatacacataattaaagtgtccattgacatgtacagagaactaacactattttatgcaaatatttttttgtagatgaaaaagcatgtacagtgttctgtttaatactcatccttgtataaaaaaaatagttgagccagcagacattgtcagcaaattaattggcagcagattttaggaaatgaatgtgtgtggttttttttctaaaactaaatagcatgtattgtgtcttttgcatgatgatccggatttaatttgatatcacagtctaatttttattcataagccaatttttctgcactgagcagagtcttgctacctcagtcagtattgttttggtttgctacttccctcacccactttggcctccgttcaccccaccccaccccacctctccccaccttacccccgccccgcttggcttcttctttaggattgtgatggttcgttctgtttacatcaatcagttttaacgagaggtatgcctgtactcgcttgtgcagaaaacattgttccagattcaatcgactgggtttatgtcccttcacatagtttttaaggttatttatttaaatgtctaatgtattttattgtaacagacattgttttgccaacattgcctatttcagtggcacgtcatctagttttaaaaaaataaaacattttaaatggacagagaaaaataactgtcttgtctttaactcgtaagtggcttacctgggactaacagacatgtccaactttctctccagttcttagctcagaactttagttgtactctgcttgaggggaagaaggctcctgctctgctgtgtaggtagtcataggaattgtattcttaatgtacaggcactaattgtcatctgtgatgtacattttatgcaagtttctgctggcctggtatagagaacataagggcaagtgtgtatgtgtgtgtatgtgtgtgttttgtaaaatctgtaaatagcacatgaccaaatgaacatattgtatagaactatttttatttgaatgtggcactaaccaccaccaccgttactacgatcaatgtttgcgcatgttcgagatgagtctcaccaacagtgtgtaagtcattaacagtcctaactgtggtgttttcctccaatgccttccaacatccatcaactaaccaatactggagtaaccgcttcctaaaccattttgcagaaatgtaagggtgttcggttgcgtgcatgtgcgtttttagcaacacatctaccaaccctgtgcatgactgatgttggggaaaaagaaaagtaaaaaacttcccaactcactttgtgttatgtggaggaaatgtgtattaccaatggggttggttagctttnaaaatcaaaatactgggttacaggatggtaccaatttaggctttaatcaggaaaggcctcttccagaggaag

SEQ ID NO: 45895 - DNA, 3798 bp, Homo sapiens
tttttttttttttatcatagaatagatttatttacctgaaaccatgtctgtgcgacgctcattgttaccagcacagaaagaaacaaactgatctctatttacagtctaaagtcaaacatgcgcagtgataaattgacatttagcattttattaagataaatgcatcacaatatttgtattgcaccaacatctgtctactgcttctgatttcattaaataagttacatttaatacagtgcgaaatagctgtctgcacactcagaaaataactgaaaatgaactggaggcctacattttaaccattcaacacctgtagtgtttttaatgaatttataaataagcaaactgtacagggccaattaaaaagtagcatgttccaatgtcactggagagggatctggctacttacaaccgaaggcatggcattacaattgaatactgtacatttatataagctatgacattttgcagagaaatgtggcgacttggctgacggcttccaagttcttagataaggttacagagcctcattcctcttgcagcaaagaaaccaaacttctctggagaggctttctgattaagctaaattgtacatctgtaatcagtattttgatttaaaagctaacaaccccattggtaatacacatttcctccacataacacaaagtgagttgggaagttttttacttttctttttccccaacatcagtcatgcacagggttggtagatgtgttgctaaaaacgcacatgcacggcaaccgaacacccttacatttctgcaaaatggtttaggaagcggttactccagtattgcaggttccaggtagttgcgggccacaaacttgagcgtctcatccatgagaatcacgggcaaggagattttcagcaccatcagccactgggtcacgttcagcggtgtgatctggaagatgagtggcaagggttcgacatagaggatcaggaagtggagtgacatggacaggcagatggagcccacgagccagatgttctcccaggggggcatcctcagcaaggactggttttcggacaagctgttgagggcgttacacatttctatagttactagaacagagagcgccattgtcatcgggtatggggattcaaagattgcacaatccacgccttcaaagtccgggttgtcctctttacactgtaggaaatgactcagctggtagaaggacactcttggaccaccgtcagcagcaatgaaccaccatgcagcagcacccacgggtagcagcgccgacgtaacagccaatagccaagtaacggaaaaagagccacccgctgatcaatggttcctttgggttccggggaggtttattcatgatgtccagatcaggagggttgaaccccagtgcagtggcaggcaggccatctgtcaccagattgacccagagcagctgaacaggaatcaaagcctcgggaaatccaagggctgctgtcaggaaaatacagacaacttccccgacgttggacgagatgaggtagcggatgaactgtttcatgttgttgtagattgcccgcccctcctcaacggcagccacaatggtggagaagttgtcatccgccaggaccatctcagaggcggttttagccaccgcagtgccagagcccatagcaatgccaatctcggctttcttcagagcaggagcatcgttcacgccatcgccagtcatagctgtaatctcatcaaaagactgaagaaattctacgattttagacttgtgggagggttcaactcgagcaaaacagcgggcgttcaggcaggcgtctcgctgggcggaggggttgagttcatcaaactcccggcctgtgaaagcttttgacgtcacgtcctcatcctgcccgaagatgccgatgcggcgacagatggccacagcagtgcccttgttgtccccagtgatcatgatgacccggatgcctgcttgccggcacagcttcacggaggaggccacctcgattctcggaggatccagcatgcccacgcagccaacgaaggtcagattggtctcatatttaataaagttggcagagtcctcaaggtgcatttcttctcttctcagtgggttgtcatgagtggccagggccaggcatcgcagtgtgtcgctgccactaccccactctcgaatgacagacatgatcttctgtttgactccagaggtcataggaaccttagtacttccaactcgaatgtgggtgcacctgtcaatgacaccttcaggagcacccttcacaaacatcttgctcattgatgtcctgcttggtttatttggtgtacagtaaaccgacattgactttctgtcacgtgaaaactctagagtgaattcctttttcatcagctgtttaatgactgagttgcaggcatttgcacgttctattttagaaagacccttcaattcggtatcaaatacattcatcttctctactaggcaagtgagagcagtctctgtagcttctccaactttttcatacacaccctttgcctcattgtaatccaaagcagagtcattacaaagagcacaaattgttgctaattctaccagaccatcatactggtgacaattcactggtttatcatctttatgcacttctccaataggtgcataagttgatccagttatggtaaactcattaagggaacaagtatcaccttccactctgtccagaatgaacatcctgcagactgacatctggtttgttgtaagtgtaccagtcttgtctgagcagataacagaagtacaaccaagggtttccacagacgggaggcttcgaacaatggcatttttctttgccattctgcgagttccaagagccaggcaggtggtgatgactgcaggcagaccttcaggaatggctgctacagccagggccactgcaattttaaagtagtaaatagcacctctgatccaggaccctccatgaaccgggtcattgaagtgcccaatatttatgatccagactgcaatgcaaataagggagatgactttggaaagctgttccccaaattcatctagtttttgctgaaggggtgttctctcctgttctgttgccaccatttcatcccggatcttgccaatttcggtgttaactccagttgctaccaccactcccatagctttcccagcagcaatgtttgtaccagaaaacagcatgttctttttatcttggttgacagctcgtgggtcagggacgggatcagtgtgcttgatgacagagacagattcacctgtgagaattgactggtcaactcttagtgtggtagatttgatggaagttaaccttatatcagcaggaactttgtcaccaacagcaatttctacaatatcaccaggaactatgtctttagctttaatccgctgcacactctttctgtcctgtcgatacactttgcccatttcaggctcatattccttaagggcttcgatggcattttcagcatttctttcctgccatacacccacaattgcattggctactaatatgagtaaaattacaaaaggttctacaaaggctgtaattgtttcttcaccttcttcaaaccaagccaaaacaaaagatatacatgctgccagtaataaaatcctaactagcaagtcttcaaactgctcaatcacaagttccagcaaggtttttccttcttcagccggtaactcgttggagccccatctctccttaagcttcttgacctgttccaggctcagccccgtactctcgttgacgccgaagtggcccagcacctcctccaccgtcttggtgtgcgcgttctccatggc

SEQ ID NO: 45896 - DNA, 409 bp, Homo sapiens
  misc_feature (1)...(409): n = a,t,c or g
ancgcttgacatgattacgaatttaatacgactcactatagggaatttggccctcgaggccaagaattcggcacgagggactaaagcctaagtccttttcacttttcctccatctgaaggtaggtgagttcatcctcttcatagtaatgctgttttaccaagactttatagcagatggacccagaaagaattttctgctattgtgttcactacaacaggatagggacatcagacagccccagaaaccccttccagatctgatatgggactattaatttttatgctgttaattggtattcattcacaatgcagttgaagggggaaggctccactgcattctttggctaaggcctgaatgcttgctcatctgtaagatctatactcgaggttttgttttccttttaaaatt

SEQ ID NO: 45897 - DNA, 2146 bp, Homo sapiens
gttttgtttttctgagttggtggggagggagggagggggagggctgaattgttttgcagaggaagatggcatctgtgctttaaatttctcattactgggttagaaaacaaagagggagtgccctgcacattttcttttgtgcttttaaatgtttcttaagttggaacaggtttcctcgggcctgttttgactgattgctggagtgcatttgatagttaaaaattactaattggttttatttcccttcacactctgcctccccacttctccccccgttactgaaaaataaccattttagtgtcaggctagaaattgaattgctgagttttgtgtatcctttaaattaaaaaccacaagtgtttattgtagtggttaaactgtagcatctcagcatctgggtggaagctgcctatatttcttcccagtttaactgggggaccatctgtgaaattaattttccatccagacagctgctgtgagcaaatgaacataaatgctcgctggaaatttactaaccagtttttatattgacctgcagtgtaaaaagcacatttaattataaacaatatattcaaaatgggcaaattttattttcaaatgcagtgtagagctagattaaaagcaactctttgccacctactctgcccttttggcaaagttaccttgaacaaagaatcttaagggtttattaagaactctttattttcttcataccctgttctctgcagtgctttctaacagcttctgggtgcagattttccttcggcatccttttgcactcagcttattacaggtaggtagtgcttaagaaaagtcatggaggactaaagcctaagtccttttcacttttcctccatctgaaggtaggtgagttcatcctcttcatagtaatgctgttttaccaagactttatagcagatggacccagaaagaattttctgctattgtgttcactacaacaggatagggacatcagacagccccagaaaccccttccagatctgatatgggactattaatttttatgctgttaattggtattcattcacaatgcagttgaagggggaaggctccactgcattctttgggctaaggcctgaatgcttgctcatctgtaagatctatactcgaggttttgttttccttttaaaattctttagggagagagggatggtttctgaggggttctgaaagtatgattcaatgtgcaacatacaggtaggtcttcagcataagctgaaatatatgcatgtaaaaactttgacatctttttttttaattttccactttcttcttaactttacttctctttttgtcccccccccatcttacagaagttgaggccaagggagaatggtaggcacagaagaaacatggcaaactgctctgtgctttcaaaccaaagtgttccccccaaccccaaatttgtctaagcactggccagtctgttgtgggcattgttttctacaaccaaattctgggtttttttcttctttctttaaacatagaggtaccaccacaagggatgccctactctctcgcagctcttgaaagcatctgtttgagggaaaggtctctgggcaagcaagtggttatttggattgcttgcttccctttttccacctgggacattgtaatcataaaataacagtaaattccaaacctcaaaaactattatggcctgagcacagctgaaatctagcagagtttaactcttctgcctccatgtctgtcacttataattcaggttctgctgttggcttcagaacatgagcagaagaatcgttttatgctagttattgcattcatggttgaaactcaacttagggaaagggttccaatgtattaagcaatgggctgcttctccccaatcctccctaacaattcgttgtgtggacttctcatctaaaaggttagtggcttttgcttgggatcagtgctctctattgatgttcttgctggtcttccagacacattcctgttgcattaagacttgaaagacttgtagatgtgtgatgttcagggcacaggatgctgaaagctatgttactattcttagtttgtaaattgtccttttgataccatcatcttgttttctttttgtaggtataaataaaaacactgttgacaataaaaaaaaaaaaaa

SEQ ID NO: 45898 - DNA, 431 bp, Homo sapiens
atagatttggaagagacctcaattactgtttttcaggaatgtctgatcacagatacggggatggtggctctactttccagagcacaacaggacactgtgtacacatgcggggattaccttacagagctactgagaatgacatttataattttttttcaccgctcaaccctgtgagagtacacattgaaattggtcctgatggcagagtaactggtgaagcagatgtcgagttcgcaactcatgaagatgctgtggcagctatgtcaaaagacaaagcaaatatgcaacacagatatgtagaactcttcttgaattctacagcaggagcaagcggtggtgcttacgaacacagatatgtagaactcttcttgaattctacagcaggagcaagcggtggtgcttatggtagccaaatgattgggaggcatggg

SEQ ID NO: 45899 - DNA, 636 bp, Homo sapiens
tttacatgattacgaatttaatacgactcactatagggaatttggccctcgaggccaagaattcggcacgagagagagccaggttggaatgggcagcaggtagggagatccctggggaggagctgaagcccatttggcttcagtgtcccccaaacccccaccaccctcttcctaggccgccctccccacttgttaccaacatgaagctgctcgcagcaactgtgctactcctcaccatctgcagccttgaaggagctttggttcggagacaggcaaaggagccatgtgtggagagcctggtttctcagtacttccagaccgtgactgactatggcaaggacctgatggagaaggtcaagagcccagagctttcaggccgaggccaagtcttactttgaaaagtcaaaggagcagctgacacccctgatcaagaaggctggaacggaactggttaacttcttgagctatttcgtggaacttggaacacagcctgccacccagtgaagtgtccagaccattgtcttccaaccccagctggcctctagaacacccactggccagtcctagagctcctgtccctacccactctttgctacaataaatgctgaatgaatccagaaaaaaaaaaaaaaaaaa

SEQ ID NO: 45900 - DNA, 344 bp, Homo sapiens
  misc_feature (1)...(344): n = a,t,c or g
aggggctctgtgtgccccccaggaggaagaggccctgagtcctgggatcagacaccccttcacgtgtatccccacacaaatgcaagctcaccaaggtcccctctcagtccccttccctacaccctgaccggccactgccgcacacccacccagagcacgccacccgccatgggagtgtgctcaggagtcgcgggcnncccatagggggcataatctccnatataggactgagcactgannanaaaanntncnntannnntntnnttngntnnaatgngnnnncncttnnaannntncntntggggnttttnngntatntnnttctnntaanncnnttntntttg

SEQ ID NO: 45901 - DNA, 4905 bp, Homo sapiens
aaactttggtggaagaggaggctatggtggtggaggtggtggcagcagaggtagttatggaggaggtgatggtggatataatggatttggaggtgatggtggcaactatggcggtggtcctggttatagtagtagagggggctatggtggtggtggaccaggatatggaaaccaaggtggtggatatggtggaggtggaggatatgatggttacaatgaaggaggaaattttggcggtggtaactatggtggtggtgggaactataatgattttggaaattatagtggacaacagcaatcaaattatggacccatgaaagggggcagttttggtggaagaagctcgggcagtccctatggtggtggttatggatctggtggtggaagtggtggatatggtagcagaaggttctaaaaacagcagaaaagggctacagttcttagcaggagagagagcgaggagttgtcaggaaagctgcaggttactttgagacagtcgtcccaaatgcattagaggaactgtaaaaatctgccacagaaggaacgatgatccatagtcagaaaagttactgcagcttaaacaggaaacccttcttgttcaggactgtcatagccacagtttgcaaaaagtgcagctattgattaatgcaatgtagtgtcaattagatgtacattcctgaggtcttttatctgttgtagctttgtctttttctttttcttttcattacatcaggtatattgccctgtaaattgtggtagtggtaccaggaataaaaaattaaggaatttttaacttttcaatatttgtgtagttcagtttttctacattttagtacagaaactttaacaaaatgcagtttcgaaggtgtttccttgtgagttaacaagtaaagaagatcattgttaattactattttgtatgaattttgctaaagttaactgtaaagaaacacctgctgacttgcagtttaaggggaatctattctccccatttccaaaccatgatatgaatgggcgctgacatgtggagagaatagataatttgtgtgtttgcaatgtgtgttttagataaataggattgggtatttaaattagcatttgtgaatttaatagcattaagattaccttcaaatgaaaaaaaatctcaaaatttctatttggtttttgtgcattttcttttaaaatgtaatcatatgattttagtgtgttagacttgctgagtcctagctgtgtttagaacatctctattctacatttaccttggtcaaatttgaactgctgccataggttttgggtgtaaagaatgtttactgccctccatttaaattctgaaaagggatggtggatgttttccctctcctacgttagaaaccattcttaaaaacttttgaaaatatagaaccattaagcctgctatatctgagcaaattagtgggtaccttttttttcttatttaaagcacaagaggcccataaatcttgagttactttaaattcttttttttgatacaagttttcagagcaagagaataaaaatcatgtgttattaaacccctaactggctggcatgctttcctgtttgtattctatacattttgctggatgaaaccaaggatagttcaggtataattgtccaaaataacctaactgcagcagaaatgtagcacagttgcttagtacaggcttctcacttcctacagacctgaattcaaatttggatagtctgagttcttaaattcccaaagaacacactgttatttcttgtgtatatttcaacataaatcatgttgttaccaatttgtttggaaggccctggttgagaagagttttagttaataaggtcatatatacatatattaatataaaccaatgtctactgttttgctccagctagtgcttacagtttcattcgagccctgagtatgtgccctgctgttactctctttggtagttgaacgttgaattcaagtcttttgttttaagaagtactaagcaaacaagcaataaaaaggggaatggggtgtgctagtgtttgaatatgctctcttgttgctctaattctgtgcctctgtgcattaatatttggatgcatgcaatgccagcatggaaattggtcttcacatatactgcagttttccagaaacattcacaaaccaataaatgtaacagacattccatttgttaatgggcatatatgtgaaaagcagtgtagaaaataggctaatattagaaaatggttaagtcctaaataacttcaagtgtggttatataatggacactgtcaatgttcataacttaaacctgggtacctggtcaaaataatgcttgggaaacattaaaattgagctaaattgtctcaagttcttttattcatataaataaagtttaaaggaatgggggagattaacatttcctgttttatgtttgtgaaattgtttgacacaaccttgacagtatcctttaatggcatgaggttaattgtactgttaaccaactttctatgttctggaactagtattatagtgaaaacatttacagtaagttgatgtttacaacctataagcaggtgaaatctgtgtatgtgacctgtttataagttgtattagcttagctcttgtgaacagtgtggaaaagtaagccatgaggagagcgatttaaccacctttaaaggacctaagatgtgctttttaagcacagtgtggatcacagaaactcactaagacaggacttcagcagccttttgtgtttggacaagtcagcataaataaagaatgacaaggcagcagcaagagcttcaactacagagaagtgaaggcataagatactatgatgatagtgagcaactttccaaaagctagttaaatctgcttattacaactgaaatatcgaagaaagtctagcaggaaggagctcttcgccttttggaacatcaatgagagatagttgccacagtcactaggtctagcatttagacctgcaaggaagggcaataagcattaggtaaggcttgaatttgaattttttcactaattaaagagtaattttttgtaaagcaaggtaagagtaatctttttgatttgcaggttgaatgagaaccctacttgcctaaatgaggaatgtctttcctaccatctaaaatacgaaggtttctggctgggtaaggtttgtagttgacagtaaaacctgatgacaccatttgtttccctgcaagtctacattacatatttcacaactttgtccctctctagtaggcacattggaaaaattcttcaactgaaaactaccttggtaccatgtcctacacgttttaaaccttagttttaaaaattcccctgcgaaatagccataagtattcatatcaagtcagttgtgactccttgtgtatacaattcattttttgtgtcttcaggggtaaactcaatttttggtaaagtggtttcagcttttgtgaaaaccgtttttgtgtgtaagcatgacacacaacagactcagtaagctgcccatcctcatactaggaaaacaccttcaaaggaacattaaaagttaccaggggccagggcacagtgggctcacgcctggtaattcccaggcactttggggagggctgaggcagatggatcccaagtccaggaatttgagacgagcctgggcaacatagtgagagcctgtcaacaaaaaatagaaaaattagctggggcttggtgatacacatctgtagtccccagctatttgggaggctgccttgatatcaggcagtcgaggctgcagtgagctgactgccccactgtattccagcctgggtgaccccatctcaaagaagaaaagttaccagatgtcatgggtaaaggttggtcttcaagtggcctcataagttgtcttgcatttaaattcagggaattcattggaccaataggttacattttcgttccttttttgttttggttcatctgttaagcagtgggggcctaattactgctcctttgtaaaaacacattttcccaaagaacactgaattaccgttcaaactggttgttgatgggtaataagggctgtttttgctgccccaaaagggcttaacaatttaggcggatagtttacttaaaaaaaaaaatcctttggagacatactgaaaatgcaaactagtttctaaattatcaattccctacatgaagaagcagtttgccagagtttagtctcagaaaatgactggttggctctatttaaatcagaacccaatttctacgcgtgttgaataaggtaacagcctttgatgaatttccttcacaacatggttttagtgaagcaaacattttttttttaagggcattgttctttctagtttatttctttttatgaaataaaattattttatttaaacagttccattgtcgtttctgaaaactacagtattctcagaagttgtagcagcagtaaaaaaaaaaaagttgttctataagtgattggggcagatttaactgattttgttaaaccaatttgtaagttactgcttctaatattacacttctaaaaagctgaatttatactcatgtcctaaaggagaatatgtggtaataaagtatatttgttaagtaacctaattgaaataggcttggttttaagagttccagtatataataatcacaaattgaaacctgacagtatcttgggagttccagtaatgtcacaaattagtgaataagcatgccagtgtgcaagggtaatgtaaggattgttagcctatctaaatattcaaaattactttaaaacttaagtatgttttctgatttttaagaattcagaagtgttctgtaatggattcagatgtttcatttgtagtataatgaaatgtttacagaaagataactttttcattaaaatatttttagaaaaaaaaaaaaagtcgacg

SEQ ID NO: 45902 - DNA, 1736 bp, Homo sapiens
ggtgctgcttgtgtgctcgtttggtgcggacctggtacctcttttgtgaagcggcagctgaggagactccggcgctcgccatggccgacgaaaagcccaaggagggtgtgaagacagagaatgaccacatcaacctgaaggtggccgggcaggacggctccgtggtgcagttcaagatcaagaggcacacgccgctgagcaagctgatgaaggcctactgcgagaggcagggcttgtcaatgaggcagatcagattcaggttcgacgggcagccaatcaatgaaactgacactccaggcacagctggagatggaggacgaggacaccatcgacgtgttccagcagcagacgggaggtgtgccggagagcagcctggcagggcacagtttctagagggcccgtccccagcccgggccgtccatcctcgcattgctgttgaatggtgagcacgtgaccatgccgaccacaaaggtgtctgcggaaactcgaggacattcaccacgatgattttcctctctttgatgtacttcaagtgcaactcaaaactatatctgcagggatgaatctgtaacttaaattgggccaatcagaattgttatctttgttcaggtaaaatgagttgcaagatattgtgggtacttttgtgtgctcatttgtgttttccccccctcctacaacatttttttaaccccaaaattatagcctgaatgttcgcttttagtctggccagggatctgactcctgagttggttgcctctcccctgctcactccagtcacatagagaattggtgtttcccgcagtggggatgcagctgttggacaggtattgggggcaaggttggtagggaggacagactgtcacttgctgttacaggcacaggtgattaaaatgctaaatattgcaaatttaagctttgtcagtatatggaaaagttgaagggaaaatactggaatgcttcttcaaaggttaaaaaataaccgagtcttttggtaatttgaccccacgtgctctctggccctcaagcatgtaacctcggggtctgaggcccaggacccacccccctgccacccctcccaccccactccctgctcagtacctggcgttggtacacaggcaaggattggcacaaccaaaattggcctttttctccctcttaatattgaagaaattcccacatttctcatttggtaatggtgttgtggcctcagatttcttctagtatttgcttctgatgaatgattatggtctatacataaaaaagtaagactaagtattgctgaatttgcagttatgttgtcgtgtataagagctacttccaagtgtggttacaaatgaacccatgggaatgatgacttcatgttcttctcgtgggtttgtgccgtgctgctttccaaataggtattgaatttatgcattagtctggtgatttcagttctgtgaaatattttgggatctataccaattaaacattttccatagttctgcctattgtccttccctgaggctccattgctgcttggtggccattctctgcctttttacagtcacctgaacaatgacccatcatctcttgcttgcttgaaatcttgctgaaatgttctcatttcctgtttgctgtatgggctcgggtgggatgtttgttggctctgttgtgtttattcaccaatttgtacattatttgttgtcctttactactgtaaacagtaaatatagtttggtattctgtcaaaaaaa

SEQ ID NO: 45903 - DNA, 4249 bp, Homo sapiens
cctcttggttctgcggcacgtgacggtcgggccgcctccgcctctctctttactgcggcgcggggcaaggtgtgcgggcgggaaggggcacgggcacccccgcggtcctcgggaggctagagatcatggaagggaagtggttgctgtgtatgttactggtgcttggaactgctattgttgaggctcatgatggacatgatgatgatgtgattgatattgaggatgaccttgacgatgtcattgaagaggtagaagactcaaaaccagataccactgctcctccttcatctcccaaggttacttacaaagctccagttccaacaggggaagtatattttgctgattcttttgacagaggaactctgtcagggtggattttatccaaagccaagaaagacgataccgatgatgaaattgccaaatatgatggaaagtgggaggtagaggaaatgaaggagtcaaagcttccaggtgataaaggacttgtgttgatgtctcgggccaagcatcatgccatctctgctaaactgaacaagcccttcctgtttgacaccaagcctctcattgttcagtatgaggttaatttccaaaatggaatagaatgtggtggtgcctatgtgaaactgctttctaaaacaccagaactcaacctggatcagttccatgacaagaccccttatacgattatgtttggtccagataaatgtggagaggactataaactgcacttcatcttccgacacaaaaaccccaaaacgggtatctatgaagaaaaacatgctaagaggccagatgcagatctgaagacctattttactgataagaaaacacatctttacacactaatcttgaatccagataatagttttgaaatactggttgaccaatctgtggtgaatagtggaaatctgctcaatgacatgactcctcctgtaaatccttcacgtgaaattgaggacccagaagaccggaagcccgaggattgggatgaaagaccaaaaatcccagatccagaagctgtcaagccagatgactgggatgaagatgcccctgctaagattccagatgaagaggccacaaaacccgaaggctggttagatgatgagcctgagtacgtacctgatccagacgcagagaaacctgaggattgggatgaagacatggatggagaatggggaggctcctcagattgccaaccctagatgtgagtcagctcctggatgtggtgtctggcagcgacctgtgattgacaaccccaattataaaggcaaatggaagcctcctatgattgacaatcccagttaccagggaatctggaaacccaggaaaataccaaatccagatttctttgaagatctggaacctttcagaatgactccttttagtgctattggtttggagctgtggtccatgacctctgacattttttttgacaactttatcatttgtgctgatcgaagaatagttgatgattgggccaatgatggatggggcctgaagaaagctgctgatggggctgctgagccaggcgttgtggggcagatgatcgaggcagctgaagagcgcccgtggctgtgggtagtctatattctaactgtagcccttcctgtgttcctggttatcctcttctgctgttctggaaagaaacagaccagtggtatggagtataagaaaactgatgcacctcaaccggatgtgaaggaagaggaagaagagaaggaagaggaaaaggacaagggagatgaggaggaggaaggagaagagaaacttgaagagaaacagaaaagtgatgctgaagaagatggtggcactgtcagtcaagaggaggaagacagaaaacctaaagcagaggaggatgaaattttgaacagatcaccaagaaacagaaagccacgaagagagtgaaacaatcttaagagcttgatctgtgatttcttctccctcctcccctgcaagagtggtcctaggagaggacctggcacaccttaggttgacattcagaaaacttcaagacatcaccatcagcaggctccagttgaacactagtctgtgtaactttaaacatctagcagtaaatacttgcagttgtgatataaaggaccctgtttctgtagaaaagaaaacatttaacataatggttgtgaaatgtaacatgaagcaaactaacttttttttttttaacatctttgtttttaaaatagaatgatagaactttgccagtctttaagatcttggcttaatttaatgtattaatctgtttgtgcaaacataataccaccatttaaaaatgttagggagatgagttgcagtttttataatagattttttttaaagtttggtattgtaaaacattcacacctctgtccctcaaaattgataattacgtttaaagtgcagtcatttgtggttagaatcttgttttgtttgcttccattattgagttcctcctaaggaaattgaggagagggactgaatagaagcccaaattcatataaaagttgcgtttaagttgtattaaaaatagatatataagaaaaaattctttcacttgatgtttgttagaccagaaagtgtgtgtgttctgtagctcagttcccagacagctttttaggtagtggaggaggtggcttcatgtggcacttgggcatttatattccacttgggagggtcaggctgtggccttctggagcaggtggcttgttaaggaacgctagcagggcatggcacgtgagctccggaatagatgtcttcatcacttcttccactgtgtgttgacactgttttccttacctatttcctcagatccccagctttctcctctgctatgcattttcttcacagtgcagcttgcagtccgttgctgaaaatgattataagccctgcataatgttaagctttattgtggattacgtgtatgtttcttctttcttttaagcagacccatacctttccagggtcaaagtacagaatagaatacattgatacaaagtacagaaaaatactttgatttttatccatttcttttactctgtgtaaagacttgagaagtctaattcacaggcaaaccaatacagaattgactgcagttgaacagactagaagtatttgtgggaggagtgacatgaagcatgagttatctgattttttttgtagctgctatatattttaagccttcatttgcaattcatgtaacagttgtgtcataaattacacaataaagcagtcctgttcaaatttttttttaacgtggcttgtagaatttttaaaaaagtgatcttaggtttgttttttcatgcgggatgcagatgggtgctatcagagcctctcccacaccactatagtgtaataatgttattattactctacactgaaacgtattcagagttagatattattttagcttcagttgttctttagaggctttcaaatgtaccgatgatactgtttcttgcactgaatatataaacactccacagtgtttatattgggaagatattgggaaggaaatatatttgtaaaagatgaaggctgtatctatttttttttctttttaaagtttgttcacttaaattcttttgaggatgggatgtatttttcttgctgttcagtgctttttccttttcatctgttgttctgtggtcacagtgaccttagctacatagcagactttcccaaatgtattgattacaaataaacagttgttacttagcaagacctgaaaatatgtctgcaggtttctccttgaagcaaatgtgtgggatcattgcatttcccagaaatctgcctccttcaccctccgttgacagtatatgtcatgcctcactttcttctagctgagctttaaatcattagagcttaaattgtcagatcgttcattgcctttccagggttatttagtaaagtttgttgaaaacaaaaacgccttttcttggttcttttttcagttattttgaaggtccagcatcctgattaaatgtctgacacattaatgaatgaccagcagcagctttcagctcttaaaaagacacttatattttgattttacatgctggttacctgttccattgttgtcaaatgcccactctccatcagatgtgttcctccattttcttatccacaaagtactcctcacttttcaatttgtcatgttactaaatggtgttacattaaagccctgtgttaagtgtctgcttttgactgaatttcttcatagtaaccttcagtgtgtgtgtgtgactatgttcaatta

SEQ ID NO: 45904 - DNA, 3729 bp, Homo sapiens
ggatgggaagcgagcatggtgagtcctcaagtcgcagctgggcctgccacgtgggagtggagggtggaggaacgtgtggagtttcggagtccagcccagtgcgagacagccttgaaaccgtggttggcgggcgctccactccgctctgggctcgaaccctgcctgaccctagctgtgccccccactttctccctgtctggcccctgctccccgccccctcacttagaggagggcacggggaagggcaaacggtccagagggcgggcggctgcgggctcctctgcatcatgtgaggagggcgtggggaaggacatcctggtggggcccgatctgggctgcctccagcccgggcctgtgtcttggacttagtcgtggacctggaggccagtgcccggctggccctgtcaccctctcgctgtgacgccagcgcctgctgactggaggacccaggttccttcgcctgctttttctcaggctgccctgaggatctgtgtttggtgaaaaggagccaaattcacctgcagggcaggcggctctagcagcttcagaagcctggtgccctggcgacactggacctgccttggcttctttgatcccaaccccacccccgatttctgctctgctgactggggaagtcatcgtgccacccagaacctgagtgcgggcctctcagagctccttcgtccgtgggtctgccggggactgggccttgtctccctggcgagtgccaggtgaggctgcggcggctccgacgcaggtggagctgctgacctggcccctttctgcggctgcgagggactttgaacatgtcggggatcgccctcagcagactcgcccaggagaggaaagcatggaggaaagaccacccatttggtttcgtggctgtcccaacaaaaaatcccgatggcacgatgaacctcatgaactgggagtgcgccattccaggaaagaaagggactccgtgggaaggaggcttgtttaaactacggatgcttttcaaagatgattatccatcttcgccaccaaaatgtaaattcgaaccaccattatttcacccgaatgtgtacccttcggggacagtgtgcctgtccatcttagaggaggacaaggactggaggccagccatcacaatcaaacagatcctattaggaatacaggaacttctaaatgaaccaaatatccaagacccagctcaagcagaggcctacacgatttactgccaaaacagagtggagtacgagaaaagggtccgagcacaagccaagaagtttgcgccctcataagcagcgaccttgtggcatcgtcagaaggaagggattggtttggcaagaacttgtttacaacatttttgcaaatctaaagttgctccatacaatgactagtcacctgggggggttgggcgggcgccatcttccattgcccgccgcgggtgtgcggtctcgattcgctgaattgcccgtttccatacagggtctcttccttcggtcttttgtatttttgattgttatgtaaaactcgcttttattttaatattgatgtcagtatttcaactgctgtaaaattataaacttttatacttgggtaagtcccccaggggcgagttcctcgctctgggatgcaggcatgcttctcacccgtgcagagctgcacttggcctcagctggctgtatggaaatgcaccctccctcctgccgctcctctctagaaccttctagaacctgggctgtgctgcttttgagcctcagaccccaggtcagcatctcggttctgcgccacttcctttgtgtttatatggcgttttgtctgtgttgctgtttagagtaaaagccgctgtgaaaggctacctcggacctgaacagctgcctgactgcctgaaaggttgtaatgtggtagttattccggctggagtccccagaaagccaggcatgacccggggacgacctgttcaacaccaatggccacgattgtggccaccctgaccgctggcctgtggcccagcactgcccggaaggccatgatctgcgtcattgccaatccggttaattccaccatccccatcacagcagaagttttcaagaaggcatgggagtgtaacaaccccaacaaaatcttcggcgtgacgaccctggacatcgtcagagccaacacctttgttgcagagctgaagggtttggatccagctcgagtcaacgtccctgtcattggtgggccatgctgggaagaccatcatccccctgatctctcagtgcacccccaaggtggactttccccaggaccagctgacagcactcactgggcggatccaggaggccggcacggaggtggtcaaggctaaagccggagccaggctctgccaccctctccatggcgtatgccggcgccccggctttgtcttctcccttgtggatgcaatgaatggaaaggaaggtgttgtggaatgttccttcgttaaagtcacaggaaacggaatgtacctacttctccacaccgctgctgcttgggaaaaagggcatcgagaagaacctgggcatcggcaaagtctcctcttttgaggagaagatgatctcggatgccatccccgagctgaaggcctccatcaagaagggggaagatttcgtgaagaccctgaagtgagccgctgtgacgggtggccagtttccttaatttatgaaggcatcatgtcactgcaaagccgttgcagataaactttgtattttaatttgctttggtgatgattactgtattgacatcatcatgccttccaaattgtgggtggctctgtgggcgcatcaataaaagccgtccttgattttatttttcaaggtcccttctgtaaatgctgtgctttcttccctgtgagagccaactttagagtgtctgctacctcttcattaccaatcagaattagatgatgtttaactgttagactgaagcgtgacgctttcatcagtagcttcaagaaagtctaaattgttaatttatggaattggacacagtattcagtttacccgtacatgctcctcccgcccctcctgttgggcacccttgcatcgcccaggcctgattcctcctgggggtagttcacccccacgggttcatagttcagcggcgaatgcaggcagctgttttctggctgagcaaacagcacctttctcattgagcttcctctactgacctctgtcccccttgggatttcatcttctgaccgaaccctgatgttcagtggcagagacagcccatagccagaactgtgggtagaccagggttggggtgtgcggtttgggacagcccaaaccccagccgctgtgtcaaggcctaggacgccatgctgccatcaaaagggggttccaggtttccatcagtggcctaaagaagggacttcttgttgtactgaggagtgcggaattaaagagatttgactccctttagtattgggggcagtccgttccccagacactgtggcctctgaagtggaaactgaaagctgcatacctgggaaagaactttctaggaataggcaatggccttcagtggaagagggagggctggaggtgtgcccagtacttggatgttcatctgtccacaacagctttttgtttttttaaaaaagctaaaatggaaatggattttatcataaaggatgacatcgttttcttctacaattaatacatgttcattgtataaaacccaaaaagcagctaaaaaataaagcgggaaaggaactactgg

SEQ ID NO: 45905 - DNA, 516 bp, Homo sapiens
gccctgccagattttgtatagtaatatatatataaaatgacctgtcacaggttggctttcatagttttacctttcctttttgggtggtgcccttgggtctctactactgtctttcatcactcccaagaaattgagtagtgcagccaggatcaggaccagggattggcaaatgttttttgtaaagggccagataggaaatattttgggctttgaggactgtgttatctctgaaatgatcttgttccagtgttaccatgtcaagacaaccatagatagtatgtatacaaatgaacaggtatggctgtgttccagtaaaactatggataaaaacaaccacattgcatttggctaagggctttaatttgctactgacaagtgatagtcctggtcttaatttgtttttttaacatttacagattgatcagggaccatgaaaagaaacttgtgcttcaccgaagaaaaatatctaaacatcgaaaaacttaaatattatggaaaaaaaacattgcaaaatat

SEQ ID NO: 45906 - DNA, 3338 bp, Homo sapiens
  misc_feature (1)...(3338): n = a,t,c or g
ccttctccccggcggttagtgctgagagtgcggagtgtgtgctccgggctcggaacacacatttattattaaaaaatccaaaaaaaatctaaaaaaatcttttaaaaaaccccaaaaaaatttacaaaaaatccgcgtctcccccgccggagacttttattttttttcttcctcttttataaaataacccggtgaagcagccgagaccgacccgcccgcccgcggccccgcagcagctccaagaaggaaccaagagaccgaggccttcccgctgcccggacccgacaccgccaccctcgctccccgccggcagccggcagccagcggaagttggatcgaccccgttctgcggccgttgagtagttttcaattccggttgatttttgtccctctgcgcttgctccccgctcccctccccccggctccggcccccagccccggcactcgctctcctcctctcacggaaaggtcgcggcctgtggcctgcggcgagccgtgccgagatgaaccccagtgcccccagctaccccatggcctcgctctacgtgggggacctccaccccgacgtgaccgaggcgatgctctacgagaagttcagcccggccgggcccatcctctccatccgggtctgcagggacatgatcacccgccgctccttgggctacgcgtatgtgaacttccagcagccggcggacgcggagcgtgctttggacaccatgaattttgatgttataaagggcaagccagtacgcatcatgtggtctcagcgtgatccatcacttcgcaaaagtggagtaggcaacatattcattaaaaatctggacaaatccattgataataaagcactgtatgatacattttctgcttttggtaacatcctttcatgtaaggtggtttgtgatgaaaatggttccaagggctatggatttgtacactttgagacgcaggaagcagctgaaagagctattgaaaaaatgaatggaatgctcctaaatgatcgcaaagtatttgttggacgatttaagtctcgtaaagaacgagaagctgaacttggagctagggcaaaagaattcaccaatgtttacatcaagaattttggagaagacatggatgatgagcgccttaaggatctctttggcaagtttgggccctgccttaagtgtgaaagtaatgactgatgaaagtggaaaatccaaaggatttggatttgtaagcctttgaaaggcatgaagatgcacagaaagctgtgggatgagatgaacggaaaggagctcaatggaaaacaaatttatgttggtcgagctcagaaaaaggtggaaccggcagacggaacttaagcgcaaatttgaacagatggaaacaagataggttcaccagataccagggtgttaatctttatgtgaaaaatccttgatgatggtattgatgatgaaccgtctccggaaagagttttctccatttggtacaatcactagtgcaaaggttatgatggagggtggtcgcagcaaagggtttggttttgtatgtttctcctccccagaaggaagccacttaaagcagttacagaaatgaacggtagaattgtggccacaaagccattgtatgtagctttagctccagcgcaaagaagagcgccagggttcaccttcactaaccagtatatgcagagaatgggcaagtgtacgagctgttcccaaccctgtaatcaacccctaccagccagcacctccttcaggttacttcatggcagctatcccacagactcagaaccgtgctgcatactatcctcctagccaaattgctcaactaagaccaagtcctcgctggactgctcagggtgccagacctcatccattccaaaatatgcccggtgctatccgcccagctgctcctagaccaccatttagtactatgagaccagcttcttcacaggttccacgagtcatgtcaacacagcgtgttgctaacacatcaacacagacaatgggtccacgtcctgcagctgcagccgctgcagctactcctgctgtccgcaccgttccacagtataaatatgctgcaggagttcgcaatcctcagcaacatcttaatgcacagccacaagttacaatgcaacagcctgctgttcatgtacaaggtcagggaacctttgactgcttccatgttgggcatctgcccctcctcaagagcaaaagcaaatgttgggtgaacggctgtttcctcttattcaagccatgcacccctactcttgctggtaaaatcactggcatgttgttgggagattgataattcagaacttcttcatatgctcgagtctccagagtcactccgttcctaaggttgatgaagctgtagctgtactacaagcccaccaagcctaaagaggctgcccagaaagcagttaacagtgccaccggtgttccaactgtttaaagtgagcttttccctctgattgatcagggaccatgaaaagaaacttgtgcttcaccgaagaaaaatatctaaacatcgaaaaacttaaatattatgggaaaaaaaacattgcaaaatataaaataaataaaaaaaggaaaggaaactttgaaccttatgtaccgagcaaatgccaggtctagcaaacataatgctagtcctagattacttattgatttaaaaacaaaaaaaacacaaaaaaatagtaaaatataaaaacaaattaatgttttatagaccctgggaaaaagaattttcagcaaagtacaaaaatttaaagcattcctttctttaattttgtaattctttactgtggaatagctcagaatgtcagttctgttttaagtaacagaattgataactgagcaaggaaacgtaatttggattataaaattcttgctttaataaaaattccttaaacagtgcacggatttgctttttttcaaagtctttataattgccatgcataaataggtaatatcttaatggtgctgagccgacataagaatcttttatgaaaaatgtactgttaagttcagggggtctattggttttatgtaaaaggcacaagacaattcctgtagtgcattttatgagttaaggtttccatacggattattgaaacaatttgttacatgtatttgttacatgatcttaatatttcatgtacaagactgncacccatccacttttgaagataagccagtttatggggtttttttttttgcggggtagaggttggggcccccctattttggccaggctgggcctcggattcctgggctcaagcataagcataaggcttattcctgcataagcaccatgcctggcctgccagttggtggttaaattggggttccnggcta

SEQ ID NO: 45907 - DNA, 1578 bp, Homo sapiens
  misc_feature (1)...(1578): n = a,t,c or g
gaagtaatgtattcttcatcttgtgaaaccacaagaaatactacaggcattgaagaatcaactgatgggatgattttaggaccagaagatctgagttaccaaatatatgatgtttccggagaaagcaattcagcagtttctacagaagacctaaaagaatgtctgaagaaacaattagaattctgtttttcacgagaaaatttgtcaaaggatctttacttgatatctcaaatggatagtgatcagttcatcccaatttggacagttgccaacatggaagaaataaaaaagttgactacagaccctgatctaattcttgaagtgttaagatcttctcccatggtacaagttgatgagaagggtgagaaagtgagaccaagtcataagcgttgtattgtaattcttagagagattcctgaaacaacaccaatagaggaagtgaaaggtttgttcaaaagtgaaaactgccccaaagtgataagctgtgagtttgcacacaatagcaactggtatatcactttccagtcagacacagatgcacaacaggcttttaaatacttaagagaagaagttaaaacatttcagggcaagccaattatggcaaggataaaagccatcaatacattttttgctaagaatggttatcgattaatggattctagtatctatagtcaccccattcaaactcaagcacagtatgcctccccagtctttatgcagcctgtatataatcctcaccaacagtactcggtctatagtattgtgcctcagtcttggtctccaaatcctacaccttactttgaaacaccactgggtaagtgaggatccttacaataaaatataataatatttttaatttgaggctggaaatttggaggaaatcagttgggagtggggagctcatttatgttgacattgatggactttttgggcctttattttattttattttttgtatttttccgttagagatggaattttgccatgttgctcagtnnnnnnnnnnnnnnnnnnnnnnnnnnnnnnnnnnnnnnnnnnnnnnnnnnnnnnnnnnnnnnnnnnnnncactatgcccggccactttttggcttttaaacagtgatatggatatctaattctccataccaaataaatgcatatgactaagaggtgagctattagagcgcataattttattccgtaaaatttgctgagtgaattgaaagaagagactggataacttttgcgtgattttaaatgcattttagtgttgcgaaatgtcagaccagacattctttactaagttatgaattgttcataaatccagtggtacttgaagtgaatattgcagaaatgaatcagtaaaatattttaggatatttttggcttgtaaaagataaattcataagctcattaaggttcttgtgaccctcacaccagattttacctttgccattaatattgtttaaacatacatttttttctaggctccctttcccaatggtagttttgtgaatggctttaattcgccaggatcttataaaacaaatgctgctgctatgaatatgggtcgaccattccaaaaaaatcgtgtgaagc

SEQ ID NO: 45908 - DNA, 929 bp, Homo sapiens
atcaccagtaaagaggtacgaaaaagctagcctctctcagagaccggggaggcagagtactactagaggaagtgaagttctgatggaatcatgcctgtcaaatgaggtcttgaagcggatgcccaaataaaagagtatattttatctaaatcttaagtgggtaacattttatgcagtttaaatgaatggaatattttcctcttgtttagttgtatctgtttgtatttttctttgatgaatgattggtcatgaggcctcttgccacactccagaaatacgtgtgcggctgcttttaagaactatgtgtctggtcacttatttctctaaaattatctcattgcctggcaatcagtcttctcttgtatacttgtcctagcacattatgtacatgggaaatgtaaacaaatgtgaaggaggaccagaaaaattagttaatatttaaaaaaatgtattgtgcattttgggcttcacatgtttaactttttttaagaaaaaagttgcatgaatggaaaaaaaaatctgtatacagtatctgtaaaaactatcttatctgtttcaattccttgctcatatcccatataatctagaactaaatatggtgtgtggccatatttaaacacctgagagtcaagcagttgagactttgatttgaagcacctcatccttctttcaatgcgaacactatcatatggcattcttactgaggattttgtctaaccatatgttgccatgaattaactctgccgcctttcttaaggatcaaaaccagtttgatttgggaatcttcccctttccaaatgaaatagagatgcagtacttaactttccttggtgtttgtagatattgccttgtgtattccacttaaaaccgtaatctagtttgtaaaagagatggtgacgcatgtaaataaagcatcagtgacactctaa

SEQ ID NO: 45909 - DNA, 1226 bp, Homo sapiens
gcacgagcggggctggcgtgtgggtctcgcagcgttgctcacagaacagagtagaggcggcggcggcggcggccggacccagactggtagtgaggcgttggaccccgagccgctgcaatgccgctggagctggagctgtgtcccgggcgctgggtgggcgggcaacacccgtgcttcatcattgccgagatcggccagaaccaccagggcgacctggacgtagccaagcgcatgatccgcatggccaaggagtgtggggctgattgtgctaagttccagaagagtgagctagaattcaagtttaatcggaaagccttggagaggccatacacctcgaagcattcctgggggaagacgtacggggagcacaaacgacatctggagttcagccatgaccagtacagggagctgcagaggtacgccgaggaggttgggatcttcttcactgcctctggcatggatgagatggcagttgaattcctgcatgaactgaatgttccatttttcaaagttggatctggagacactaataattttccttatctggaaaagacagccaaaaaaggtcgcccaatggtgatctccagtgggatgcagtcaatggacaccatgaagcaagtttatcagatcgtgaagcccctcaaccccaacttctgcttcttgcagtgtaccagcgcatacccgctccagcctgaggacgtcaacctgcgggtcatctcggaatatcagaagctctttcctgacattcccatagggtattctgggcatgaaacaggcatagcgatatctgtggccgcagtggctctgggggccaaggtgttggaacgtcacataactttggacaagacctggaaggggagtgaccactcggcctcgctggagcctggagaactggccgagctggtgcggtcagtgcgtcttgtggagcgtgccctgggctccccaaccaagcagctgctgccctgtgagatggcctgcaatgagaagctgggcaagtctgtggtggccaaagtgaaaattccggaaggcaccattctaacaatggacatgctcaccgtgaaggtgggtgagcccaaaggctatcctcctgaagacatctttaatctagtgggcaagaaggtcctggtcactgttgaagaggatgacaccatcatggaagaattggtagataatcatggcaaaaaaatcaagtcttaaaaataaagtgccattctctgaattctcag

SEQ ID NO: 45910 - DNA, 1843 bp, Homo sapiens
ttttttttttttttttttctcatgggtcactgaggctttttattttgagcacaaaaccaccggggatctagcctgtggccaccccggagatgacacgaggctcacatgactctagacacttggtggaaagtgaggcgagaaaaacaatgacttgggccaattacacgactgcaaagctagagctgccaacagggctccagggagcttggcttctgtagaagttctaaggaagcggtacgaactccacggcggtggggcgctaactagcagggacccctgcaagtgttggtcgggggcctcgagctgcctgagctgacacgaggggaggggtctgtgtagccaacaggtgaccgaagggcttgcctgcccacagcttacttggccaaggggtttctgaagttcctgccggcaaacttagccttgctgcccagctcctcttcaattcttgaggagctggtttgtacttggccaagcgctcagattcggcaaaggggcaccagtcttgatctgcccagtgcacagccccacaaccaggtcagcgatgaaaggtatcttcagtctcccccgaacgatgagacaccatgacgccccaaccattggcctgggccagcttgcacgcctgaagagactcggtcacggagccaatctggttgactttgagcaggaggcagttgcaaggacttctcgttcacggccttggcgatcctctttgggttggtcactgtgagatcatcccccacttacctggattcctgcactggctgtgaacttctgccaagctccccagtcatcctggtcaaagggatcttcgatagacaccactgggtagtccttgatgaaggacttgtacaggtcagccagctggtcaggcgagatgtacctgctggggtcatcgggagacttgaagtccaggtcatacttcccagacctgaagaactcggaggccgctacgtccatgccgatgaccaccttatcagtgtagccaggctttcccaatagcagtcttcagcagctccaggccttctttattctccaggatgttgggagcaaacccgccttcatcccccacattggtggcatctttcccatatttctccttgatgacattcttcaggttgtggtaaacctctgctccaatgcgcatggcttccctgaagtttgctgcaccgactgggaggatcatgaactcctgcatggccagcttgttgccagcatgagaaccgccattgatgacattgaacgccgggactggcaggatgacttcagagttgccagccaagtcagcgatgtggcggtacagggggacccccttctcaacggcaccagctttgcagacggcaagggacacccccagaatggcgttcgcaccaaacttagatttattttctgttccatccatctcgatcatcagtttgtcaatcttctcttgttctgtgacgttcagtttcttgctaaccagggcaggcgcaatagttttattgatgtgctcaacagcctttgagacacccttccccatatagcgagtcttatcattgtcccggagctctagggcctcatagataccagttgaagcaccactgggcacagcagctctgaagagaccttttgaggtgaagagatcaacctcaacagtgggattcccgcgagagtcaaagatctccctggcatggatcttgagaatagacatggtgaacttctagccactgggtctcgtcgcctaggagaggaagcggagggtgctgcagacaccgaggtgaacgtaaagccggcgagatctccgtgctccgggtacccaacagatacctgctcacggccgcccgcgccgacgtcgacgggccgcgaa

SEQ ID NO: 45911 - DNA, 4371 bp, Homo sapiens
aatcctttctttcagctggagtgctcctcaggagccagccccacccttagaaaagatgttttccatgaggatcgtctgcctggtcctaagtgtggtgggcacagcatggactgcagatagtggtgaaggtgactttctagctgaaggaggaggcgtgcgtggccccaagggttgtggaaagacatcaatctgcctgcaaagattcagactggcccttctgctctgatgaagactggaactacaaatgcccttctggctgcaggatgaaagggttgattgatgaagtcaatcaagattttacaaacagaataaataagctcaaaaattcactatttgaatatccagaagaacaataaggattctcattcgttgaccactaatataatgggaaatttttgagaggcgatttttccctcagccaataaccgtgataatacctacaaccgagtgtccagaggatctgagaagcagaatttgaagtcctgaagcgcaaagtcatagaaaaagtacagcatatccagcttctgcagaaaaatgttagagctcagttggttgatatgaaacgactggaggtggacattgatattaagatccgatcttgtcgagggtcatgcagtagggctttagctcgtgaagtagatctgaaggactatgaagatcagcagaagcaacttgaacaggtcattgccaaagacttacttccctctagagataggcaacacttaccactgataaaaatgaaaccagttccagacttggttcccggaaattttaagagccagcttcagaaggtacccccagagtggaaggcattaacagacatgccgcagatgagaatggagttagagagacctggtggaaatgagattactcgaggaggctccacctcttatggaaccggatcagagacggaaagccccagggaaccctagccagtgctggaagctggaactctgggagctctggacctggaagtactggaaaccgaaaccctgggagctctgggactggagggactgcaacctggaaacctgggagctctggacctggaagtactggaagctggaactctgggagctctggaactggaagtactggaaaccaaaaccctgggagccctagacctggtagtaccggaacctggaatcctggcagctctgaacgcggaagtgctgggcactggaccctctgagagctctgtatctggtagtactggacaatggcactctgaatctggaagttttaggccagatagcccaggctctgggaacgcgaggcctaacaacccagactggggcacatttgaagaggtgtcaggaaatgtaagtccagggacaaggagagagtaccacacagaaaaactggtcacttctaaaggagataaagagctcaggactggtaaagagaaggtcacctctggtagcacaaccaccacgcgtcgttcatgctctaaaaccgttactaagactgttattggtcctgatggtcacaaagaagttaccaaagaagtggtgacctccgaagatggttctgactgtcccgaggcaatggatttaggcacattgtctggcataggtactctggatgggttccgccataggcaccctgatgaagctgccttcttcgacactgcctcaactgggaaaaacattcccaggtttcttctcacctatgttaggagagtttgtcagtgagactgagtctaggggctcagaatctggcatcttcacaaatacaaaggaatccagttctcatcaccctggggatagctgaattcccttcccgtggtaaatcttcaagttacagcaaacaatttactagtagcacgagttacaacagaggagactccacatttgaaagcaagagctataaaatggcagatgaggccggaagtgaagccgatcatgaaggaacacatagcaccaagagaggccatgctaaatctcgccctgtcagaggtatccacacttctcctttggggaagccttccctgtccccctagactaagttaaatatttctgcacagtgttcccatggccccttgcatttccttcttaactctctgttacacgtcattgaaactacacttttttggtctgtttttgtgctagactgtaagttccttgggggcagggcctttgtctgtctcatctctgtattcccaaatgcctaacaagtacagagccatgactcaataaatacatgttaaatggatgaatgaattcctctgaaactctatttgagcttatttagtcaaattctttcactattcaaagtgtgtgctattagaattgtcacccaactgattaatcacatttttagtatgtgtctcagttgacatttaggtcaggctaaatacaagttgtgttagtattaagtgatgcttagctacctgtactggttacttgctattagtttgtgcaagtaaaattccaaatacatttgaggaaaatcccctttgcaatttgtaggtataaataaccgcttatttgcataagttctatcccactgtaagtgcatcctttccctatggagggaaggaaaggaggaagaaagaaaggaagggaaagaaacagtatttgccttatttaatctgagccgtgcctatctttgtaaagttaaatgagaataacttcttccaaccagcttaattttttttttagactgtgatgatgtcctccaaacacatccttcaggtacccaaagtggcattttcaatatcaagctaccgggatccagtaagattttttctgtttattgcgatcaagagaccagtttgggaggatggcttttgatccagcaaagaatggatggatcactgaattttaaccggacctggcaagactacaagagaggtttcggcagcctgaatgacgagggggaaggagaattctgggctagggcaatgactacctccacttactaacccaaaggggctctgttcttagggttgaattagaggactgggctgggaatgaagcttatgcagaatatcacttccgggtaggctctgaggctgaaggctatgccctccaagtctcctcctatgaaggcactgcgggtgatgctctgattgagggttccgtagaggaaggggcagagtacacctctcacaacaacatgcagttcagcacctttgacagggatgcagaccagtgggaagagaactgtgcagaagtctatgggggaggctggtggtataataactgccaagcagccaatctcaatggaatctactaccctgggggctcctatgacccaaggaataacagtccttatgagattgagaatggagtggtctgggtttcctttagaggggcagattattccctcagggctgttcgcatgaaaattaggccccttgtgacccaataggctgaagaagtgggaatgggagcactctgtcttctttgctagagaagtggagagaaaatacaaaaggtaaagcagttgagattctctacaacctaaaaaattcctaggtgctattttcttatcctttgtactgtagctaaatgtacctgagacatattagtctttgaaaaataaagttatgtaaggttttttttatctttaaatagctctgtgggttttaacatttttgtaaagatataccaagggccattcagtacatcaggaaagtggcagacagaagcttctctctgcaaccttgaagactattggtttgagaacttctcttcccataccacccaaaatcataatgccattggaaagcaaaaagttgttttatccatttgatttgaattgttttaagccaatattttaaggtaaaactcactgaatctaaccatagctgacctttgtagtagaatttacaacttataattacaatgcacaatttataattacaatatgtatttatgtcttttgctatggagcaaatccaggaaggcaagagaaacattctttcctaaatataaatgaaaatctatcctttaaactcttccactagacgttgtaatgcacacttatttttttcccaaggagtaaccaatttctttctaaaacacatttaaaattttaaaactatttatgaatattaaaaaaagacataattcacacattaataaacaatctcccaagtattgatttaacttcatttttctaataatcataaactatattctgtgacatgctaattattattaaatgtaagtcgttagttcgaaagcctctcactaagtatgatctatgctatattcaaaattcaacccatttactttggtcaatatttgatctaagttgcatctttaatcctggtggtcttgccttctgatttttaatttgtatccttttctattaagatatatttgtcattttctcttgaatatgtattaaaatatcccaagc

SEQ ID NO: 45912 - DNA, 476 bp, Homo sapiens; identical to SEQ ID NO: 22122
  misc_feature (1)...(476): n = a,t,c or g

SEQ ID NO: 45913 - DNA, 435 bp, Homo sapiens; identical to SEQ ID NO: 22126
  misc_feature (1)...(435): n = a,t,c or g

SEQ ID NO: 45914 - DNA, 1185 bp, Homo sapiens; identical to SEQ ID NO: 12967
  misc_feature (1)...(1185): n = a,t,c or g

SEQ ID NO: 45915 - DNA, 485 bp, Homo sapiens
  misc_feature (1)...(485): n = a,t,c or g
ggngnnntttgancccctttganagccgntatgacatgattacgaatttaatacgactcactatagggaatttggccctcgaggccaagaattcggcacgagttgaaacgtcactgcagtaccttaagaggtgactcttaagaatgcatcccctcctgattcctcagctggttcacccttgaggttatttgcaaaaagaaaaggaggttcttgagggcaccgattgcgagcattctggtgcctggctccccgcctgggaagcgatggggtgctcagagcagcaggcaggttgggggaggggtggggtcatagttgggttccagctcctggcttgatgagcccagggcgcttacaggcagcccatgaagttgatgacagttttagcatgagaatcacacagggtccctgtcctgggctcctctaaagccagtggatgtgctgggcaccanagacaaatcatgnagatggctgctgntggntcccag

SEQ ID NO: 45916 - DNA, 1512 bp, Homo sapiens
gtagggtctccccgcccggcgcccccagtgttttctgagggcggaaatggccaattcgggcctgcagttgctgggcttctccatggccctgctggcgtgggtgggtctggtggcctgcaccgccatcccgcagtggcagatgagctcctatgcgggtgacaacatcatcacggcccaggccatgtacaaggggctgtggatggactgcgtcacgcagagcacggggatgatgagctgcaaaatgtacgactcggtgctcgccctgtccggtaattcagtaccaaactgttcgatatgatatcctccccttatctcctgtgtcccggaatcggctagcccaggtgaagaggaagatcctggtgctggatctggatgagacacttattcactcccaccatgatggggtcctgaggcccacagtccggcctggtacgcctcctgacttcatcctcaaggtggtaatagacaaacatcctgtccggtttttttgtacataagaggccccatgtggatttcttcctgggaagtggtgagccagtggtacgagctggtggtgtttacagcaagcatggagatctatggctctgctgtggcagataaactggacaatagcagaagcattcttaagaggagatattacagacagcactgcactttggagttgggcagctacatcaaggacctctctgtggtccacagtgacctctccagcattgtgatcctggataactccccaggggcttacaggagccatccagacaatgccatccccatcaaatcctggttcagtgaccccagcgacacagcccttctcaacctgctcccaatgctggatgccctcaggttcaccgctgatgttcgttccgtgctgagccgaaaccttcaccaacatcggctctggtgacagctgctccccctccacctgagttggggtgggggggaaagggagggcgagcccttgggatgccgtctgatgccctgtccaatgtgaggactgcctgggcagggtctgcccctcccacccctctctgccctgggagccctacactccacttgggagtctggatggacacatgggccaggggctctgaagcagcctcactcttaacttcgtgttcacactccatggaaaccccagactgggacacaggcgggaagcctaggagagccgaatcagtgtttgtgaagaggcaggactggccagagtgacagacatacggtgatccaggaggctcaaagagaagccaagtcagctttgttgtgatttgattttttttaaaaaactcttgtacaaaactgatctaattcttcactcctgctccaagggctgggctgtgggtgggatactgggattttgggccactgggattttccctaaatttgtcccccctttactctccctctatttttctctccttagactccctcagacctgtaaccagctttgtgtcttttttccttttctctcttttaaaccatgcattataactttgaaaccaaaaaaaaaaaaaa

SEQ ID NO: 45917 - DNA, 3945 bp, Homo sapiens
ctgtcctcggagcaggcggagtaaagggacttgagcgagccagttgccggattattctatttcccctccctctctcccgccccgtatctcttttcacccttctcccaccctcgctcgcgtagcattggcggacgttcggcggccactcagtcccattccatctcctcgtcgtccttcggagccgagccgtccgcgcccggcgcggcggggagccaaggagcctgccccgcccctggggacgaagagctgcagctcctcctgtgcggtgcacgatctgattttctggagagatgtgaagaagactgggtttgtctttggcaccacgctgatcatgctgctttccctggcagctttcagtgtcatcagtgtggtttcttacctcatcctggctcttctctctgtcaccatcagcttcaggatctacaagtccgtcatccaagctgtacagaagtcagaagaaggccatccattcaaagcctacctggacgtagacattactctgtcctcagaagctttccataattacatgaatgctgccatggtgcacatcaacagggccctgaaactcattattcgtctctttctggtagaagatctggttgactccttgaagctggctgtcttcatgtggctgatgacctatgttggtgctgtttttaacggaatcacccttctaattcttgctgaactgctcattttcagtgtcccgattgtctatgagaagtacaagacccagattgatcactatgttggcatcgcccgagatcagaccaagtcaattgttgaaaagatccaagcaaaactccctggaatcgccaaaaaaaaggcagaataagtacatggaaaccagaaatgcaacagttactaaaacaccatttaatagttataacgtcgttacttgtactatgaaggaaaatactcagtgtcagcttgagcctgcattccaagctttttttttaatttggtgttttctcccatcctttccctttaaccctcagtatcaagcacaaaaattgatggactgataaaagaactatcttagaactcagaagaagaaagaatcaaattcataggataagtcaataccttaatggtggtagagcctttacctgtagcttgaaaggggaaagattggaggtaagagagaaaatgaaagaacacctctgggtccttctgtccagttttcagcactagtcttactcagctatccattatagttttgcccttaagaagtcatgattaacttatgaaaaaattatttggggacaggagtgtgataccttccttggtttttttttgcagccctcaaatcctatcttcctgccccacaatgtgagcagctacccctgatactccttttctttaatgatttaactatcaacttgataaataacttataggtgatagtgataattcctgattccaagaatgccatctgataaaaaagaatagaaatggaaagtgggactgagagggagtcagcaggcatgctgcggtggcggtcactccctctgccactatccccaggggaaggaaaggctccgccatttgggaaagtggtttctacgtcactggacaccggttctgagcattagtttgagaactcgttcccgaatgtgctttcctccctctcccctgcccacctcaagtttaataaataaggttgtacttttcttactataaaataaatgtctgtaactgctgtgcactgctgtaaacttgttagagaaaaaaataacctgcatgtgggctcctcagttattgagtttttgtgatcctatctcagtctgggggggaacattctcaagaggtgaaatacagaaagcctttttttcttgatcttttcccgagattcaaatctccgattcccatttgggggcaagtttttttcttcaccttcaatatgagaattcagcgaacttgaaagaaaaatcatctgtgagttccttcaggttctcactcatagtcatgatccttcagagggaatatgcactggcgagtttaaagtaagggctatgatatttgatggtcccaaagtacggcagctgcaaaaagtagtggaaggaaattgtctacgtgtcttggaaaaattagttaggaatttggatgggtaaaaggtacccttgccttactccatcttattttcttagccccctttgagtgttttaactggtttcatgtcctagtaggaagtgcattctccatcctcatcctctgccctcccaggaagtcagtgattgtctttttgggcttcccctccaaaggaccttctgcagtggaagtgccacatccagttcttttcttttgttgctgctgtgtttagataattgaagagatctttgtgccacacaggattttttttttttttaagaaaaacctatagatgaaaaattactaatgaaactgtgtgtacgtgtctgtgcgtgcaacataaaaatacagtagcacctaaggagcttgaatcttggttcctgtaaaatttcaaattgatgtggtattaataaaaaaaaaaaaaaaaaactcgctcgtgccgaattcggcacgaggaacaacctgtgtgcatgctttttgagtatattaatcagggggatctccatgagttcctcatcatgagatccccacactctgatgttggctgcagcagtgatgaagatgggactgtgaaatccagcctggaccacggagattttctgcacattgcaattcagattgcagctggcatggaatacctgtctagtcacttctttgtccacaaggaccttgcagctcgcaatattttaatcggagagcaacttcatgtaaagatttcagacttggggctttccagagaaatttactccgctgattactacagggtccagagtaagtccttgctgcccattcgctggatgccccctgaagccatcatgtatggcaaattctcttctgattcagatatctggtcctttggggttgtcttgtgggagattttcagttttggactccagccatattatggattcagtaaccaggaagtgattgagatggtgagaaaacggcagctcttaccatgctctgaagactgcccacccagaatgtacagcctcatgacagagtgctggaatgagattccttctaggagaccaagatttaaagatattcacgtccggcttcggtcctgggagggactctcaagtcacacaagctctactactccttcagggggaaatgccaccacacagacaacctccctcagtgccagcccagtgagtaatctcagtaaccccagatatcctaattacatgttcccgagccagggtattacaccacagggccagattgctggtttcattggcccgccaatacctcagaaccagcgattcattcccatcaatggatacccaatacctcctggatatgcagcgtttccagctgcccactaccagccaacaggtcctcccagagtgattcagcactgcccacctcccaagagtcggtccccaagcagtgccagtgggtcgactagcactggccatgtgactagcttgccctcatcaggatccaatcaggaagcaaatattcctttactaccacacatgtcaattccaaatcatcctggtggaatgggtatcaccgtttttggcaacaaatctcaaaaaccctacaaaattgactcaaagcaagcatctttactaggagacgccaatattcatggacacaccgaatctatgatttctgcagaactgtaaaatgcacaacttttgtaaatgtggtatacaggacaaactagacggccgtagaaaagatttatattcaaatgtttttattaaagtaaggttctcatttagcagacatcgcaacaagtaccttctgtgaagtttcactgtgtcttaccaagcaggacagacactcggccagaaaaaaaaaaaaaaaaaaaaactcgagggggggcccgtacccgatcgc

SEQ ID NO: 45918 - DNA, 813 bp, Homo sapiens; identical to SEQ ID NO: 12999

SEQ ID NO: 45919 - DNA, 3249 bp, Homo sapiens
cccgggcgcaacgcaagagcggctgcgtctatggtcatgacgtctgacagagcgtccacccgtcttcgacaggactctatggttcttacgcgcgcagacagaccgcctatataagccatgcgcaggcggaggagcgcctctttcccttcggtgtggtgagtaagcgcagttgtcgtctcttgcggtgccgttgctggttctcacaccttttaggtctgttctcgtcttccgttccgactctctctttttcgttgcagccactgaagatcctggtgtcgccatgggccgccgccccgcccgttggtgagtcttgaatccgtgtactttcactgctgggaaacgggcggggaaagaagtgcctatggccgctgaaaacaattgtggggtggagcctcccccgtgcggcggccctgtcttgggaactgaccctatgttttacacctcccggctattttttagtctgcaatattactgtctgttccttgcttcccgtgtcggtgtggaagcgacggttccctcgtatctctgcctgtgtcctgcaaggtcatccgcattttcgggcgctagatacgctcttggggcctttgtgtgcgttctctgtcttatttccgggcgaggtgccgcgtgcgttgtcggacgtgaagggcagtccgggaaaaacgggtgcggccgcctcctgtgtcctacagggggcgccagacgcatttccactcggcttggaggtggatttagtgccacgtgcccgaaagtcttaaattgggtgacctgagctgtgcaatgataatgcggcgattttgtagtacgcagtgtcttgaagagagaatttttaactaggaaagtttgttgcaaagtgtttataggaagcgtaagacaaagttaacggaagatggtgtctgttgtttctagtcttgggtgtgctctgtgttgcagcagccaactgttgctttgtagtttatttccccgaatggaaacggtttagaagtggacgtgcattccccacccttttcccgtccctcgtttgggttgttccttgaggggcaaagtgcctgttgggctttctgtgaacctcacctaacctgtgttttttcactcccctgcagttaccggtattgtaagaacaagccgtacccaaagtctcgcttctgccgaggtgtccctggtaagtagtggaagagcccctgcactggttggctctgcggactccgcgtccgtctgtgacaccccctgcacacttacccaatccttttagatgccaagattcgcatttttgacctggggcggaaaaaggcaaaagtggatgagtttccgctttgtggccacatggtgtcagatgaatatgagcagctgtcctctgaaggtaaggcaggattctttgttcgtcaccccccagtccttcctccgtgctccctcaaccccacccacatacactgcactggaattgggagttgatgaaacatgagccttacaaaactcagccaacacagttcccctgagctggagatagtcgtggtgaaggtgaatgtttctctattatcttctctcactttgcagcttttcttctccctacctagccctggaggctgcccgaatttgtgccaataagtacatggtaaaaagttgtggcaaagatggcttccatatccgggtgcggctccaccccttccacgtcatccgcatcaacaagatgttgtcctgtgctggggctgacaggtgagcttggtctgggccttttaaggcagttggagtctctacattattaggcttgcattattttatcagagcatagaggtggccccagtgactcagccactatggctactagaaaagccaggctggcaagtgactttcagtggtcactcaggaccccttcctgcagatacaaacaaagcatgagtaagtcttagcaagctcttccccacaggttaggggaaacactggtgatgggagtagctcttcttgcttttagctgaatgacaaccatcttgccagcaggtagctgaagctggcagaggagcccagtggcgccttttcagtggttcttgggatgctccgcagccaattaagccgactgagttcctttcctcatggggacccagtgtgcgatggctgcacacagcagcttccttggtagtgtacgcagcctgttggttgtatgggttgctctaaggaccttggtagtgtacgcagcctgttggttgtatgggttgctctaagggaccttggagacaggcctttcaggtggatgttcatgtttctgaccttgcactaccccaatgtaggctccaaacaggcatgccgaggtgcctttggaaagccccagggcactgtggccagggttcacattggccaagttatcatgtccatccgcaccaagctgcagaacaaggagcatgtgattgaggccctgcgcagggccaagttcaagtttcctggccgccagaaggtatgtagtgctgcagcccccttctcccacctttgccccaggcctcctgactcagttctttccattgctccttagatccacatctcaaagaagtggggcttcaccaagttcaatgctgatgaatttgaagacatggtggctgaaaagcggctcatcccagatggctgtggggtcaagtacatccccagtcgtggccctctggacaagtggcgggccctgcactcatgagggcttccaatgtgctgcccccctcttaatactcaccaataaattctacttcctgtccacctatgtctttgtatctacattcttgacgggcaaaggaacttcctctgggaacctttgggtcattgccctttcacttcagaaacaggttgacaactcagccctgctcatgaggcagcaaaccctgcaaagcgctgggactggtggccttatgtcagttgtctactctggagcttgacttggacctccccaggtcctaggcagtaggttgaaaaacactgaagtgcttttcatgaaggcacagctgccacgaaagccttgcaatcccaggctggggtcagcctacagttgtgttgcttattacaacacatgcggaccaagaggggcttgtgggctagaggctgaccagcagcgtttatttagcaagggtaggtgtgcatcacattgggcttgttctcacccatctggtttggccattcctccttggtgggaatcatccaggtactgctgaggtcacctgcgatttgccccatttcctatctctagcaacctcctggccccatgcccccaccccttctaga

SEQ ID NO: 45920 - DNA, 567 bp, Homo sapiens
gccactgaagatcctggtgtcgccatgggccgccgccccgcccgttgttaccggtattgtaagaacaagccgtacccaaagtctcgcttctgccgaggtgtccctgatgccaagattcgcatttttgacctggggcggaaaaaggcaaaagtggatgagtttccgctttgtggccacatggtgtcagatgaatatgagcagctgtcctctgaagccctggaggctgcccgaatttgtgccaataagtacatggtaaaaagttgtggcaaagatggcttccatatccgggtgcggctccaccccttccacgtcatccgcattcaacaagatgttgtcctgtgctggggctgacagatccacatctcaaagaagtggggcttcaccaagttcaatgctgatgaatttgaagacatggtggctgaaaagcggctcatcccagatggctgtggggtcaagtacatccccaatcgtggccctctggacaagtggcgggccctgcactcatgagggcttccaatgtgctgcccccctcttaatactcaccaataaattctacttcctgtccaa

SEQ ID NO: 45921 - DNA, 1803 bp, Homo sapiens
  misc_feature (1)...(1803): n = a,t,c or g
tggttctacgcttctgtgagaagaactgtgaaaagagcatggttgaacagctggacaagtttttaaatgacaccaccaagcctgtggnccttctcctaagtgaaagattcattaatgtccctccacagatcgctctgcccatgtaccagcagcttcagaaagaactggcgggggcacacagaaccaataagccatgtgggaagtgctacttttaccttctgattagtaagacatttgtggaagcaggaaaaaacaattccaaaaagaaacctagcaacaaaaagaaagctgcgttaatgtttgcaaatgcagaggaagaatttttctatgagaaggcaattctcaagttcaactactcagtgcaggaggagagcgacacttgtctgggaggcaaatggtcttttgatgacgtaccaatgacgcccttgcgaactgtgatgttaattccaggcgacaagatgaacgaaatcatggataaactgaaagaatatctatctgtctaacccatttccaatggacagtgatgggcttgtttttgtaaaattaccagaaaactcagtggagatttactgaaaaactcagactttattcagattaagttcctctacaaaaagtagggttctgtcccatgtgtctctgacacatttacaaaataccagttttttaaaattttggtcaaattatgagtggttgatttaaaaacttttccaagaagaagaaaagcatggagtcgtaatttaaagaactcaataaaaacttctattttttattttaaaataatatacacagtgttattttcttcacatccacaggacggtcttgaagaaaataacactgtggatgtgaaatccgtcttcgcgtcatgtatctcccatatccagcagttcagccatccagctacctttgggaccctgctgcaccttgtgtttgctggggagtcactggagagtgcatctctgttcagtttcagggcacgtctcacacatttgctgttccttattcattgttgacacaggggataggtgatccactacttgctgtagaatgtccttactttcactaggaggcagattactgaaatagtattgtggtaccagctgcataaatagttcaggagagatttctgaggtaatcctgatgtagttgttctcagaaatgctgaatttatggaagaggacccactctgggcatcttcttggtgattgagtaaccagacaggggatgccagctgagcaacctgccttatgtgtcagcattaagtagttacctgatccatcaacatcccgagcaatctgcataaagtaaccggacagaagagctttctttatgtttagagtgttttccttggagccaaaagcaggttctgcatagggaagctcgattcgcttgataatttctaagagttcagctcgaataacatctgccattctgagtgctgaacagttgaggaagtaatcacgacaccacttttccacacagtactcactgctagaattcagagttgtgtcttggtaagccttgtaaatgctgatgagggtaaagtgatctccttcgggatgtaaaaatgtcttccaacaagtcaaggcagcctcttcagctccatgtggcacatgtgaaaagcaatttggagctgttaccatggctgcgattgttagcacttcatctacacagtcaaattcacaggacgctaagatagacttcgagagttgtggatcaagaggaaactctgacatgatgattccaaattcagaaagatttccatcattatccagtgctgccagataatctaagtcttccaatgcc

SEQ ID NO: 45922 - DNA, 1342 bp, Homo sapiens
aaataaaggggtaatagtgggagtgagatataagagataacacatcaagttttatgatttatttaacttgtggaacaaaaataaaccagattaaccacaaccatgccttactttatcaaatgtataagaagtaaatatgaatcttatatgacaaaatgtttcattcattataacaaatttccaataatcctgtcaattatatttctaaattttcccccaaattctaagcagagtatgtaaattctaagcagagtatgtaaattggaagttaacttatgcacgcttaactatcttaacaagctttgagtgcaagagattgaagagttcaaatctgaccaagatgttgatgttgggataagagaattctctgctccccacctctaagtcgccagccctccctagagctacctgtggagcaacctgctcagatacatcaaacatggagacagcactcaaagtagaattataaagaagatcatgtccatgttaacattattataaccctacattttgtgcataaagtgtaagtgtataagcatatcaatattaaaaagcaagcaagcagaatttggaattcatccaatccaaatgcggcatcttcaaacctcccatgatgctgcttacatgtctcgatccccacttaactatcttgggcttgtgacaaagtccacatggttccacacgggcaggccatactcatctttttcagtgggggtgaattccagtgtagtacaagagatagaaagaccagtccttgctgaaagacaagtctgaatgctccactttttcaattctctctccattcttcagtaagtcaacttcaatgtcggatggatgaaacccagacacatagcaattcaggaaatttgactttccattctctgctggatgacgtgagtaaacctgaatctttggagtacgctggatagcctccaggccagaaagagagagtagcgcgagcacagctaaggccacggagcgagacatctcggcccgaatggaacgcgttatgttttcccacagatcattctaagtgggagtcagcttgcccctgaaagacattatgagatttcaagagatggacgcttgaggagccgaagtggagcccctttgcctgtcttagttatggccctgtatggaagagtgtttgagaaggaccctccacgcttagggcagggatctgggaaattccagtgatctcctttagcagagcccttttaggattagcctggctaagaaaggaagaaaaaaaagagatccgttagtgtctgtttagaaaagatgttataaacttacagaaacaaatataataaactgaagcagatttgaaaagcaaaaaaaa

SEQ ID NO: 45923 - DNA, 644 bp, Homo sapiens
  misc_feature (1)...(644): n = a,t,c or g
caggtggcataaacacaaactttattgaggccctcagcactagttctctttcttctgcacagtcttggttccccggagacgtccagtccggcgggcagcaatgagacccactttgcggccagcaggggcatctctgcggatggtggagggcttgtcaattcggccacctccagccaccacaccaaccacagctctgttggctgaggagataaccttcttggagccggaggcagcttcacacgggtcttcttggtctcagggttgtgggagataacggtggcatagttccataaatgcccgggccagcttgccacggtctccaggcttctcctccaggcagcacacgattgtaccctcaggcatggtgcccacagggagcacattgccaatgttgagctgggccttcttgccgcaatacacaaactggcccgtgtgaatgccctcggcggcaatgaacagctccgtccgcttcttaaaccgatacggatcccggaagaccaccttggcgaggggcgcgccgcggcccgggtcgtggatgatgnccgnnacncggtcgngaattccagatctnatnatcgtagatactgaaaaaccccgcaagttcacttcaactgtgcatcgtgcaccatntnaatttcttttat

SEQ ID NO: 45924 - DNA, 1989 bp, Homo sapiens
gcaaccttgggcgctgccaaccgtgggcgagctctgggtgtgcgggcggcctggcgcggcgctccggtaaggcgtgtgtgcggcagggcggggacagaaccgtcctctcgggctctgggcgtgtccgagaccgcgctccccgccgaaatcaagctccgagtcatccgtgtggggcattcgtcccccctggcacagttggcctctttccagaagcccgttttgtttgttttacgtctaaattcgcgtcggttcttatttctctccctggcaaggtctgaagacgggtaggagaataacctgtgtcagcgtgttatgatgccgtcccgtaccaacctggctactggaatccccagtagtaaagtgaaatattcaaggctctccagcacagacgatggctacattgaccttcagtttaagaaaacccctcctaagatcccttataagggccatcgcacttgccactgtgctgtttttgattggcgcctttctcattattatagggctccctcctgctgtcagggctacatcagcaaagggggggcagaccgggccgttccagtgctgatcattgggcattctggtgttcctacccggattttaccacctgcgcatcgctttactatgcatccaaaggctaccgtggttactcctatgatgacattccagactttgatgactagcacccaccccatagctgaggaggagtcacagtggaactgtcccagctttaagatatctagcagaaactatagctgaggactaaggaattctgcagcttgcagatgtttaagaaaataatggccagattttttgggtccttcccaaagatgttaagtgaacctacagttagctaattaggacaagctctatttttcatccctgggccctgacaagtttttccacaggaatatgtatcatggaagaatagaggttattctgtaatggaaaagtgttgcctgccaccaccctctgtagagctgagcatttcttttaaatagtcttcattgccaatttgttcttgtagcaaatggaacaatgtggtatggctaatttcttattattaagtagtttattttaaaaatatctgagtatattatcctgtacacttatccctaccttcatgttccagtggaagaccttagtaaaatcaaagatcagtgagttcatctgtaatattttttttacttgctttcttactgacagcaaccaggaatttttttatcctgcagagcaagttttcaaaatgtaaatacttcctctgtttaacagtccttggaccattctgatccagttcaccagtaggttggacagcatataatttgcatcattttgtcccttgtaaatcaagatgttctgcagattattcctttaacggccggacttttggctgtttcctaatgaaacatgtagtggttattatttagagtttatagccgtattgctagcaccttgtagtatgtcatcattctgctcatgattccaaggatcagcctggatgcctagaggactagatcaccttagtttgattctattttttagcttgcaaaaagtgacttatattccaaagaaattaaaatgttgaaatccaaatcctagaaataaaatgagttaacttcaaacatttcagaaaacattttaatgattttatgatatctttaatcccagtacctaggatctaccttagtttctaggtagcctggcattgtgggtcacactcaactttccctaactctgaggtttatggacttgggcaactggaagcctggacatgccatcagctgagttgcaaggctgtgggaagagcaagttttagatgtctactcaatatccaagtggagctgttgaggaggcagttgcgatgcatgtgtgtgtctagagtttaagagtgggtcttggatggaaatagaaatttgggagtcagcatttggacagtatcttaaaagctagagggctgtttgagatcaccagtagagtgagtatagttggagg

SEQ ID NO: 45925 - DNA, 2542 bp, Homo sapiens
  misc_feature (1)...(2542): n = a,t,c or g
cagtgtggttggagctgttgtcttgtatgctcagcgaggcccggagagacccgggagagagctaggccgagtccaccgcccgagtctgctgcccgagcccgcgttacgcacaaagccgccgatccccggcctggggtgagcagagcgaccaccgcccgggagcagcgcggcgagacgcacggtgcgccctatgcccccgcgcccccaccgcccccgccgcggcagccgaagcgcagcgagagaacgcgccaccgcggggcccgggtgcagctagcgaccctctcgccacctgcgcgcagcccgaggtgagcagtgagcggcgagcgggagggcagcgaggcgttcgcgggccccctcctgctgccgcgcgcccggccgcctcatggcggccatccgcaagaagctggtggtggtgggcgacggcgcgtgtggcaagacgtgcctgctgatcgtgttcagtaaggacgagttccccgaggtgtacgtgcccaccgtcttcgagaactatgtggccgacattgaggtggacggcaagcaggtggagctggcgctgtgggacacggcgggccaggaggactacgaccgcctgcggccgctctcctacccggacaccgacgtcattctcatgtgcttctcggtggacagcccggactcgctggagaacatccccgagaagtgggtccccgaggtgaagcacttctgtcccaatgtgcccatcatcctggtggccaacaaaaaagacctgcgcagcgacgagcatgtccgcacagagctggcccgcatgaagcaggaacccgtgcgcacggatgacggccgcgccatggccgtgcgcatccaagcctacgactacctcgagtgctctgccaagaccaaggaaggcgtgcgcgaggtcttcgagacggccacgcgcgccgcgctgcagaagcgctacggctcccagaacggctgcatcaactgctgcaaggtgctatgagggccgcgctaccgcgcctggcccctgccggcacgtcgcccctcctggaccagtcccccgcgagcccggagaaggggagacccgtgtcccacaaggaccccaccggcctgcctggcatctgtctggctgacgcctctggtttgcgccaggacttggcgtgggcaccgggcgccccccatcccagtgtctgtgtgcgtccagctgtgttgcacaggcctgggctccccactgagtgccaagggtcccctgagcatgcttttctgaagagccgggcctcagagtgtgtggctgtgtgtctgttcgactcccctcgccccattttcaccccacccccgcctctgatccccgggggcgagattggcgcgggagtgtggccgcgccccatcagatgttctcccttcaccagcgggagcttgatatcccttgtctgtaacatagaccccgggtactgcgggaggggagggctgctggggaggatggggggatgttatataaatatagatataattttattttcggagctaagatggtgttatttaagggtggtgatgggtgagcgctctggcccaggctgggccagactcccgcccaagcatgaacaggacttgaccatctttccaacccctggggaagacatttgcaactgacttggggaggacacagcttcagcacagcctctcctgcgggccagcccggctgcgaaccctccaccagctaccggagggaggagggaggatgcgctgtggggttgtttttgccataagcgaactttgtgcctgtcctagaagtgaaaattgttcagtccaagaaactgatgttatttgatttatttaaaggctaaaatttgtttttttattctttgcacaattgtttcattgtttgacacttaatgcactcgtcatttgcatacgacagtagcattctgaccacacttgtacgctgtaacctcatctacttctgatgtttttaaaaaatgacttttaacaaggagagggaaaagaaacccactaaattttgctttgtttccttgaagaatgtggcaacactgttttgtgattttatttgtgcaggtcatgcacacagttttgataaagggcagtaacaagtattggggcctatttttttttttttccacaaggcattctctaaagctatgtgaaattttctctgcacctctgtacagagaatacacctgcccctgtatatccttttttcccctcccctccctcccagtggtacttctactaaattgttgtcttgttttttattttttaaataaactgacaaatgacaaaatggtgagcttatgatgtttacataaaagttctataagctgtgtatacagttttttatgtaaaatattaaaagactatgatgatgacatttataaaatggctcttgtggtttaatagtgtgtaaaaatacccttgtgaatttgggaacaagggagatattctcctagggcgaggtccnttcttgccaactccgtttccctttgggcaatgtaggtaatgagggtgaagtcccttgaggggctgtgggggttgggtgaccagggagaccgggttt

SEQ ID NO: 45926 - DNA, 1220 bp, Homo sapiens
  misc_feature (1)...(1220): n = a,t,c or g
gatacccttcgacatgactacgaatttaatacgactcactatagggaatttggccctcgaggccaagaattcggcacgagccgggtgtcatccgcggggaaagaacttggtcctgatgtctgaccatggagatgtgagcctcccgcccgaagaccgggtgagggctctctcccagctgggtagtgcggtagaggtgaatgaagacattccaccccgtcggtacttccgctctggagttgagattatccgaatggcatccatttactctgaggaaggcaacattgaacatgccttcatcctctataacaagtatatcacgctctttattgagaaactaccaaaacatcgagattacaaatctgctgtcattcctgaaaagaaagacacagtaaagaaattaaaggagattgcatttcccaaagcagaagagctgaaggcagagctgttaaaacgatataccaaagaatatacagaatataatgaagaaaagaagaaggaagcagaggaattggcccggaacatggccatccaggcaagagctggaaaaggaaaaacagagggtagcacaacagaaggcagcagcaattgggaacagggaacagttcccatgccttcgaggagatgatccggaaccaggagctagaaaaagagcgactgaaaattgtacaggagtttgggaaggtagaccctggcctaggtggcccggctagtgcctgacttggagaagccctccttagatgtgttccccaccttaacagtctcatccatacagccttcagactgtcacacaactgtaaggccagctaagccacctgtggtggacaggtccttgaaacctgggagcactgagcaactcagaaagtattcccacaatcgatggattgcgccatgtggtggtgcctggggcggctgtgcccacagtttctccagttaggccagtgccaacactgcccggggagtggagacatgtggaattctctgtggaaaactgatgaggaatgaatttaccattacccatgttctcatccccaagcaaagtgctggggtctgattactgcaacacagaggaacgaggaaggaactttttcctcattacagggntcagcaggggccttcattcacattgggcttggatttcatacttnacccccacacagaccgngttttttttcccgtnttcggaccttncaaattnaattgnttttttacccagtgntttt

SEQ ID NO: 45927 - DNA, 509 bp, Homo sapiens; identical to SEQ ID NO: 22253
  misc_feature (1)...(509): n = a,t,c or g

SEQ ID NO: 45928 - DNA, 1576 bp, Homo sapiens
  misc_feature (1)...(1576): n = a,t,c or g
cttttttttttggccaggcaggaggacctctgcgtcctctgtttattgttttgcagcaggaggcccaacatagaacatactcgccagtactcggctgtgcaaaacaggggctagcgctgaagtacaaatgggaaaacgtgattcttttgttttaaataaatacttagaacacgacttggctcctacaagcatctggactctaggtctcagtactggagtgtctcacccatgggccccacgcagggacgccacggttccctcccaccccgtgatcaagacacggaatcggctgccgatggttggatcgcaatgcgccccttttctagagccttccccggccatctacaggcaggatgcggctgggaaaaagacaactggaatttctcgaaggttgatggtccgcacggttgaggattctacgtggttctcttggttcccctggtgtgtgtgtgtgtgtggaggaggccgcggcccttagatcaccttcttgagctcgtcgtaacaggaccagcacgaaggcgccccccatgccccgcaggacgttggaccacgcacccttgaagaaggccttgcccccctcatctctgaagatcttcctccaacagtcgacggtgcccgtgtacatgatgtcagctcctttgcgcccggactgcatcatcatgcgccgccgcaccgtgtcgaaggggtaggacaccacgccggccacgggccgtcacggtctgcgcgatcatccagctcaccacgatgtgcgtgttcttggggtcggggagcatgcccttggccgtatcgtacacgccgaagtaggccgcccggtagatgatgatgccctgcacggagacactgaagccctggtacaggccccggatgccgtcggacttggtgatcttcaccaggcagtctcccaggcctcggaactcgcgctctgtgcctgactttcccacgtccgctgcccaggcgggttctggcgaaatccagcgggtacacgaagcagagggaggtcgcgccggcccgcaccgccggaggcccaggttgccccgcaaagtacctccagaactgcgtgtgcttgtcccacgcccccccaggaagatctgcttgtaactttatccttgaaggcgaagttgagggcttgaagtggggaaagtagcgaatgacgttggcaaaggttgccccctccagaaggacagcacgcccctgctccttggggaatgcggaacaatgcaatcccacgatgcccttgtactgcttgtcggcggcgatctgcttgctggcgtgctggaccctgcaagcagcagcttgacccgctcgatcggagccacggccgtcttggagatggcggcggcgatgcctccggccaagaagtctttggcgaaggagatggcctgttccgtcatggtggcagggcgggcagcggaacgggaggacagccggagaacgggcgcggagagtgaatggagggcgtcgctggctcagccctgccgccgcctctcgtgccgaattcttggcctcgagggccaaattccctatagtgagtcgtattaaattcgtaatcatgtcataaggntttcngnngttcaaa

SEQ ID NO: 45929 - DNA, 356 bp, Homo sapiens; identical to SEQ ID NO: 13054
  misc_feature (1)...(356): n = a,t,c or g

SEQ ID NO: 45930 - DNA, 1645 bp, Homo sapiens
attggctgagatatgaacatattgttgaaaggtaatttgagagaaatatgaagaactgaggaggaaaaaaaaaaaaaaagaaaagaaccaaaaacctcaactgcctactccaaaatgttggtcattttatgttaagggaagaattccagggtatggccatggagtgtacaagtatgtgggcagattttcagcacactcttttcccactgtttaaggagttagtggattactgccattcacttcataatccagtaggatccagtgatccttacaagttagaaaacataatcttctgccttctcatgatccaactaatgccttactcttcttgaaattttaacctatgatattttctgtgcctgaatatttgttatgtagataacaagacctcagtgccttcctgtttttcacattttccttttcaaatagggtctaactcagcaactcgctttaggtcagcagcctccctgaagaccaaaattagaatatccatgacctagttttccatgcgtgtttctgactctgagctacagagtctggtgaagctcacttctgggcttcatctggcaacatctttatccgtagtgggtatggttgacactagcccaatgaaatgaattaaagtggaccaatagggctgagctctctgtgggctggcagtcctggaagccagctttccctgcctctcatcaactggaatggaggtcagcatgtctatttcagcttcgtttatttttcaagaataatcacgctttcctgaatccaaactaatccatcaccggggtggtttagtggctcaacattgtgttcccatttcagctgatcagtgggcctccaaggaggggctgtaaaatggaggccattgtgtgagcctatcagagttgctgcaaacctgacccctgctcagtaaagcacttgcaaccgtctgttatgctgtgacacatggcccctccccctgccaggagctttggacctaatccaagcatccctttgcccagaaagaagatgggggaggaggcagtaataaaaagattgaagtattttgctggaataagttcaaattcttctgaactcaaactgaggaatttcacctgtaaacctgagtcgtacagaaagctgcctggtatatccaaaagctttttattcctcctgctcatattgtgattctgcctttggggacttttcttaaaccttcagttatgatttttttttcatacacttattgggaactctgcttgatttttgcctcttccagtcttcctgacactttaattaccaacctgttacctactttggactttttggcatttaaaaacagacactggcatggatatagttttacttttaaactgtgtacataactgaaaatgtgctatactgcatactttttaaatgtaaagatatttttatctttatatgaagaaaatcacttaggaaatggctttgtgattcaatctgtaaactgtgtattccaagacatgtctgttctacatagatgcttagtccctcatgcaaatcaattactggtccaaaagattgctgaaattttatatgcttactgatatattttacaattttttatcatgcatgtcctgtaaaggttacaagcctgcacaataaaaatgtttaacggttaaaaaaaaaa

SEQ ID NO: 45931 - DNA, 313 bp, Homo sapiens
ggcccgacgagctccgctttcgctacagcatggtggcctactggagacaggctggactcagctacatccgatactcccagatctgtgcaaaagcagtgagagatgcactgaagacagaattcaaagcaaatgctgagaagacttctggcagcaacgtaaaaattgtgaaagtaaagaaggaataatctaccctgactaaagcttgaaatgctacatttccaaggtgaagtcgacgcggccgcgaattccagatctatgaatcgtagatactgaaaaaccccgcaagttcacttcaactgtgcatcgtgcacca

SEQ ID NO: 45932 - DNA, 2569 bp, Homo sapiens
gtcactccggcgcagtgttgggactgtctgggtatcggaaagcaagcctacgttgctcactattacgtataatccttttcttttcaagatgcctgaggaagtgcaccatggagaggaggaggtggagacttttgcctttcaggcagaaattgcccaactcatgtccctcatcatcaataccttctattccaacaaggagattttccttcgggagttgatctctaatgcttctgatgccttggacaagattcgctatgagagcctgacagacccttcgaagttggacagtggtaaagagctgaaaattgacatcatccccaaccctcaggaacgtaccctgactttggtagacacaggcattggcatgaccaaagctgatctcataaataatttgggaaccattgccaagtctggtactaaagcattcatggaggctcttcaggctggtgcagacatctccatgattgggcagtttggtgttggcttttattctgcctacttggtggcagagaaagtggttgtgatcacaaagcacaacgatgatgaacagtatgcttgggagtcttctgctggaggttccttcactgtgcgtgctgaccatggtgagcccattggcaggggtaccaaagtgatcctccatcttaaagaagatcagacagagtacctagaagagaggcgggtcaaagaagtagtgaagaagcattctcagttcataggctatcccatcaccctttatttggagaaggaacgagagaaggaaattagtgatgatgaggcagaggaagagaaaggtgagaaagaagaggaagataaagatgatgaagaaaagcccaagatcgaagatgtgggttcagatgaggaggatgacagcggtaaggataagaagaagaaaactaagaagatcaaagagaaatacattgatcaggaagaactaaacaagaccaagcctatttggaccagaaaccctgatgacatcacccaagaggagtatggagaattctacaagagcctcactaatgactgggaagaccacttggcagtcaagcacttttctgtagaaggtcagttggaattcagggcattgctatttattcctcgtcgggctccctttgacctttttgagaacaagaagaaaaagaacaacatcaaactctatgtccgccgtgtgttcatcatggacagctgtgatgagttgataccagagtatctcaattttatccgtgggtgtggttgactctgaaggatctgcccctgaacatctcccgagaaatgctccagcagagcaaaatcttgaaagtcattcgcaaaaacattgttaagaagtgccttgagctcttctctgagctggcagaagacaaggagaattacaagaaattctatgaggcattctctaaaaatctcaagcttggaatccacgaagactccactaaccgccgccgcctgtctgagctgctgcgctatcatacctcccagtctggagatgagatgacatctctgtcagagtatgtttctcgcatgaaggagacacagaagtccatctattacatcactggtgagagcaaagagcaggtggccaactcagcttttgtggagcgagtgcggaaacggggcttcgaggtggtatatatgaccgagcccattgacgagtactgtgtgcagcagctcaaggaatttgatgggaagagcctggtctcagttaccaaggagggtctggagctgcctgaggatgaggaggagaagaagaagatggaagagagcaaggcaaagtttgagaacctctgcaagctcatgaaagaaatcttagataagaaggttgagaaggtgacaatctccaatagacttgtgtcttcaccttgctgcattgtgaccagcacctacggctggacagccaatatggagcggatcatgaaagcccaggcacttcgggacaactcccaccatgggctatatgatggccaaaaagcacctggagatcaaccctgaccaccccattgtggagacgctgcggcagaaggctgaggccgacaagaatgataaggcagttaaggacctggtggtgctgctgtttgaaaccgccctgctatcttctggcttttcccttgaggatccccagacccactccaaccgcatctatcgcatgatcaagctaggtctaggtattgatgaagatgaagtggcagcagaggaacccaatgctgcaagttcctgatgagatcccccctctcgagggcgatgaggatgcgtctcgcatggaagaagtcgattaggttaggagttcatagttggaaaacttgtgcccttgtatagtgtccccatgggctcccactgcagcctcgagtgcccctgtcccacctggctccccctgctggtgtctagtgtttttttccctctcctgtccttgtgttgaaggcagtaaactaagggtgtcaagccccattccctctctactcttgacagcaggattggatgttgtgtattgtggtttattttattttcttcattttgttctgaaattaaagtatgcaaaataaagaatatgccgtttttatacaaaaaaaaaaaaaaaaaa

SEQ ID NO: 45933 - DNA, 3573 bp, Homo sapiens
  misc_feature (1)...(3573): n = a,t,c or g
ggatagcgccgccggagccgaagtgctggcgcccccgcggccgctgcctccgcggagcccaaaatcatgaaagtcaccgtgaagaccccgaaggaaaaggaggaattcgccgtgcccgagaatagctccgtccagcagtttaaggaagaaatctctaaacgttttaaatcacatactgaccaacttgtgttgatatttgctggaaaaattttgaaagatcaagataccttgagtcagcatggaattcatgatggacttactgttcaccttgtcattaaaacacaaaacaggcctcaggatcattcagctcaggcaaacaaatacagctggaagcaatgttactacatcatcaactcctaataggtaactctacatctgggttctgctactagcaacccttttggtttaggtggccttgggggacttgcaggtctgagtagcttgggtttgaatactaccaacttctctgaactacagagtcagatgcagcgacaacttttggtctaaccctggaaatggatggtccagatcatggaaaatccctttgttcagagccatgctctcaaatcctgacctgatgagacagttaattatggccaatcccacaaatgcagcagttgatacagagaaatcccagaaattagtcatatgttgaataatccagatataatgaagacaaacgttggaacttgccaggaatccagcaatgatgcaggagatgatgaggaaccaggaccgagctttgagcaacctagaaagcatcccagggggatataatgctttaaggcgcatgtacacagatattcaggaaccaatgctgagtgctgcacaagagcagtttggtggtaatccatttgcttccttggtgagcaatacatcctctggtgaaggtagtcaaccttcccgtacagaaaatagagatccactacccaatccatgggctccacagacttcccagagttcatcagcttccagcggcactgccagcactgtgggtggcactactggtagtactgccagtggcacttctgggcagagtactactgcgccaaatttggtgcctggagtaggagctagtatgttcaacacaccagggaatgcagagcttgttgcaacaaataactgaaaacccacaacttatgcaaaacatgttgtctgccccctacatgagaagcatgatgcagtcactaagccagaatcctgaccttgctgcacagatgatgctgaataatcccctatttgctggaaatcctcagcttcaagaacaaatgagacaacagctcccaactttcctccaacaaatgcagaatcctgatacactatcagcaatgtcaaaccctagagcaatgcaggccttgttacagattcagcagggtttacagacattagcaacggaagccccgggcctcatcccagggtttactcctggcttgggggcattaggaagcactggaggctcttcgggaactaatggatctaacgccacacctagtgaaaacacaagtcccacagcaggaaccactgaacctggacatcagcagtttattcagcagatgctgcaggctcttgctggagtaaatcctcagctacagaatccagaagtcagatttcagcaacaactggaacaactcagtgcaatgggatttttgaaccgtgaagcaaacttgcaagctctaatagcaacaggaggtgatatcaatgcagctattgaaaggttactgggctcccagccatcatagcagcatttctgtatcttgaaaaaatgtaatttatttttgataacggctcttaaactttaaaatacctgctttatttcattttgactcttggaattctgtgctgttataaacaaacccaatatgatgcattttaaggtggagtacagtaagatgtgtgggtttttctgtatttttcttttctggaacagtgggaattaaggctactgcatgcatcacttctgcatttattgtaattttttaaaaacatcaccttttatagttgggtgaccagattttgtcctgcatctgtccagtttatttgctttttaaacattagcctatggtagtaatttatgtagaataaaagcattaaaaagaagcaaatcatttgcactctataatttgtggtacagtattgcttattgtgactttggcatgcatttttgcaaacaatgctgtaagatttatactactgataattttgttttatttgtatacaatatagagtatgcacatttgggactgcatttctggaaacatactgcaataggctctctgagcaaaacacctgtaactaaaaaagtgaagataagaaaatactcttaaagctgagtatttcctaattgtatagaatcttacagcatctttgacaaacatctcccagcaaaagtgccggttagtcaggtttgttgaaaatacagtagaaaagctgattctggttatctctttaaggacaattaattgtacagacacataatgtaacattgtctcaacattcattcacagattgactgtaaattaccttaatctttgtgcagactgaaggaacactgtagtataccccaaagtgcatttgcctaggacttctcagcttctcccataggtagtttaacaggcattaaaatttgtaattgaaatgttgctttcactgaaaaagtgtcttgatgtttcagttatttttaatcgccataaaaaaatagaactatcttttgggtttatctgttttctcatgcacaggcaatacacaaatttaaaatgagttgtgagccaattgtttctgaagtgttttggtagttctattaagaaatagttaaatattgtgcttttcagagcctcagagaaagggggacgnntnnncgcgcnggggcagcggaatctgtcctggatggggccagcttaaataatactggcaaccaagattctgttaggatttctgtgcatatagtgtagtaaagaagtatcattcaggggtgaaaaacaaagagccgttttaatgatgttgagtacatttggctgttttatagcctttttcttccctcccccaaagaattctgtttgcctaactcccaaactgttggggtggtacattcctttaggaccaattaaaacataattgagggtcagtgatacatttggctgactctggttcagtattctcttaggtgattatattctctcatgtacagttacaggaaattaaaatgttaaagtaacctaaaatgaattcagaccaataaaatcaagggaaatacaagttgattgcattacttctgtatgttgcttgctattaaaaaggttaagaggccaggttacccaccagtccttgcactgttctgacactttccccaggaggaaaacaagtacaaaggttacggtggaggcataagtagaagagattgttaagaagggtattcatgtgtctttgctctttctgctttatgcctcagtttggtttaaaaacttctgtactggcaaatggtggtattcagtgtgggatagtgtcataactaatttgacaatttattaatcataaaataacaataaatctctagcttttacacttgaaaaaaaaaaa

SEQ ID NO: 45934 - DNA, 2335 bp, Homo sapiens
gtgagcggcaacatggcgtccaggtctaagcggcgtgccgtggaaagtggggttccgcagccgccggatcccccagtccagcgcgacgaggaagaggaaaaagaagtcgaaaatgaggatgaagacgatgatgacagtgacaaggaaaaggatgaagaggacgaggtcattgacgaggaagtgaatattgaatttgaagcttattccctatcagataatgattatgacggaattaagaaattactgcagcagctttttctaaaggctcctgtgaacactgcagaactaacagatctcttaattcaacagaaccatattgggagtgtgattaagcaaacggatgtttcagaagacagcaatgatgatatggatgaagatgaggtttttggtttcataagccttttaaatttaactgaaagaaagggtacccagtgtgttgaacaaattcaagagttggttctacgcttctgtgagaagaactgtgaaaagagcatggttgaacagctggacaagtttttaaatgacaccaccaagcctgtgggccttctcctaagtgaaagattcattaatgtccctccacagatcgctctgcccatgtaccagcagcttcagaaagaactgggcgggggcacacagaaccaataagccatgtgggaagtgctacttttaccttctgattagtaagacatttgtggaagcaggaaaaaacaattccaaaaagaaacctagcaacaaaaagaaagctgcgttaatgtttgcaaatgcagaggaagaatttttctatgaggagcagggaaaacctgaggtgcttggaggtccagacacaagaagaggattggaaccagttccgatacagcacaatggttggtctgttcccccagtattagaataaattaaaacatacaagccaggatgaatgaagcccaataggaaataaaaaacaggcacacaacattatttggggaaaaacacctctagtgacacattttcttcatctgcactgattatttcagcaaaagaaatctagtatgttttcatacatctgatgtataaatttgctgaactttgagttagttttcttaagataatttttcatattaagaaaattttccttttctaacctattaaaatacctcactatcatttcaaaaggttaaatgagttgatcactatctctgctctgtgctcctcaaaatataatttcaaatggatccgatctaaatctatacctagtgcagatttgcaaaaaaagaaaaggaatagtcattaaggatacctgttaccatggccgcgattgttagcacttcatctacacagtcaaattcacaggacgctaagatagacttcgagagttgtggatcaagaggaaactctgacatgatgattccaaattcagaaagatttccatcattatccagtgctgccagataatctaagtcttccaatgcctgcatcaaactttctggtgctaggaaaggaaaaaaataataatttaagagtctcatatggctaagatggagaaacaggtactggacttttccctcctgcatgaaacaagcaaacaatggacaaaatatgtgaaacaacggtttgcaagccaccaaataccagggagtgaaggatagtgattcttgagagggcaaactcaggaggggagccctgtgattgtccagctcatgctccgaggagggtcccagctgcagtgtgcatgcggggggaacccaggtggagcctgccagcctccctgcagtaggaaaacaatgccagggatccagggagactaaggtggccggaactcgcggtcacagtactggagagagacacacagatctaagtcgggggccagagggagctccctcaactaggcagcacagccctactgatcagcgcatgtgtgtaaggaaccacctcaggccagagaaagagccatgtgagaagattagaaggaacagtggtgctgacacaggacctagggtagggcctgttcccaccaccctagctggaaaacctcatgatttatggggcactgggtagaaaacacaagtgagaaaccctagatgggcacctgcccacctgacacagctatacagcaggacctgaaaggatcacactgcatcctaggacaaagctcaaaagtacctctgggactacaaaaatattcagtgcccaagaaggtaaaatgtacaatgtctagcatccagtagagaggcatgaaaagcaggaaaatacattgcataatacagagaaaaattaatcacaactgacctggatctcagatgctagaaatagtagacaaagatgttatttcccagtgcaaataaagaaataaagatag

SEQ ID NO: 45935 - DNA, 1632 bp, Homo sapiens
gccgctctctcggtgagcgcagccccgctctccgggccgggccttcgcgggccaccggcgccatgggccagtgcggcatcacctcctccaagaccgtgctggtctttctcaacctcatcttctggggggcagctggcattttatgctatgtgggagcctatgtcttcatcacttatgatgactatgaccacttctttgaagatgtgtacacgctcatccctgctgtagtgatcatagctgtaggagccctgcttttcatcattgggctaattggctgctgtgccacaatccgggaaagtcgctgtggacttgccacgtttgtcatcatcctgctcttggtttttgtcacagaagttgttgtagtggttttgggatatgtttacagagcaaaggtggaaaatgaggttgatcgcagcattcagaaagtgtataagacctacaatggaaccaaccctgatgctgctagccgggctattgattatgtacagagacagctgcattgttgtggaattcacaactactcagactgggaaaatacagattggttcaaagaaaccaaaaaccagagtgtccctcttagctgctgcagagagactgccagcaattgtaatggcagcctggcccacccttccgacctctatgctgaggggtgtgaggctctagtagtgaagaagctacaagaaatcatgatgcatgtgatctgggccgcactggcatttgcagctattcagctgctgggcatgctgtgtgcttgcatcgtgttgtgcagaaggagtagagatcctgcttacgagctcctcatcactggcggaacctatgcatagttgacaactcaagcctgagctttttggtcttgttctgatttggaaggtgaattgagcaggtctgctgctgttggcctctggagttcatttagttaaagcacatgtacactggtgttggacagagcagcttggcttttcatgtgcccacctacttacctactacctgcgactttctttttccttgttctagctgactcttcatgcccctaagattttaagtacgatggtgaacgttctaatttcagaaccaattgcgagtcatgtagtgtggtagaattaaaggaggacacgagcctgcttctgttacctccaagtggtaacaggactgatgccgaaatgtcaccaggtcctttcagtcttcacagtggagaactcttggccaaaggtttttggggggaggaggaggaaaccagctttctggttaaggttaacaccagatggtgcccctcattggtgtccttttaaaaaatatttactgtagtccaataagatagcagctgtacaaaatgactaaaatagattgtaggatcatatggcgtatatcttggttcatcttcaaaatcagagactgagctttgaaactagtggtttttaatcaaagttggctttataggaggagtataatgtatgcactactgttttaaaagaattagtgtgagtgtgtttttgtatgaatgagcccattcatggtaagtcttaagcttgttggaaataatgtacccatgtagactagcaaaatagtatgtagatgtgatctcagttgtaaatagaaaaatctaattcaataaactctgtatcagcccccaac

SEQ ID NO: 45936 - DNA, 763 bp, Homo sapiens
ctatgacatgattacgaatttaatacgactcactatagggaatttggccctcgaggccaagaattcggcacgagggcgcttcgggagccgcggcttatggtgcagacatggccaagtccaagaaccacaccacacacaaccagtcccgaaaatggcacagaaatggtatcaagaaaccccgatcacaaagatacgaatctcttaagggggtggacccccaagttcctgaggaacatgcgctttgccaagaagcacaacaaaaagggcctaaagaagatgcaggccaacaatgccaaggccatgagtgcacgtgccgaggctatcaaggccctcgttaaagcccaaggaggttaagcccaagattcccaaagggtgttcagccgcaagcttcgatcgactttgcctacattgcccaccccaagcttgggaagcgtgcttcgtgcccgtattgccaaggggcttcaggctgtgccggccaaaggccaagggccaaggccaaggccaaggccaaggatcaaaccaaggcccaggctgcagccccagcttcagttccagctcaggctcccaaacgtacccaggcccctacaaaggcttcagagtagatatctctgccaacatgaggacagaaggactggtgcgaccccccacccccgcccctgggctaccatctgcatggggctggggtcctcctgtgctatttgtacaaataaacctgaggcaggatttgttagcctctgtctatgatcctgggaaaaaaagtcga

SEQ ID NO: 45937 - DNA, 1870 bp, Homo sapiens
ccacgcgtccgcgggacccctgttggagagactatggcgctcaacaagaatcactcggagggcggcggagtgatcgtcaataacaccgagagcatcctaatgtcctatgatcacgtggaactcacattcaatgacatgaagaacgtgccagaagccttcaaagggaccaagaaaggcactgtctaccttaccccttaccgggtcatctttctgtccaagggcaaggatgccatgcagtccttcatgatgccattttatctcatgaaagactgtgagatcaagcagcccgtatttgggtgcaaacttacatcaagggaacagtgaagggcggaagcgggaggtggctggggaaggctctgcttcctacaagttgactttcacggcagggggcgccattgagttcggacagcggatgctccaggtggcatctcaagcctccagaggtgaagtccccagtgggagcctatggctactcttacatggcccagcggggccttatgtctatcccccgccagtcgccaatggaatgtacccctgccctcctgggttacccctatccaccgcccccacctgagttctatccaggaccccccatgatggacggggccatgggatacgtgcagcccccaccaccgccctaccctgggcccatggaacctccggtcagcggccccgatgtcccctccactcctgcagccgaagccaaggccgcagaagcagccgccagcgcctattacaacccaggcaatcctcacaacgtctacatgcccacgagccagccgccgccacctccctactacccaccggaagataagaagacccagtaggccctcctgcctccctgcctcccaccctcatctctctaccctacccctcccatcggggctgtgctggggcttggggaggggagggggcgccttgttctccctccaggtctgatcataaacaattaccaggaactagcattgtgggacattaggggcccccggcctcggggagaggtgccggcccagcttcccatgccagcccggagcccacagtggttgcccagcgtacctccctcaccgtctggggctcttctgggagcacggagcatcccctgttcctggtttcactctcagcttctcccctcgaagggactctctggccacctcctccaccgcagtccagctccctcagtctggcacccactgctacactcagcctcatgagccacttcagaccagccaggtgtcttcccgggccctgccagaccctgctcacattccctctgctggtctgtgctggtctcagaaggccaccgcgcccgcattccactcagccagggtccagctgcagcccccgccacccttccttcccttccctgtcctgggtcatgttgttgccaccctgtgtgacttttgaagctgtaaaaatgagcttccagggcttgggtggcgtcggggcagggccgccgaggctgggaggaagcccttctgccttttgctggtgtttctggaatttgctttccctcacctctcacttccttctagaaggagcttcctgactggaaccagagaatgcatgtctgtccacttggtggctgctgggtggggccgggaacaagggcccctgaaccctgtgtgctggccgggacctgccaccagccccccagcctgcttcttccccttaagctttgtgcccctggatgcgctaacattcactcttgtttgtccctggactggccatgaagtgaggagatggttatttaaagagaattccctatttatttgacaaaaaatccagttaatatattaatgtgaaataaaccctgtttgcacctcgatttgtttgctgaaaatgtgaaatagtaaaaatgaaataactggaa

SEQ ID NO: 45938 - DNA, 457 bp, Homo sapiens
  misc_feature (1)...(457): n = a,t,c or g
gtggngnnttgtnttgtgnctnagtagatcttnttntttgatcnccctaatttaatacgactcactatagggaatttggccctcgaggccaagaattcggcacgagcgccttacgaaaggcggcaaaaagggagccaagaagaaagtggttgatccattttctaagaaagattggtatgatgtgaaagcacctgctatgttcaatatcatggagcttcatggtgaaggcagtagttctggaaaagccactggggacgagacaggtgctaaagttgaacgagctgatggatatgaaccaccagtccaagaatctgtttaaagttcagacttcaaatagtggcaaataaaaagtgctatttgtgaaaaaaaaaaataaaaaaaaannntttttnttnannggncccnanntttntnccttttaggggggntaattttaccttggccntgccngcntttt

SEQ ID NO: 45939 - DNA, 1912 bp, Homo sapiens
ggaggaagtgtggaaactttgtaaaatgtgtacataggacttggagaccttgtgtccgccctgctctttcttccgatcccacaggaagtgcccctgcactgttcatcactctcacgaggacgtcacctgtgctaacctgggggaaggtggggtcctttcttctttccttttgagaagcactgaaactcccaagtgtgttcttatcccatggataggaaaccagtgaattccgtggctggcacaccacgagctgtcacgcggcacgggtcataacacatctgggtgtcatcggacacctcacctcgcccaccctgtaggagcgtaaggagcctccatcctcagccacgtgcagctgacgtggctttcctgatcggagggcttttcttttatgggtggcccagcttcttcaagaccttcactgctctgcctcagtggacagtcgtttcttttttgaggtgtgaccttttgttttcatgccttccccttgaagtcatcctgtgttttgtaatcagctgtcaggccaaatgtctgacccgaaagagaatgtatttacactcatgctgcgttgttcagcagcccctctgtgttctgtgtgatttgttttatttttccttttttttacatatatatgcagggaagtaatggtactggtagtgtatgttttctatgtggttcaaatatgaatttcgaacacaccaagccgctaatgagatagcagcttttttctgggacccagagtcacaaccaaattgatttaagaccggacccaagacacctttaacaataggactgaaaggaaaaaggatagggaaaaagcttattaaagaaatgtgtcaacaccaaatgtagaggggaagaaccacaaccaggcataataccaaaccggttccagggggaaacaaggctttggtattccgctggctccagcgctttttctgaaacccgaggctggccagggtgctgtcaccgtgtggtctttgattgcagccattcaatgcccacatgcttttccttcttgtttcagaacagcacatggtcacaacaagatattttctttccctccaaagccttttgtctccttgtgcctctttttatccttaggaaaagatccaggtgcttgtgaaaagaatcatgaatgcaacaagggaggctggtcctgttgctgtcgccgattaagttttaaacttttatttattatttatgtctgccgtattttaaataaacattctcgttccttccagttccagtcatagtgtgtctgtggcattccagtccaaccatgtgacttatttattctaatttgagggctgcactgtgacaccatggtgtcctgtgacaccgtgttccagacatttatggaaggaaaacatcccatataaatgaaactgtcatgctgtgtcctccccggcagcagaagatgtgtccttccattgagtgagggtaaccttatgtccaccaaggatactttgagaaagcccctaaggaacaagcctcagtcccacggtttcagactatttattctctgaacacaagagtattggttaattatgttctcagctctccctgctgttgtatgtgtgcattcactgcaagtaacttatatctttttatttgaatgtattttaaagcagtagatagaataacaaaggaatatgaaaaccatggactgaatggaccattttatgtattcagagagagaagccactcatcattgcccagaaataccatgtaaaaattggcagttcagaggttgcaatacttagtatagtaaataaataaacggtcaacattgtgcaaccactaccaaaaagtgtgttgtaatgcatcaaaaatcaacacaattttattcactaatgagtatcaataaaataagttcaaatgatggaaaccaaaaaaaaaaaaaaaaaaaaaa

SEQ ID NO: 45940 - DNA, 549 bp, Homo sapiens
ggaagaacatgtcctttgtgaatgatcttacagtcactcaggatgggaggaagatttatttcaccgattctagcagcaaatggcaaagacgagactacctgcttctggtgatggagggcacagatgacgggcgcctgctggagtatgatactgtgaccagggaagtaaaagttttattggaccagctgcggttcccgaatggagtccagctgtctcctgcagaagactttgtcctggtggcagaaacaaccatggccaggatacgaagctctttagtcaagagacggtgatgaagtttgtgccgcggtacagcctcgtcctagaactcagcgacagcggtgccttccggagaagcctgcatgatcccgatgggctggtggccacctacatcagcgaggtgcacgaacacgatgggcacctgtacctgggctctttcaggtcccccttcctctgcagactcagcctccaggctgtttagccctcccagatagctgccctgcacgcaggccaggagtcttcacactcaggcaccaggcctggtccaggagg

SEQ ID NO: 45941 - DNA, 1228 bp, Homo sapiens
  misc_feature (1)...(1228): n = a,t,c or g
cgtcgactttttttttcaaggagtgggaaggttttaatgagcatcccagagggaccaggggatacaaactccaaatccagcctttatatcatcattatttcaagcaacaggaggaggctcagccttgcttagctcattcccagatgaagaggcagctggagggaagtccctgaaagtgcctctctacccagcagaggggctaagggaaagtggagaggtctctgctgctgctgctgctgctgctgctgctgttgctgctaccactgccaccaagagcagggagacctcaagcaccaagctgacctttggaggtcaggacggacccagaatcaggcaggaatttggcaggaacatcagacattggaaggttagatgagactgaacaggtgagaaaactctttagggtcccccagacagcattgagatctcacagaggggccccaagggcctgcgactccaggagctgagaccccccagggagggaggtacctctagactgagacactcacaaagggaccccagttcagcaagggtcagaggaaggtctggagggagaagagagtaaagggccctgggtgggcaggaggctgaggagggagcctggggagagcaccagggcggggcatcaggccagtgcctggaaggtgtggccaaaggggtctcttagctgctgctctgcctgctccctgcctcatggatgagtttggcgatggggccggtgatgccgcctatcaaggtccaagtactcatcgaagctgatgcgccccatcatgattggcatcccaggttctggatgagcttatccgcagccttccggttccctgtgtcctggggaggaagcagggtcagcaatgcgacagcatgtggttcagctctttctggagcatctcgcggaagctgctcttgctgatcttgttcttgacccaggctgtacttagacacatatttgtagaagttttccaccaggacaatgactgccttctccagctccgtgtagcagtctgacatctccctgcttcgcctgctggcggggcctgctgcctcagtctgcctcctctccagcagggctctggggcctgggctctggcactgccaagcagctccctgcgctcagcccagccgggactcctccncgctgcactcccagaatctgtcccactccctcccagccctgcccgctgagctggctcggtggggagatagtggctgagctccttcttgacttggc

SEQ ID NO: 45942 - DNA, 1721 bp, Homo sapiens
gtcagggggaagctggaaggcgtcgttctcctttcccagctctcctgcctgtccgccatgttttcaggccgggtctggcttggtcttcccccgtaaggaaatggccggggagctccaggggacccaggcgccgtcgcttcggcggagcctgggctgaccagccaggacagcggggtaaacccgaacaattctgcgcgaggtagggaggccatggcgtccggcagtaactggctctccggggtgaatgtcgtgctggtgatggcctacgggagcctggtgtttgtactgctatttatttttgtgaagaggcaaatcatgcgctttgcaatgaaatctcgaaggggacctcatgtccctgtgggacacaatgcccccaaggacttgaaagaggagattgatattcgactctccagggttcaggatatcaagtatgagccccagctccttgcagatgatgatgctagactactacaactggaaacccagggaaatcaaagttgctacaactatctgtataggatgaaagctctggatgccattcgtacctctgagatcccatttcattctgaaggccggcatccccgttccttaatggggcaagaatttccgctcctacctgctggatctgcgaaacactagtacgcctttcaagggtgtacgcaaagcactcattgatacccttttggatggctatgaaacagcccgctatgggacaggggtctttggccagaatgagtacctacgctatcaggaggccctgagtgagctggccactgcggttaaagcacgaattgggagctctcagcgacatcaccagtcagcagccaaagacctaactcagtcccctgaggtctccccaacaaccatccaggtgacatacctcccctccagtcagaagagtaaacgtgccaagcacttccttgaattgaagagctttaaggataactataacacattggagagtactctgtgacggagctgaaggactcttgccgtagattaagccagtcagttgcaatgtgcaagacaggctgcttgccgggccgccctcggaacatctggcccagcaggcccagactgtatccatccaagttcccgttgtatccagagttcttagagcttgtgtctaaagggtaattccccaacccttccttatgagcatttttagaacattggctaagactattttcccccagtagcgcttttttctggatttgcattcaggtgttattcttaatgtttctgtcaaagcttcttaaaaatcttcacttggtttcagccatagttcaccttccctgttccaggtttatttaattccaaaggtgagagttggagtgagatgtcttccatatctatacctttgtgcacagttgaatggggaactgtttgggtttagggcatcttagagttgattgatggaaaaagcagacaggaactggtgggaggtcaagtggggaagttggtgaatgtggaataacttacctttgtgctccacttaaacccagatgtgttgcagctttcctgacatgcaaggatctactttaattccacactctcattaataaattgaataaaagggaatgttttggcacctgatataatctgccaggctatgtgacagtaggaaggaatggtttcccctaacaagcccaatgcactggtctgactttataaattatttaataaaatgaactattatcaaataaaacgtatgaatcaga

SEQ ID NO: 45943 - DNA, 2967 bp, Homo sapiens
ggcggagagggccggccgccggcacattcctgtggaggccgcagcgggtgcggcgccgacgggaggagcagcgagcgagcgacgaacgcgagccgagcctcccgccgtcgccatgggccagaacgacctgatgggcacggccgaggacttcgccgaccagttcctccgtgtcacaaagcagtacctgccccacgtggcgcgcctctgtctgatcagcaccttcctggaggacggcatccgtatgtggttccagtggagcgagcagcgcgactacatcgacaccacctggaactgcggctacctgctggcctcgtccttcgtcttcctcaacttgctgggacagctgactggctgcgtcctggtgttgagcaggaacttcgtgcagtacgcctgcttcgggctctttggaatcatagctctgcagacgattgcctacagcattttatgggacttgaagtttttgatgaggaacctggccctgggaggaggcctgttgcctgctcctagcagaatcccgttctgaagggaagagcatgtttgcggggcgtccccaccatgcgtgagagctcccccaaacagtacatgcagctcggaggcagggtcttgctggttctgatgttcatgaccctccttcactttgacgccagcttcttttctattgtccagaacatcgtgggcacagctctgatgattttagtggccattggttttaaaaccaagctggctgctttgactcttgttgtgtggctctttgccatcaacgtatatttcaacgccttctggaccattccagtctacaagcccatgcatgacttcctgaaatacgacttcttccagaccatgtcggtgattgggggcttgctcctggtggtggccctgggccctgggggtgtctccatggatgagaagaagaaggagtggtaacagtcacagatccctacctgcctggctaagacccgtggccgtcaaggactggttcggggtggattcaacaaaactgcccagcttttatgtatcctcttcccttcccctcccttggtaaaggcacagatgttttgagaactttatttgcagagacacctgagaatcgatggctcagtctgctctggagccacagtctggcgtctgacccttcagtgcaggccagcctggcagctggaagcctcccccacgccgaggctttggagtgaacagcccgcttggctgtggcatctcagtcctatttttgagtttttttgtgggggtacaggagggggccttcaagctgtactgtgagcagacgcattggtattatcattcaaagcagtctccctcttatttgtaagtttacatttttagcggaaactactaaattattttgggtggttcagccaaacctcaaaacagttaatctccctggtttaaaatcacaccagtggctttgatgttgtttctgccccgcattgtattttataggaatactgaaaacatttagggacacccaaagaatgatgcagtattaaaggggtggtagaagctgctgtttatgataaaagtcatcggtcagaaaatcagcttggattggtgccaagtgttttattgggtaacaccctgggagttttagtagcttgaggcaaggtggaggggcaagaagtccttggggaagctgctggtctgggtgctgctggcctccaagctggcagtgggaagggctagtgagaccacacaggggtagccccagcagcagcaccctgcaagccagccctggccagctgctcagaccagcttgcagagccgcagccgctgtgggcagggggtgtggcaggagctcccagcactggagacccacggactcaacccagttacctcacatggggccttttctgagcaaggtctcgaaagcgcaggccgccctggctgagcagcaccgccctttcccagctgcactcgccctgtggacagccccgacacaccactttcctgaggctgtcgctcactcagattgtccgtttgctatgccgaatgcagccaaaattcctttttacaatttgtgatgccttaccgatttgatcttaatcctgtatttaaagttttctaacactgccttatactgtgtttctctttttgggggagcttaactgcttgttgctccctgtcgtctgcaccatagtaaatgccacaagggtagtcgaacacctctctggcccctagacctatctggggacaggctggctcagcctgtcttccaggggctgctgcggcccagccccgagcctgcctccctcttgggcctctcatccattgggctctgcagggcaggggtgaggcaggtttctgctcataagtgcttttggaagtcacctacctttttaacacagccgaactagtcccaacgcgtttgcaaatattcccctggtagcctacttccttacccccgaatattggtaagatcgagcaatggcttcaggacatgggttctcttctcctgtgatcattcaagtgctcactgcatgaagactggcttgtctcagtgttttcaacctcaccagggctgtctcttggtccacacctcgctccctgttagtgccgtatgacagcccccatcaaatgaccttggcccaagtcacggtttctctgtggtcaaggttggttggctgattggtggaaagtagggtggaccaaaggaggccacgtgagcagtcagcaccagttctgcaccagcagcgcctccgtcctagtgggtgttcctgtttctcctggccctgggtgggctagggcctgattcgggaagatgcctttgcagggaggggaggataagtgggatctaccaattgattctggcaaaacaatttctaagatttttttgctttatgtgggaaacagatctaaatctcattttatgctgtattttatatcttagttgtgtttgaaaacgttttgatttttggaaacacatcaaaataaataatggcgtttgttgtaaaaaaa

SEQ ID NO: 45944 - DNA, 1408 bp, Homo sapiens
ccaggatgccggcggcagtagcagcagcagcaccaatggcagcggtggcagtggcagcagtggcccaaaggcaggagcagcagacaagagtgcagtggtggctgccgccgcaccagcctcagtggcagatgacacaccaccccccgagcgtcggaacaagagcggtatcatcagtgagcccctcaacaagagcctgcgccgctcccgcccgctctcccactactcttcttttggcagcagtggtggtagtggcggtggcagcatgatgggcggagagtctgctgacaaggccactgcggctgcagccgctgcctccctgttggccaatgggcatgacctggcggcggccatggcggtggacaaaagcaaccctacctcaaagcacaaaagtggtgctgtggccagcctgctgagcaaggcagagcgggccacggagctggcagccgagggacagctgacgctgcagcagtttgcgcagtccacagagatgctgaagcgcgtggtgcaggagcatctcccgctgatgagcgaggcgggtgctggcctgcctgacatggaggctgtggcaggtgccgaagccctcaatggccagtccgacttcccctacctgggcgctttccccatcaacccaggcctcttcattatgaccccggcaggtgtgttcctggccgagagcgcgctgcacatggcgggcctggctgagtaccccatgcagggagagctggcctctgccatcagctccggcaagaagaagcggaaacgctgcggcatgtgcgcgccctgccggcggcgcatcaactgcgagcagtgcagcagttgtaggaatcgaaagactggccatcagatttgcaaattcagaaaatgtgaggaactcaaaaagaagccttccgctgctctggaggtaacggcgccttagagggagaaggtgatgcttccgacgggagccgccttccggtggtttcagtgacggcggcggaacccaaagctgccctctccgtgcaatgtcactgctcgtgtggtctccagcaagggattcgggcgaagacaaacggatgcacccgtctttagaaccaaaaatattctctcacagatttcattcctgtttttatatatatattttttgttgtcgttttaacatctccacgtccctagcataaaaagaaaaagaaaaaaatttaaactgctttttcggaagaacaacaacaaaaaagagtgcatagtttgccctggagaatccactcacgttcataaagagaatgttgatggcgccgtgtagaagccgctctgtatccatccacgcgtgcagagctgccagcagggagctcacagaaggggagggagcaccaggccagctgagctgcacccacagtcccgagactgggatcccccaccccaacagtgattttgg

SEQ ID NO: 45945 - DNA, 1888 bp, Homo sapiens
ggcacgagccttccctagctgctgcggttgccattgcttcttgcctgttctggcatcaggcacctggattgagttgcacagctttgctttatccgggcttgtgtgcagggcccggctgggctccccatctgcacatcctgaggacagaaaaagctgggtcttgctgtgccctcccaggcttagtgttccctccctcaaagactgacagccatcgttctgcacggggctttctgcatgtaacgccagctaagcatagtaagaagtccagcctaggaagggaaggattttggaggtaggtggctttggtgacacactcacttctttctcagcctccaggacactatggcctgttttaagagacatcttatttttctaaaggtgaattctcagatgataggtgaacctgagttgcagatataccaacttctgcttgtatttcttaaatgacaaagattacctagctaagaaacttcctagggaactagggaacctatgtgttccctcagtgtggtttcctgaagccagtgatatgggggttaggataggaagaactttctcggtaatgataaggagaatctcttgtttcctcccacctgtgttgtaaagataaactgacgatatacaggcacattatgtaaacatacacacgcaatgaaaccgaagcttggcggcctgggcgtggtcttgcaaaatgcttccaaagccaccttagcctgttctattcagcggcaaccccaaagcacctgttaagactcctgacccccaagtggcatgcagcccccatgcccaccgggacctggtcagcacagatcttgatgacttccctttctagggcagactgggagggtatccagggaatcgggcccctgccccacggggtgttttcatgctgtacagtgacctaaagttggtaagatgtcataatggaccagtccatgtgatttcagtatatacaactccaccagacccctccaacccatataacaccccacccctgttcgcttcctgtatggtgatatcatatgtaacatttactcctgtttctgctgattgtttttttaatgttttggtttgtttttgacatcagctgtaatcattcctgtgctgtgttttttattacccttggtaggtattagacttgcactttttttaaaaaaaggtttctgcatcgtggaagcatttgacccagagtggaacgcgtggcctatgcaggtggattccttcaggtctttcctttggttctttgagcatctttgctttcattcgtctcccgtctttggttctccagttcaaattattgcaaagtaaaggatctttgagtaggttcggtctgaaaggtgtggcctttatatttgatccacacacgttggtcttttaaccgtgctgagcagaaaacaaaacaggttaagaagagccgggtggcagctgacagaggaagcccgctcaaataccttcacaataaatagtggcaatatatatatagtttaaggaaggctctccatttggcatcgtttaatttatatgttatgttctaagcacagctctcttctcctattttcatcctgcaagcaactcaaaatatttaaaataaagtttacattgtagttattttcaaatctttgcttgataagtattaagaaatattggacttgctgccgtaatttaaagctctgttgattttgtttccgtttggatttttgggggaggggagcactgtgtttatgctggaatatgaagtctgagaccttccggtgctgggaacacacaagagttgttgaaagttgacaagcagactgcgcatgtctctgatgctttgtatcattcttgagcaatcgctcggtccgtggacaataaacagtattatcaaagagaaaaaaaaaaaaaaaaa

SEQ ID NO: 45946 - DNA, 699 bp, Homo sapiens
aaaagaaggcaaaacgatgtataaatgaaagaaattgagatggtgcacgatgcacagttgaagtgaacttgcggggtttttcagtatctacgattcatagatctggaattcgcggccgcgtcgaccaaagacctaatgtccaaagctgagaagaatggtgtgaagattaccttgcctgttgactttgtcactgctgacaagtttgatgagaatgccaagactggccaagccactgtggcttctggcatacctgctggctggatgggcttggactgtggtcctgaaagcagcaagaagtatgctgaggctgtcactcgggctaagcagattgtgtggaatggtcctgtgggggtatttgaatgggaagcttttgcccggggaaccaaagctctcatggatgaggtggtgaaagccacttctaggggctgcatcaccatcataggtggtggagacactgccacttgctgtgccaaatggaacacggaggataaagtcagccatgtgagcactgggggtggtgccagtttggagctcctggaaggtaaagtccttcctggggtggatgctctcagcaatatttagtactttcctgccttttagttcctgtgcacagcccctaagtcaacttagcattttctgcatctccacttggcattagctaaaaccttccatgtcaagattcagctagtggccaagaag

SEQ ID NO: 45947 - DNA, 446 bp, Homo sapiens
  misc_feature (1)...(446): n = a,t,c or g
aanacccgntatgacatgattacgaatttaatacgactcactatagggaatttggccctcgaggccaagaattcggcacgaggatacagagcttggtgggcctaacaccattcatattccttaccctctgtctctcctccctgtatcccacctatggttcagtgttgcaagagtctgggcttggggtctttaaaaccagcagggggaaatgataaaaagagagctgctttcccttttaccttgaggtattcgtccctcgggacagagcacagcttgtgcaactctggtagcgttaccctgtgacactgttttgaggtccacttcctttctttcctctgggaggaatgtcttctgtctttggtattatagttcatcttcccattcttttacttagtgcatttgtgcagatatttttaactctgtacatcagaagagagcccttggta

SEQ ID NO: 45948 - DNA, 2511 bp, Homo sapiens
  misc_feature (1)...(2511): n = a,t,c or g
gcagattcaccatctcaagagatgactcaaagaccacggtgtatctgtacatggacagcctgaaaaccgaggacacagccgtgtatttctgtgtgtgggaggtcccggagnagntttnggcctctggggccagggaaccctggtcaccgtctcctcagcatccccgaccagccccaaggtcttcccgctgagcctcgacagcaccccccaagatgggaacgtggtcgtcgcatgcctggtccagggcttcttcccccaggagccactcagtgtgacctggagcgaaagcggacagaacgtgaccgccagaaacttcccacctagccaggatgcctccggggacctgtacaccacgagcagccagctgaccctgccggccacacagtgcccagacggcaagtccgtgacatgccacgtgaagcactacacgaatcccagccaggatgtgactgtgccctgcccaggtcagagggcaggctggggagtggggcggggccaccccgtcctgccctgacactgcgcctgcacccgtgttccccacagggagccgccccttcactcacaccagagtggaccccgggccgagccccaggaggtggtggtggacaggccaggaggggcgaggcgggggcacggggaagggcgttctgaccagctcaggccatctctccactccagttcccccacctcccccatgctgccacccccgactgtcgctgcaccgaccggccctcgaggacctgctcttaggttcagaagcgaacctcacgtgcacactgaccggcctgagagatgcctctggtgccaccttcacctggacgccctcaagtgggaagagcgctgttcaaggaccacctgagcgtgacctctgtggctgctacagcgtgtccagtgtcctgcctggctgtgcccagccatggaaccatggggagaccttcacctgcactgctgcccaccccgagttgaagaccccactaaccgccaacatcacaaaatccggtgggtccagaccctgctcggggccctgctcagtgctctggtttgcaaagcatattcccggcctgcctcctccctcccaatcctgggctccagtgctcatgccaagtacacagggaaactgaggcaggctgaggggccaggacacagcccagggtgcccaccagagcagaggggctctctcatcccctgcccagccccctgacctggctctctaccctccaggaaacacattccggcccgaggtccacctgctgccgccgccgtcggaggagctggccctgaacgagctggtgacgctgacgtgcctggcacgtggcttcagccccaaggatgtgctggttcgctggctgcaggggtcacaggagctgccccgcgagaagtacctgacttgggcatcccggcaggagcccagccagggcaccaccaccttcgctgtgaccagcatactgcgcgtggcagccgaggactggaagaagggggacaccttctcctgcatggtgggccacgaggccctgccgctggccttcacacagaagaccatcgaccgcttggcgggtaaacccacccatgtcaatgtgtctgttgtcatggcggaggtggacggcacctgctactgagccgcccgcctgtccccacccctgaataaactccatgctcccccaagcagccccacgcttccatccggcgcctgtctgtccatcctcagggtctcagcacttgggaaagggccagggcatggacagggaagaataccccctgccctgagcctcggggggcccctggcacccccatgagactttccaccctggtgtgagtgtgagttgtgagtgtgagagtgtgtggtgcaggaggcctcgctggtgtgagatcttaggtctgccaaggcaggcacagcccaggatgggttctgagagacgcacatgccccggacagttctgagtgagcagtggcatggccgtttgtccctgagagagccgcctctggctgtagctgggagggaatagggagggtaaaaggagcaggctagccaagaaaggcgcaggtagtggcaggagcggcgagggagtgaggggctggactccagggccccactgggaggacaagctccaggagggccccaccaccctagtgggtgggcctcaggacgtcccactgacgcatgcaggaaggggcacctccccttaaccacactgctctgtacggggcacgtgggcacacatgcacactcacactcacatatacgcctgagccctgcaggagtggaacgttcacagcccagacccagttccagaaaagccaggggagtcccctcccaagcccccaagctcagcctgctcccccaggcccctctggcttccctgtgtttccactgtgcacagatcaggcaccaactccacagacccctcccaggcagcccctgctccctgcctggccaagtctcccatcccttcctaagcccaactaggacccaaagcatagacagggaggggccgcgtggggtggcatcagaag

SEQ ID NO: 45949 - DNA, 687 bp, Homo sapiens
ttgaaaccctatgacatgattacgaatttaataccgactcactatagggaatttggccctcgaggccaagaattcggcacgagcacacactcgcttctggaacgtctgaggttatcaataagctcctagtccagaccgccatgggtcatttcacagaggaggacaaggctactatcacaagcctgtggggcaaggtgaatgtggaagatgctggaggagaaaccctgggaaggctccctggttgtctacccatggacccagaggttctttgacagctttggcaacctgtcctctgcctctgccatcatgggcaaccccaaagtcaaggcacatggcaagaaggtgctgacttccttgggagatgccacaaagcacctggatgatctcaagggcacctttgcccagctgagtgaactgcactgtgacaagctgcatgtggatcctgagaacttcaagctcctgggaaatgtgctggtgaccgttttggcaatccatttcggcaaagaattcacccctgaggtgcaggcttcctggcagaagatggtgactgcagtggccagtgccctgtcctccagataccactgagctcactgcccatgattcagagctttcaaggataggctttattctgcaagcaatacaaataataaatctattctgctgagagatcaccaaaaaaaaaaaaaa

SEQ ID NO: 45950 - DNA, 515 bp, Homo sapiens
  misc_feature (1)...(515): n = a,t,c or g
antaccactgattacgaatttaatacgactcactatagggaatttggccctcgaggccaagaattcggcacgagacttcttacaatgctgtgaatgagaggctcctcagaactggagcatttgtataataattcatcctgttcatcttcaattttaacatcatatataatttcaattctatcaattgggcctttaaaaatcatataaaaggatataaaatttgaaaagagaaacctaattggctatttaatccaaaacaactttttttttccttcaatggaatcagaaagcttgtcaatcactcatgtgttttagagtaattacttttaaaatggtgcatttgtgcttctgaactattttgaagagtcacttctgtttacctcaagtatcaattcatcctccatacatttgaattcaagttgttttttgtcaaatttacagttgtcaattgatcttcaagctgcagggtgcctagaaatgggccgttgctgtagccctggcatgtgcacacggac

SEQ ID NO: 45951 - DNA, 7054 bp, Homo sapiens
  misc_feature (1)...(7054): n = a,t,c or g
agaaggtctggttagaccccaatgagaccaatgaaatcgccaatgccaactcccgtcagcagatccggaagctcatcaaagatgggctgatcatccgcaagcctgtgacggtccattcccgggctcgatgccggaaaaacaccttggcccgccggaagggcaggcacatgggcataggtaagcggaagggtacagccaatgcccaaataccttcaactgagaaatgtcattgagcgactccaccctcagctactgacccgtgcccccggccacctcggtttctgctttcgaagactctgctgccatccgttctcccagtcccaagggtccacgatgtacaaagtcatttcggccagtaggtgtgcagacccctccccgccacgatcgtcgctgtgcttggtgtgtaggaccctaggctccccgcccaccctctgcctggtcgcgctcttcagtcccacgaggagctgacacgtcctctctggccgccatccggctcgcacaggggcctcccagcgcctcaggcccccccgtttgtgtctggagtctccccccggggagaggacactggcccctcgcactccagaaaagccatgccagctgggctcgttgacaaagggtaaaacatgctcactcccacccggtaatcatttttttctttttttaaaaaaagtttttattttttccaaactagtgcatgtataaataatggcaggatggggggtactgtgtagatgattaactgactttttaatattttgtaaataaatcggattccttgtgtcctttgtgctagtgtaacccgggactggaatgtaaagtgaagttcggagctctgagcacgggctcttcccgccgggtcctccctccccagaccccagagggagaggcccaccccgcccagccccgccccagcccctgctcaggtctgagtatggctgggagtcgggggccacaggcctctagctgtgctgctcaagagactggatcagggtagctacaagtggccgggccttgcctttgggattctacctgttcctaatttggtgtggggtgcggggtccctggccccttttccacactcctcctccgacagcagctccctggggcagtggcctggtctcaccgtgtgcagccttgtggtttatgcttaaatgtacattttcctgctggtaaaaggagaaactgagaggtgtcctgcagaccggctgaccactccttttggagacggcaggaggcctgagcgatccgtactcagaacgtccaggagagacgcatggcccgaagtcaaagtgctggaattttccaaaacagcctgttctctcctctctcctccccagagcaccccctgccatcaggggggttgaaatccctctcccccaggagccctgctgctttgcttggtggtagggcaggagagcaaacaaacagtcatggtctaaaacccacatagcactttgctcttagttacatgtaaaattttagatttctaaaacaggtgggcaatcattttgaatactgttctgtgaccctgactgctagttctgaggacactggtggctgtgctatgtgtggccatcctccatgtcccgtccctgtagctgctctgtttagacagcggacagacgctcacgcccaggggatgtcctcacgctgtcgccgcgcggtttcccttcgcagatgtgtatactcatgataggtcagaaagtgtatccgctacaataaagttctggttctaactaactccagccggagcggggtttgtcttctctcctgttttggttttaaacctacactcccttgtttctttttgagccgagaacataaaagaacataaaaaggctttttctttcttttcatctgcctttacttctcatttcaaggtttcacagagtgctggtctcaacccacatcagtgatacttaactaacttgccttccccagacagaaacatgaaatgacttaaaaaaatagaaaatattcttctcgccaggcacacaagactgtacacccaaaaccagaaacgctgtggctttgcaaagtgtgctcccacacccgcgcacacaggcgcacttaaataaataacgcgcacgcacggctttccccatttcgaaacaggcagacggtctagtgagtttcagcacttgctgggaacaggcgtgtggccagggaggtgccccgcgggtggcaatgactactgacggacccctggtgaatcagaacagagctggcacctgagccgctgagcgggcggctacttctggctctgttgagttttggaagacctttgagaaatcaacagcatcaccgggcaggtcctgagtcatggcctgatatgttaggatcacctgtgggctgctaaaagcccacagtcctagccccatctgcagagttagttggcttctgaaggctgggagaagccctagaacctgcatttctaaagctgctcaaatccaggcctttggaggcttaagactaagcctgcaccatttcaaactaagtatagtcagagagaaagatcccagcacgccccctcgttctcacacttctggtacctcagcactctcacagcaggttcccaaaggtgatggttctggaagagttctggcctcatccttttgttaaaacctgctttcagaggtggcttagacaatggcagagtnnnnnnnnnnnnnnnnnnnnnnnnnnnnnnnnnnnnnnnnnnnnnnnnnnnnnnnnnnnnnnnnnnnnnnnnnnnnnnnnnnnnnnnnnnnnnnnnnnnnnnnnnnnnnnnnnnnnnnnnnnnnnnnnnnnnnnnnnnnnnnnnnnnnnnnnnnnnnnnnnnnnnnnnnnnnnnnnnnnnnnnnnnnnnnnnnnnnnnnnnnnnnnnnnnnnnnnnnnnnnnnnnnnnnnnnnnnnnnnnnnnnnnnnnnnnnnnnnnnnnnnnnnnnnnnnnnnnnnnnnnnnnnnnnnnnnnnnnnnnnnnnnnnnngagataatggcagagtattcgcttctgacctgcttttgccttcatgcgtgaccggggtgagctacatgaggcccagatctctttaacacgtcctgaggaccagcgtagattctcctttatggggctgggcctgatctccccagccgtagaggtgtggtgagtcatctattattttcttacctgcaaacaaaatcactttacagtagagaaagatgagggaattctcgtacccaagacccacttgaaaagtggagagcaagcatccctgaatctagagggtaccccggctgcctcggggagctgccagaactcagtctagggaggatacacagggtgggtcgcacgaggatcgaggcatcctgtcggacagtaggcaccaggtgaccgccaggcgccaggacccaggcagtctggcgggaggcctgggaagaaggttccctcgggaggagaacagtctttgctgggcccagatccaccagctggaagacttggggtgacaatcctcagccgagagccaggtgcagcctcggggggcccagcaccgccgctgaatgaaggaggcgtttccgtttatggctgtttagctccttaaactatttcaagtcataaataaataaccagtgtaaacaaaaggcagccatgtcggttctttcccgttaggtgcagttcaggctcttcagcccctttaggaccaatgtgcttggtccccacgacccgcagccgcctcctcttgggcccagggctgggaggagccactactgcctgttgtctttggacacgttgtgggccagccagttcactttggttttccagctctcacggagggcttcgttaaacttcactcggaagtgcttcagtgcctcctcctctgttttccccagtgccagggagtccttgagatactggatgtctttggagcagctgagctcaggcaggcctgccgcccgcatcagggcaaagaggtggaggaagagaagcccgtggcgccgcaggatggtgtaggccctttcacagtagccccggaaccgttcaaatttctcactattattagtcttcccctgctgaatcacatggacaaagtcataggtgaggatgaatgggacacgctcgcggttgattccaaacttggtcttgaaattccccagaaagtggccaaaatcaatgtggaacagctgcccactctctcggatcatgatgttgtcgctgtgccgatcgccaatgcccagcacatatgtggccacacaatagccagcacaggagagggtgaactcctcaatggctcgatccagggcctcccccgggttcttggacttcagccagttgagcagggcatccttgttgaaggcggctgtggctgccatgttgctcttgttgagttggatgttggcgatggtgtctgaacggagtaccacctcaatgaggcctgtgcggtccccggtggggaggcagccatagggggtcatcctcaggtccagcccctcctgcttccacaggacgtccatgagctggatcatctgcagggtcagcatgtcctgccggaggtcatccccgttcttaaagatgatgcccacgctgccgccgctgcctgcctcctcgttgctgtacatgatccacaggggcttcatcttggagtccatgaaggtgcactgctccacgcagacttcagccagcagggtgctggggtcgagtggggactgcaggtgggagagggcctctaggtaggcctcctgccgcatgcacaagtgcatcagctccttggtctggggcttgggggtcttctgagagctcagcttgacgaagtcattcagggccttcagtttgctcagtgcttccccctgcttcatcagcaccttcatgtggtgggtgctgcccctgcagtaggcctccaggatgaggccgaagcgcagggccaccgacggcacgtgcatctcggagcggaggtgccagaaaaggaagtggccgatcttgcggttggccagggcccggtccagcaggaatttggtcagctcgcagtccaggtaggactcgtacttgagcacctgcaccagctgcagcaggtactggaacagctcatcgtccgtcagtttccgcagcgacttgatggcgaaggagcctacgtggcaatcggggaagctgaagtctagcagctccagggcgctcaggacgggcagctccggccaggagcacagcaggtagagcatctgggccacatcctcatgcttgttccacttggtgaccagcagcagccgggctagcgcctccgggaagtgctcctggacttcatgccgcagcttccacaccaggtccttctcgtgctcatacagctccccagacccccgccgctccaggatttcccgcagctgcagctgctcctcctcggtgacatgcacacactcgctgtgtcgccccagctccaagatcttctccagggcggggtagtacacggggtgcggggccacctcgggcaggcagatgagcagggcagcggcgctatccgtgttggggttactgcgcacagtgcccgtggggttcagcagctcgcccttctcatctgggacggagggccacatgtagaggcagcgttccccggtcttaagctggtccttgtagtcaaacagcatgaggttggcccaggcaatggggcagtccgccttcttggacttcttcttggtggagcgagccttcttggctttctcgatcacggcgtacagcgcaaagcagagacgggccatgcggggcaggtcgcagatgttgatgtcgaactccagccgctgcttccacacgggctccgagcacacgctcacctccgagctggacaccgtcttgcacagcatctcgttgccgtggaaaagcccggcctgcaccaccagcttcatccgctcgtcggcgttcactttgctgccctggatgagctcgatgcggaacggctgctccagggaccacagggacacagaggaaggcttcttcgcaggaatgggaggtggtttggcacgcggtttctggacctggggggcagggttgctctgctcatcccgcatggcgaggatggaggaggaatggaccatggtcaggtgaggggtcaacccactgtgcaggcagctgcagatgtactggaactggcagagcgggtagttgccatacaggtactcatgcctgccgttcacctgcagcgtgtagtcttccggctgctccaccagcggctgccggaacactgtggccttcttccgcagggcacaggccatcagcgccagcggcacgtccttggtggacacctggaaggtgaagctctcctcgctgccctcaaacttaacgttgaccagaagggcccggttcgggagccgcagggtaccaggcccccaggtttgagccgagggctccagctgcagggggaaactgtactgcagccaggcctcccagcccagctgctgccggcgggcggccgcctcctcgcagaattggcacatcttggcgcgaaagtcgttcacttctgggtcgcacaaggagtcaaactcgtggaggcctttgccgatgaggaggctgatctgtgagttgatgagcttcttcacgcggtcgccctcacgggccaccaggcgcaggacgggcaggaagggctgcacgtcacacagacgccgttgctcgtcctccagctcttgctgctccgctgtctggttgatgcaggtgaacacataggcctcggggccactgagcatgtggaagagcggctcatactgggcgcggtgccacagcagctgcttgatggtgctgaggttggcattgcgggacacagggaagttcaggtagacccctgtgggcagcaggaagtcaaccacaacgctctgattctcctccttggtccagaattccatggggcagtccaccccagggggcatcctgcgttgttacttcccagatgacagttgtcctctctggaatagtccaagaaagaccagcaaagccccctccgcctggcagattaaagatgctttagaatcaatgagtgtcatcccgccctggcctgactccttatcgtcccggcgcagctggcagggctgggcggctctgctcgcggccgctcgtgccgaattc

SEQ ID NO: 45952 - DNA, 2765 bp, Homo sapiens
gaagttgaggaattatctacagaacactgtttatttcaagtccaaaacacaaattactcatttttcttaacagaccgcataatttttactgcatgaatatttagggtttctctattcacaagtacagtttattactagactttaggcttgaatgattcatatatatagatatcagtttactacagaggacatgtacttttaacattttttgtttagaaaatattttacataaaaacacaaagcatttacccaacactccacaaccagtcttcagcaaagatttggctgaagataactttctacaaaacactccaagactgaatagaatgtagtattttacatactttagcttattgttgcagttaaaagctcccccttgtttgatggcttctgcatgtatctacaaagcagaagtcttaactggtgacctgttaaataacattgcctttttaagtgaacttgtccccagcccggaacctaagtagtcataatgaaataaagtaattgatatatgaggggcttttagtaagggctttttcaacctaataaaataataatttagtatctatcagtgcaatattcttttactgttttgtgttcaataaccacctggagtgctaattgtctagtataatcagttggcatcaaaatagaaagtaaaaagatgtacattttaatataccaattcttacctgaataatcttggatttctggagaagtgttccacaaagtggaatttcttcctaaagttatgctgaatgtggtacaatgtgtacaacttggttaaccagtgccctgcttttcatttccaaggtttttccttatcttgaatcaaatgcacaatcttacaactgtatcataatgcactggcttacagttctgtatataaagtccaactcaagcttattttggtttattgtacatgctttattaaaatggtacttgtatttacagtatctgcagaaagagtcccttccaaggcctcacacattcagacacatccatactgacacccactccacagccccatgcacccacaccagtgagatgtggagggtcagactcctaaaattaggcagctgttggggataagagttgatttgtttttcaatttttttgaaaacagaaaagcatgggggaatgcatttggccattacaatgctaattgagtttgtgtatattacatatatggcagttaacactgtaatattccttttacattctatatacacagaatgatatccaaggttttatggtcaacagaatattcccaacttcagtcttaatgctgcttgtagtgatttctgaattcattataggggctttccctaaaaataattcaagtctatgttaagtgaaataaggcacaattaatattgatttgatttagggaaagggaaggaaagagaagggataaaaactggtttcaaatgatctttctgttggggaactagctctgacttaaacccacctgaaattccttctcctaatttccaaagatttcctttaataaagatatttttcttttccctgacaaagccaaaaagaaaagtttgggaattcacattttaatgtttcagtagcctgaacaactcaaattgatgtgtacccccacctcccctgatcaggtcgcctccctcacccatgttaaaataaaaacacagtatgtgacacaggagtcccttgatgtttcttgaggagatctgtacacttgagtagcaaatacatatctggttgtcttcaatatattttaaaaagaaagaaagagaaagaagaaaggaaagaaggaaaaaaggaaggaaagaagtaatattgtgactttcttgctctttaaaaaaatccctgtctccttcttttcaggatgatgaagccccactagacattacaaacaactgcaacaaatgagtttggcagcataaataatgtctagttattcaaatcttcatagtgagattaatttatcttgtacacaatttgttgaatgtttttcgcagcaggtgaatcaaacccaaagactccggacagtctgtgaaagggagtaagaattgcagttctgaaggcccctgactttggttgtttacaaagttcaatcctgtttattgtgatccttggtatcttcttcatctgtatattctgatggttcttctcctggttttaggagtctgcctacataatcatatttttctttaaactgcatttcccattctcgaacactctccatttgtactgcattcaaatctgagagatcatcatattcatctctaagtgcatctttatctaggcaaaatgtggcccagtcctctggaggcatccctaccagcaaatattccatatggacccgccgggccgtagaacttgctgcctttggtcacgtcgaagactttcccattgaccgcgagcaggatgcgcgggttgcgggagccgtcgtactggcgcagctgctccaagctgaagtcccgcttcttcatgcgaggcagagaggtggcggggctctcctcgcccgccccggccccggcccccagaccccgccgcccccagcgcacccacagccggtaggcccccagcagcaccagagccaccagcgccacgttcagcagcatttccccgccccccgtcagaagcgccaacgccgccgccgcccagcctcccccttccgctgccgctcccgcgtcgcctggactctcgctgccgccgtcgttgctgctctcgctgccactccccagggtgcctagcttcacgtccccatcaccagccgccatcaccgg

SEQ ID NO: 45953 - DNA, 1842 bp, Homo sapiens
atctgactcttaattgtttttgctggcatctctcacaatttagtaacatatcagcagacgacatgctgtataccgagacagatttggaagaaagcatggacaaaattgaaactatcaactttcatgaagttaaggaagttgcgggaatcaagttttggtgttaccatgcaggtcacgtcctaggagccgccatgttcatgattgagatcgcaggcgtgaagcttttgtacactggtgatttctcaagacaagaagataggcacttaatggcagctgaaattcctaatattaagcctgatattcttatcattgaatctacttatgggacccatatccatgagaaacgtgaagagcgagaagcaagattctgtaacactgtccacgatattgtaaacagaggaggcaggggtctcattcctgtctttgctcttggaagggctcaggagctgctcttgattctagatgagtactggcagaatcacccagaactacatgacattccaatatactatgcatcatctttggccaagaagtgtatggcagtgtaccagacatatgtaaatgccatgaatgacaaaatccgcaaacagatcaacatcaataatccctttgttttcaaacacattagtaacctcaagagcatggatcattttgatgacattggtcccagtgttgtaatggcctccccaggcatgatgcaaagtggcttatccagagaattatttgaaagctggtgtactgataagaggaatggtgtcattatagcgggatactgtgtagaagggacacttgccaagcacatcatgtctgaacctgaagaaatcactactatgtctggacagaagttaccactgaaaatgtctgttgattacatttctttctcagctcacacggattaccagcaaaccagtgaatttattcgtgctttgaaaccgcctcatgtgattttagtccatggagaacagaatgaaatggccagattgaaagcagcactgattcgagaatatgaagataacgatgaagttcacatagaggttcataatcctcggaatacagaagcagtgaccttaaacttcagaggagaaaaactagccaaggttatgggatttttagcagacaaaaaaccagaacaaggccagcgggtctcaggaatacttgttaaaagaaactttaattatcacatactttctccttgcgacctgtccaattatactgacctggccatgagcacggtgaagcagacccaagccattccatatactggccctttaatttgctctgttaccagctgcagaaattgacaggtgatgtggaagaattagaaattcaagaaaaacctgctctgaaagtgttcaaaaatattactgtaatacaagaaccaggcatggtggtattagaatggctggcaaacccttctaatgatatgtatgcagatacagtaacaactgtgatattggaagttcagtcaaatcccaaaataagaaaaggtgcagtacagaaggtttctaaaaaattagaaatgcacgtttacagcaagaggttggagatcatgctccaggacatatttggagaagactgtgtaagtgtaaaggatgactctattcttagcgtcacagtggacgggaaaactgccaaccttaacttggagacacggactgtagaatgtgaagagggaagtgaagacgatgaatccctccgagaaatggtggagctggctgcacagagactgtacgaggccctgacgccagttcactgagactgtgcctgtatatgaactttgaaaaaatacttgactctacttttgttacctaaaataaaatgcattcgtttctctggggaaaa

SEQ ID NO: 45954 - DNA, 1098 bp, Homo sapiens
cggacgcgtgggcccctacagtcatggctgccgccgtcgctgctgccggtgcaggggaaccccagtccccggacgaattgctcccgaaaggcgacgcggagaagcctgaggaggagctggaggaggacgacgatgaggagctagatgagaccctgtcggagagactatggggcctgacggagatgtttccggagagggtccggtccgcggccggagccacttttgatctttccctctttgtggctcagaaaatgtacaggttttccagggcagccttgtggattgggaccacttcctttatgatcctggttcttcccgttgtctttgagacggagaagttgcaaatggagcaacagcagcaactgcagcagcggcagatacttctaggacctaacacagggctctcaggaggaatgccaggggctctaccctcacttcctggaaagatctagattgttattgctgtttgagctgtctcagtgggataagtttgaaattcaagtgtttgaactgctgataatttggatttttttttttttttaactttggcacattgatctatctaaacctggtggggagaattatccccacattgtctcatggaaagactcaacttgcaactgtgccctccacactatccttacttctgtctccactctgataccagagtgcagccatgcagatggttattccagctctggtcacccgactcctttcaccaaattgctcctaactggaagatctcactttccccttgtggggtaggaaccgatgccagtgggagggatgtgcccctgaccattaacgactgttttttttttttttttttaaagaatggagttgttggggcaggacatgcacacaatgtgaaacagacaaaatgcattacacctgtagtgtaaagtggccactatgaatccctatgtatgagaggagggaggcaggctgcagcttcagccacagaatggggactatggaagacagcaggagctcatttcctctgcacattttggctgttagacctgtgtgtgtgtttaaaaaaagagaagtcagtgctcactttttgtatttaaatattaaaaatgattccaactgaaa

SEQ ID NO: 45955 - DNA, 519 bp, Homo sapiens
  misc_feature (1)...(519): n = a,t,c or g
ggaactacacctacatttggtggctaaatggtcagagcctccctgtcagtcccagggtaaagcgacccattgaaaacaggatcctcattctacccaatgtcacgagaaatgaaacaggaccttatcaatgtgaaatacgggaccgatatggtggcatccgcagtgacccagtcaccctgaatgtcctctgtgagtatcttttgttcctctgtgggccaggacaccagcttaaatccaaaccaccagaggccaggtctctcagtctctctccagtccaagtatagacacctttacttctggacatccgaggtggccatgactccctgccctgggaaaacctagatggtccagacctccccagcatttacccttcattcacctattaccgttcaggagaaaacctctacttgncctgttngccgagtctaacccacngggcccatattttttgacattaatggggaagttcantntcaggacaaaaagctcttatccccaaatactcaaagatagngggct

SEQ ID NO: 45956 - DNA, 3249 bp, Homo sapiens
tcggggtaaaaagtggctgcggtgtttggcaatgctaattcaatgccgcaacatatagttgaggccgaggataaagaaaagacattttaagtttgtagtaaaagtggtctctgctggggaagggttttcttttctttttttctttaataacaaggagatttcttagttcatatatcaagaagtcttgaagttgggtgtttccagaattggtaaaaacagcagctcatagaattttgagtattccatgagctgctcattacagttctttcctctttctgctctgccatcttcaggatattggttcttcccctcatagtaataagatggctgtggcatttccaaacatccaaaaaaagggaaggatttaaggaggtgaagtcgggtcaaaaataaaatatatatacatatatacattgcttagaacgttaaactattagagtatttcccttccaaagagggatgtttggaaaaaactctgaaggagaggaggaattagttgggatgccaatttcctctccactgctggacatgagatggagaggctgagggacaggatctataggcagcttctaagagcgaacttcacataggaagggatctgagaacacgttgccaggggcttgagaaggttactgaggtgagttattgggagtcttaataaaataaactagatattaggtccattcattaattagttccagtttctccttgaaatgagtaaaaactagaaggcttctctccacagtgttggtgccccttcactcatttttttttgaggagaagggggtctctgttaacatctagcctaaagtatagaactgccctggggggcaggggttaggaatctcttcactaccctggattcttgattcctgggctctaccctgtctgtcccttttctttgaccagatctttctcttccctggaacgttttcttctttccctgggacagggcagcctcctttgtgtgtatttcagagggcagtgatgacttgctgtccagggcagctccctcctggcacacaggaatggcttcaggggtcactggaaccactgcttctcttttgaaaagtagagctagctgccactttcacgtgggcctccgcagtgtctccacctacacccctgtgctcccctgccacactgatggctcaagacaaggctggcaaaccctcccagaaacatctctggcccagaaagcctctctctccctccctctctcatgaggcacagccaagccaagcgctcacgttgagccagtgggccagccacagagcaaaagagggtttattttcagtcccctctctctgggtcagaaccagagggcatgctgaatgccccctgcttacttggtgagggtgccccgcctgagtcagtgctctcagctggcagtgcaatgcttgtagaagtaggaggaaacagttctcactgggaagaagcaagggcaagaacccaagtgcctcacctcgaaaggaggccctgttccctggagtcagggtgaactgcaaagctttggctgagacctggggatttgagataccacaaaccctgctgaacacagtgtctgttcagcaaactaaccagcattccctacagcctagggcagacaatagtatagaagtctggaaaaaaacaaaaacagaatttgagaaccttggaccactcctgtccctgtagctcagtcatcaaagcagaagtctggctttgctctattaagattggaaatgtacactaccaaacactcagtccactgttgagccccagtgctggaagggaggaaggcctttcttctgtgttaattgcgtagaggctacaggggttagcctggactaaaggcatccttgtcttttgagctattcacctcagtagaaaaggatctaagggaagatcactgtagtttagttctgttgacctgtgcacctaccccttggaaatgtctgctggtatttctaattccacaggtcatcagatgcctgcttgataatatataaacaataaaaacaactttcacttcttcctattgtaatcgtgtgccatggatctgatctgtaccatgaccctacataaggctggatggcacctcaggctgagggccccaatgtatgtgtggctgtgggtgtgggtgggagtgtgtctgctgagtaaggaacatgattttcaagattctaaagctcaattcaagtgacacattaatgataaactcagatctgatcaagagtccggatttctaacagtccttgctttggggggtgtgctgacaacttagctcaggtgccttacatcttttctaatcacagtgttgcatatgagcctgccctcactccctctgcagaatccctttgcacctgagaccctactgaagtggctggtagaaaaaggggcctgagtggaggattatcagtatcacgatttgcaggattcccttctgggcttcattctgggaaacttttgttagggctgcttttcttaaggtgcccacatttgatggagggtggaaataatttgaatgtatttgatttataagttttttttttttttttttgggttaaaagatggttgtagcatttaaaatggaaaattttctccttggtttgctagtatcttgggtgtattctctgtaagtgtagctcaaataggtcatcatgaaaggttaaaaaagcgaggtggccatgttatgctggtggttaaggccagggcctctccaaccactgtgccactgacttgctgtgtgaccctgggcaagtcacttaactataaggtgcctcagttttccttctgttaaaatggggataataatactgacctacctcaaagggcagttttgaggcatgactaatgctttttagaaagcattttggggatccttcagcacaggaattctcaagacctgagtattttttataataggaatgtccaccatgaacttgataccgtcccgtgtgtcccagatgctgtcattagtctatatggttctcccaagaaactgaatgaatccattggagaagcggtggataactagccagacaaaatttgagaatacataaacaacgcattgccacggaaacatacagaggatgccttttctgtgattgggtgggattttttccctttttatgtgggatatagtagttacttgtgacaagaataattttggaataatttctattaatatcaactctgaagctaattgtactaatctgagattgtgtttgttcataataaaagtgaagtgaatctgattgcaaaaaa

SEQ ID NO: 45957 - DNA, 868 bp, Homo sapiens
gaacgatttctaaactttatggaaaaagccaatgacaatcaattagccaaaaacgagacgccaaatcccatctcactccagcgccatgccctcttctcaaacgctcgccggctctaggacctctccaccagcacagttctcaggagtcctgctggtctcccagtgctgttctaagggtccacatgaaggcaggtcaggcgggactccccgggcaagcacttctgtacgcgccatgccctcttctcaaacgctcgccggctctaggacctctccaccagcacagttctcaggagtcctgctggtctcccagtgctgttctaagggtccacatgaaggcaggtcaggcgggactccccgggcaagcacttctgtacgcggaaagcacgagggcgcaggagccatggagagccggtccttttggagacagggaatacttaagaggattggcaaaccggagaaacgctgggagaggtgccccgcactgcgggtggtaaaggcagagtctcagttctcctcgggctttgtcggcttggcggtccacaaggctgaagcatctttttccatcaagttgaaagcggactcgcgctttgctctcattctccgcaatggcgaagtagttgaagaaggtcgaagtggcccatgtaggagcagtacgagtcgcggtgttggttcaccagccactcccacttggtggtgtcggcgtggcccgtgccgatgtacttggactgcaggtgctccagctggctatggatggtgtagcggtcagtcatctcgccgctttccccttcgctctcaggtcagaggacgcaggtaacaactcgccgctctagcgttttacaggagagtgaagccaccgcgcggaagctcc

SEQ ID NO: 45958 - DNA, 1864 bp, Homo sapiens
ggaacggcagtgatcacacgtcggctgctgggaagatctggattctcgtttcaggtcaccatcagaaaagctaagtttgctgtatagtgaggatcaggagatctgatcctgattgcagaaccttccctgattacagaatcttggatgatttcacaaaagttcatcttcattgcagatacctgccctttctttctaggttgtatctcccacttcacccttctagaccatcccagaagatctataagatttcatctgggaaatcactaggagttcttggaagggaaagaaggaagattgttggttggaataaaaacagggttgaatgagttccagaaagcagggttctcaacctcgtggacagcaatctgcagaagaagagaacttcaaaaaaccaactagaagcaacatgcagagaagtaaaatgagaggggcctcctcaggaaagaagacagctggtccacagcagaaaaatcttgaaccagctctcccaggaagatggggtggtcgctctgcagagaaccccccttcaggatccgtgaggaagaccagaaagaacaagcagaagactcctggaaacggagatggtggcagtaccagcgaagcacctcagccccctcggaagaaaagggcccgggcagaccccactgttgaaagtgaggaggcgtttaagaatagaatggaggttaaagtgaagattcctgaagaattaaaaccatggcttgttgaggactgggacttagttaccaggcagaagcagctgtttcaactccctgccaagaaaaatgtagatgcaattctggaggagtatgcaaattgcaagaaatcgcagggaaatgttgataataaggaatatgcggttaatgaagttgtggcaggaataaaagaatatttcaatgtgatgttgggcactcagctgctctacaaatttgagaggccccagtatgctgaaatcctcttggctcaccctgatgctccaatgtcccaggtttatggagcaccacacctactgagattatttgtaagaattggagcaatgttggcctatacgccccttgatgagaaaagccttgcattattgttgggctatttgcatgatttcctaaaatatctggcaaagaattctgcatctctctttactgccagtggattacaaagtgggcttctgctgagttaccaccgcaaagccctgtgagcgtctacagacagctcaccatttttgtcctgtatctgtaaacactttttgttcttagtctttttcttgtaaaattgatgttctttaaaatcgttaatgtataacagggcttatgtttcagtttgttttccgttctgttttaaacagaaaataaaaggagtgtaagctccttttctcatttcaaagttgctaccagtgtatgcagtaattagaacaaagaagaaacattcagtagaacattttattgcctagttgacaacattgcttgaatgctggtggttcctatccctttgacactacacaattttctaatatgtgttaatgctatgtgacaaaacgccctgattcctagtgccaaaggttcaacttaatgtatatacctgaaaacccatgcatttgtgctcttttttttttttatggtgcttgaagtaaaacagcccatcctctgcaagtccatctatgttgttcttaggcattctatctttgctcaaattgttgaaggatggtgatttgtttcatggtttttgtatttgagtctaatgcacgttctaacatgatagaggcaatgcattattgtgtagccacggttttctggaaaagttgatattttaggaattgtatttcagatcttaaataaaatttgtttctaaatttcaaagcaaaaaaaaagtc

SEQ ID NO: 45959 - DNA, 331 bp, Homo sapiens
aaaagccaaaatgggaaaggaaaagactcatatcaacattgtcgtcattggacacgtagattcgggcaagtccaccactactggccatctgatctataaatgcggtggcatcgacaaaagaaccattgaaaaatttgagaaggaggctgctgagatgggaaagggctccttcaagtatgcctgggtcttggataaactgaaagctgagcgtgaacgtggtatcaccattgatatctccttcgtcgacgcggccgcgaattccagatctatgaatcgtagatactgaaaaaccccgcaagttcacttcaactgtgcatcgtgcaccatctca

SEQ ID NO: 45960 - DNA, 454 bp, Homo sapiens
  misc_feature (1)...(454): n = a,t,c or g
ggtgntttganncctgagaccgtttgactgattacgaatttaatacgactcactatagggaatttggccctcgaggccaagaattcggcacgagctcacttggatatacctctgttttcacgatagaaataagggaggtctagagcttctattccttggccattgtcaacggagagctggccaaggcttcacaaacccttgcaacattgcctgaagtttatggaataagatgtattctcactcccttgatctcaagggcgtaactctggaagcacagcttgactacatgtcatttttaccaatgattttcaggtgacctgggctaagtcatttaaactgggtctttataaaagtaaaaggccaacatttaattattttgcaaagcaacctaagagctaaagatgtaattnttcttgcaattgtaaatcttttgtgtctcctgaagacttccctt

SEQ ID NO: 45961 - DNA, 603 bp, Homo sapiens
tttatgagtttattacggccttaatacgactcactatagggaatttggccctcgaggccaagaattcggcacgagcgcaaaggtgctcggtccttccgaggaagctaaggctgcgttggggtgaggccctcacttcatccggcgactagcaccgcgttccggcagcgccagcccttacactcgcccgcgccatggcctctgtctccgagctcgcctgcatctactcggccctcattctgcacgacgatgaggtgacagtcacggaggataagatcaatgccctcattaaagcagccggtgtaaatgttgagcctttttggcctggcttgtttgcaaaggccctggccaacgtcaacattgggagcctcatctgcaatgtaggggccggtggacctgctccagcagctggtgctgcaaccagcaggaggtcctgccccctccactgctgctgctccagctgaggagaagaaagtggaagcaaagaaagaagaatccgaggagtctgatgatgacatgggctttggtctttttgactaaacctcttttataacatgttcaataaaaagctgaagctttaaaaaaaaaaaaaaaaaaaaaagtttt

SEQ ID NO: 45962 - DNA, 737 bp, Homo sapiens
gcggccgccatttcagggagcttgtcgacgctgtcgcaggggtggatcctgagctgccgaagccgccgtcctgctctcccgcgtgggcttctctaattccattgttttttttagattctctcgggcctagccgtccttggaacccgatattcgggctgggcggttccgcggcctgggcctaggggcttaacagtagcaacagaagcggcggcggcggcagcagcagcagcagcagcagcaatctcttcccgaacacgagcaccacaggcgcccgaaggccggaacaggcgtttagagaaaatggcagacgatattgatattgaagcaatgcttgaggctccttacaagaagacttgcctaacgatatctcacctctactcccatgaattcacctttgattccagtgtgaactgtcaatcataaggtagtaattgagtgacttatcgctgtaccgtggtcccctaggtaaaatgactcaactaagaattaccacctccagtttggtatagcaaaaaggtgaatgtagtggtttgggaaaaagcaggggtccaagaataacaaagcatgaccagtctgtggcaagttaaatcttctaatagtcttataagaagaaatgggtgagattttaaaatttatgtatctatgtaagactggtgatagtaaatcttaaaacagtccagtggcaatctgctgctcagttaataattactaaaattcttggatccctgaatagaaat

SEQ ID NO: 45963 - DNA, 1183 bp, Homo sapiens
cccacgcgtccgcccacgcgtccgcgctgagtggtttttcggatcatgtctggtggctccgcggattataacagagaacatggcggcccagagggaatggaccccgatggtgtcatcgagagcaactggaatgagattgttgataactttgatgatatgaatttaaaggagtctctccttcgtggcatctatgcttacggttttgagaagccttccgctattcagcagagagctattattccctgtattaaagggtatgatgtgattgctcaagctcagtcaggtactggcaagacagccacatttgctatttccatcctgcaacagttggagattgagttcaaggagacccaagcactagtattggcccccaccagagaactggctcaacagatccaaaaggtaattctggcacttggagactatatgggagccacttgtcatgcctgcattggtggaacaaatgttcgaaatgaaatgcaaaaactgcaggctgaagcaccacatattgttgttggtacacccgggagagtgtttgatatgttaaacagaagatacctttctccaaaatggatcaaaatgtttgttttggatgaagcagatgaaatgttgagccgtggttttaaggatcaaatctatgagattttccaaaaactaaacacaagtattcaggttgtgttgctttctgccacaatgccaactgatgtgttggaagtgaccaaaaaattcatgagagatccaattcgaattctggtgaaaaaggaagaattgacccttgaaggaatcaaacagttttatattaatgttgagagagaggaatggaagttggatacactttgtgacttgtacgagacactgaccattacacaggctgttatttttctcaatacgaggcgcaaggtggactggctgactgagaagatgcatgccagagacttcacagtttctgctctgcatggtgacatggaccagaaggagagagatgttatcatgagggaattccggtcagggtcaagtcgtgttctgatcactactgacttgttggtaagtctcttaatgctttttaaaaatctaccaaaagttagctttttggggggcaggtttttaagtaacctttgccaacttgggctatttggaagagtaaaagaccacactccacagtgggctataccacttagtatag

SEQ ID NO: 45964 - DNA, 409 bp, Homo sapiens
  misc_feature (1)...(409): n = a,t,c or g
cactatgactgattacgaatttaatacgactcactatagggaatttggccctcgaggccaagaattcggcacgaggagctgctctcaaatctccatcatttgcaccttgcctatttgaaatgttttaaatctaaacagaagacttgtgtattccagggaagctgcgctggttgtgatctggtgagtggaggtcattctgagccttggctgcagtgctgtgaccacgtcggatgtgatatgtctctctcagttcagccaggccatccagagatgtgcttgcgttgctgtccttgtgctggggagcctctttggcctgatcttcacagggacaggggtgggggnnnnnctgctttggggcccctgggctgggagtgggagctggattanctgtcctgtggggcactgccct

SEQ ID NO: 45965 - DNA, 2668 bp, Homo sapiens
gacggagcgccggagcggagggagccggggctgggagttctcctgagggaagaggagtggagtagggggaacgcggcggcggcgttgacaatgagttttcttggaggcttttttggtccaatttgtgagatcgatattgttcttaatgatggggaaaccaggaaaatggcagaaatgaaaactgaagatggcaaagtagaaaaacactatctcttctatgacggagaatctgtttcaggaaaggtaaacctagcctttaagcaacctggaaagaggctagaacaccaaggaattagaattgaatttgtaggtcaaattgaacttttcaatgacaagagtaatactcatgaatttgtaaacctagtgaaagaactagccttacctggagaactgactcagagcagaagttatgattttgaatttatgcaagttgaaaagccatatgaatcttacatcggtgccaatgtccgcttgaggtattttcttaaagtgacaatagtgagaagactgacagatttggtaaaagagtatgatcttattgttcaccagcttgccacctatcctgatgttaacaactctattaagatggaagtgggcattgaagattgtctacatatagaatttgaatataataaatcaaagtatcatttaaaggatgtgattgttggaaaaatttacttcttattagtaagaataaaaatacaacatatggagttacagctgatcaaaaaagagatcacaggaattggacccagtaccacaacagaaacagaaacaatcgccaaatatgaaataatggatggtgcaccagtaaaaggtgaatcaattccaataaggctatttttagcaggatatgacccaactccaacaatgagagatgtgaacaaaaaattttcagtaaggtactttttgaatttagtgcttgttgatgaggaagaccggaggtacttcaaacagcaggagataattttatggagaaaagctcctgaaaaactgaggaaacagagaacaaactttcaccagcgatttgaatctccagaatcacaggcatctgccgaacagcctgaaatgtgaactgaacaggagaaaaaaagaaaagcaaaaaactcctgtaacccttgagattaagttcagcaggttaaagatggttgcagctggagggggcggaaaaaggccaaaactccatatatgttagtcttcctttatcttacagcgcagcatttattttatgatataatgaaatgttcgttcatgtatatacatttttaaaagtgctttctttgaaacactggaactttgttaagctgccttttttttttttaacttcctactttgatgataagcactcagatatatatcagcgtaaacatgaaaaattttcatgtgagtaggctggtatttgtaattttgctttctttctgcataatgttgattataaatcctctcttttcaggctaatgattacctcttattctctacatgcaaaaaattaaatattttgtgttcaaataaaattagaaaacttgagtggcctcttgtgtcctgcagagatttaaaacatggcatctcaatatttttgagaactacatttgtttttaacatatgtgtttgagaaaagcatatggagtgtttcaccgcaggcacttctgagtaccattccatggcttccagaattttatcctctttgaggtcttctgtgctatgaatattagatttctttccccaagggattatgtggcaggtcattatggccttcttttttttggccatattaagtaacagttttgctatattccagtagtaccgttgtgtgttttctgcaatgtggagttgacttagcttggcattttagatttgttaaaactattttttccataaatactttgaaacgtatttatatatttcaatttaaggaatctttttgccatgtgtatgcaaatattattttcttcatacattcattttcttttcaggggaaaattttgggatgggggactcaggaggacctgtgaagcatgtagttatctagatctgggtaatttcatgtttattaaactcgaactttggctagttaaactcatattgaaacttcatctagtctcttaattttttaacactaaattcaagtcatttgttttaagtctctaaaaaagaagattgcagtcatccattcatatgcatggggtctgatcgcaaatacactaaatgtggagtgtaggaaccaaaatgaaacctgctgtatggaaactactttcacttatggttcattggtttttgtaccaatattttttatgcacttcagtgcaagtcttgtcagttaaccttactttatgagtaagctaaataacccaaattacatttctttaaacctgttttactactatggcactttgataaaatggtcaggaaccaactttactggcaaaagggtccatgtaccaccatgtgctggagcatctgttctacatgtggatatctatgaatggtaatgttttccttcatgtaagtgcctattcagagtttcagaattttaaaatgccaaatattttcatggtcatttgcatgtagtaagccagaaaatattcaaagagattttgaaaaccaattgtatttaaccagcctcaaattgtgcaaccatgatgtataataaagaatttgaaacagaaaa

SEQ ID NO: 45966 - DNA, 1716 bp, Homo sapiens
tgttagtcttaggggcttccctttgtaggtgacccggcctttctccctggctgcccttaacaatttttacttcatttctaccttgaagaatctgatgattatgtgtcttgggtttgctcttctcgaggaatacttcatggtgttctctgtatttcctgaatttgaatgttggcttgtcttgctaggttggggaagttttcctggataatatcctgaagagtgttttccacttgtttcgattctccccgtcactttcaggtacatccatcaaacgtaggtttggtcttttcacatagtcccatatttcttggaggctttgttcattccttttcattcttttttctctaatcttgtcttcacgctttatttcattaagttgatcttcaatctctgatatcctttcttctgcttgatcgattcagctattgatacttgtgtatgcttcacgaagttctcatgctgtgtttttcagctccatcaggtcatttatgttcttctctaaactggttattctagttagcaattcctctaaccttttatcaaggttcttagcttctttgcattgggttagaacatgctcctttagctcagaggagtttgttattacccaccttctgaagcctacttctgtcaattcagccatctcagcctcagcctcagcccagttctgtgcccttgctggcgaggagttgtgatcctttggaggagaagaggtgctctggtttttggaattttcagcttttctgctctggtttctccccatctttgtggttttatctgcctttgatctttgatgttggtggcctaaagatggaatttttgcatggtcgtcctttttgttgatgttgatgctattcctttctgtttgttaattttccttctaagagtcaggtccctcagctgcaggtctgttggagtttgctgaaggtccactccagaccctgtttgcctgggtatcaccagtggaggctgcagaacagcaaagattgctgcctgctccttcctctggaagcttcatcccagaggggcacctgccagatgccagccagagctctcctgtatgaggtgtctgttgacccctgctgggaggtgtctcccagtcaggaggcacaggggtcagggacccacttgaggaggcagtctgtcccttagcagagctcgagtgctgtgctgggagaatcccccttgtcaggatctgctgctctcttcagagctggcaggcaggaacatttaagtctgctgaagctgcacccacagctgccccttcccccaggtgctctgtcccagggagatgggggttttatctataagcccctgactggggctgctgcctttctttcagagatgccctgcccagagaggaggaatctagagaggcagtctggctacagcagccttgctgagctgtggtgggctccacccagtttgaacttcctggcagctttgtttacactgtgaggggaaaaccacctactcaagcctcagtaatggtggacacttctcttcccaccaagctagagcatcccaggtcgacttcagactgctgtgctggcagtgagaatttcaagccagtggatcttagcttgctgggctccatgggggtgggatccactgagctagacctcttggctccctggcttcagcccccttctccaggggagtgaatggttctgtctcactgaggttccaggtcccactgggggaaaaaaaaaaact

SEQ ID NO: 45967 - DNA, 486 bp, Homo sapiens; identical to SEQ ID NO: 22654
  misc_feature (1)...(486): n = a,t,c or g

SEQ ID NO: 45968 - DNA, 536 bp, Homo sapiens
gcacccgggcggccagctgggctcggagtgcagcggggttaggatggacgaggacgtgttgcaccctgaagagcctcatcatcggtgagagtggggtgggcaagtccagcctgctcttgaggttcacagatgatacctttgatccagaacttgcagcaacaatagatccatcttcggttgtgaatccggcccggaatgcagccaccccttagagcaaccccccttgctgctcgtgccctgctgtgctactgcctcagtcacttcctgcttggtcaagaccacagctgctgatgtcacagctgaggcacatcagaaaggctgcctgattcaaagaaagctgccggataaatcatagagcacagacacttctacctcatgctcttatgggactttaggaaccaaacataagcacctatggaaaatgcacggcggtcttgaaaggctgtggtctttatcagaaaatatctgaatgactggttggtaatgtcagtcctactcttgcaggcttgcttaaggtgatgattgaaagggcaaaa

SEQ ID NO: 45969 - DNA, 2735 bp, Homo sapiens
tttttttcattgttaataaaaacatttattttgcattttatacagaacaacctgaagtctccatcatgacttgacagttacccaggggtttacagtgtgtccaactcaacagtgtggttctgggactgggtatccacacaaacacaggcaggagtttggaggaaagatgggggcacagcaggagtgtatcttaatcctttctcaaagaaaaagaagtagagcattctgagttgctgaaaacctgtgcaaatggggcttctgaaacattgtactgtgagctctcagggaaagggaggaaaaagatgttgataaataaggaggcaatttcttgaggcaggggacgaggagggaggcttactatttttaatgccctcagccccagtacctgataatcagaggagaccatgtccaatcttgaatcaattccctgttcaaaaagaggtgctaataccccggggacaagactctgaaaatatcatgctggtcattccggagttctatgccccacagcatattaaaagatgggggttggtggggggtggggaggtcagaaggtagtggcttgtattctgtggaagtaaaaaacttagttcacattaagcactgataaaacccaatgactgggcccacagatctgttgagaggtctctagtagggaccaagagggggaggtccagaacatcctctgcctgaggtgcaacaggtgtagaaagtctgggaggaggtgagtattaaagtaatgggaaacagaacactcccagaccttaattttaattggatagttttaaaaaaaaaatcaaacattgggtgccagtcacaacaaatgccatgcctttatggtcacttggtagtataaaaaaattgccaaagcatgtccagctaaccaacaggtcttgctaggaggtgtttgtgtgcatgggagagggccaaggggcttggtacagctgactatccaacatgattcctatggaaacagaaggggcagagtcctggtttgctggcttattgagggcttggcagagaagctaaagctccaaagtgactacagattctctgcaaccggctttgacccatggaaacaggagccagattctcactctagagatagtgagggggccaaacctactcataccacatgcattagtcctggtcatcctccaggaccatgcgtatgatgggcaactcataccaggcaggggaagggagctgattagggaagaagggaccatttttcatcttttaaagtcttaatttatattttaacctcaaacatattatcagtgcctcagatataatttaatcttaagtctttaaaggccccctgaaacaaaagtatactttttatttaggcttcctcactttctggtagtcactttcacccagtctccagttttaccctgacttagagtccacaaacttcatcagaccctctgtgctcatggacttgggcctttctagagggaagcctaaggctcggctccagatgagctgtgccagtacacccaatgctcgtgacaccccaaacaggaccgtgtagtaattcatctccgtcatgccataatactggagcagcaccccactgtgagcatctacattgggccaaggattcttggctttaccctgctctaagaggacattgggcacaatcttgtacagctgagcaaccaacttaaacatggggtcattaggcaggtgtttcagagcaaactctcgctgacaggtatatcgcggatcagtcttccttagtactgcatggccatagcctggaacaacccgtcctgagttgagtgtgttccagatgtagtctcgtaacttctcatctgacacatctttgccaacttccttctgcagctgtgttagccagacaagcacttcctgatttgccagtccatggagaggccctgccagcccgttcatggctgctgcaaaggacaggtaagggtcggaaaaggcactgccccaccaaatggctggtatgggcacttacattgcccaccctcatggtcactgtggatggtgaggtacaggcgcgtgagctcacgtgaactgatgatcagtatagcctaacatgttggtgaaattgtgagaccagtccaggttagagtcaatggccccaataccgctgccttctctgtagagatttcggtagatctttgctgcaacacaaggtagctttgcgattagatccatagagtcttcataaatcaactcccagtacttggttcggctgataccctgtgcatatgctcgggcaaagttactttcactgttgagggctgtaacagctgcactgagctgagacatggggtgtagattggtgggaaagttgtccagcatggtgaccacatgggaaggcagagctgccctctttgcccactcttttgagagccaagatacctgttcctctgttgggatatgtccagttaccagcagccaaaataagccctcaggcaggggttcttccccacccttagccttgggtagcagtttctggcattcagggatactaaagcctcggaaacggatgccctcatcaggatcaagaactgatgtttcatagaccaatcccttcatgcctctcatgccaccatacatcatgtccacagtgatttggcccaccaccgtcttgccatgttgctgcctgaaagtcttaattctggcctgctccttaggtatcaggtcagccaatatgtctttcaaattcgtggaggaagcactggcatgccgggctgcaa

SEQ ID NO: 45970 - DNA, 2410 bp, Homo sapiens
cacagtaggaaacataaagaaacaatgtcccctacatatccccatgactacataatccatcatcgtaggaaataggaaagcaaatttgattttggttttgtaaaacgtacatgcttcaataattctttttttgtgtcttaaatactcataggggaaaaaaacagctcacccaaggtgttaggtttcacatatatattcatcaactattttagaagatttaattctatcaaatcttgtattacctcagatcattttaaatagcaagccaataacgagctttgaaggctattttaccattcctgttcacaaaaggttctcatggtgcctgacaggttacccttgagggcttgtgtctactttttaaaagtcaatggttttttttcttgtgttctagtttccataataggagagaaaatatagaaatatatgcaaaaattatagttttctttagatcagaaactgatatttttgggtcagccatatgtattttgtttaaaggatttaaaataaagtgccgtcatgtagccctgtggaagggagcacataaccagctgtttggcatgacaggtgacttagtatatttgtaattggttttaaaaccaatacaccatactttctttctgcaaacagccatctttatacttagggaagaaaaattgttgggttctagacttttttaatataaattttgttgatatggaattaggtaagtttaagtgtctatgtgcatatgttttttatataagttttttctattcagtttcactgatccaactggcagtgggtaaatatggcataagttaataacacttttccccaaaatggtgctttggatttgaaaagggtctgatggggagaaggagaacgtatcatcctagcttcctctcttaataaacctagaaaaacgggtagtaaactgtggatagtcaggaaaacacccagcaagggacacagctgtcaggaaatgaatcttccccccaacccccaccatgcagatggatagacagaatctttcctgactagtcattaggatcaggggcctctgttggatttgtgtttcttgaagaatagctggcagagtggtataaaagacacgaatatctcctggtctataaggatactctgatttggggtttgcatttttcatggtttttatttcctgttccccctggagttttccattagtgagtttttgtgcaaggatcttatttgtgatgccttccctcccctagaaagattttgtgcaatatattaaatggggacagaattctaaatggataaaacaatggctggttctagccctgagtgacagtcttaaggctagatccttcccatagtatcatctgtcctctggaatgactctcctgtccctaaaggggttaagagagagatcacctagaaatccctctggacacttgtgggttctttagggtttgagtttcttcttccccttgagcttcagagaggagagttggcatggttaaatctgaatggttacctcactgctgaaaacccagaggggcgtggcacactcgcttgtgtggaaaagcctctaaatgcatcccttcctttctttcctgcttcctttgccttacaattgaagcagcccgtggtaccatcacagtatgcagagacttcctcacctttcatatctagggaccacccccgatgcattggtgagggtgggcacttataaatgcctgctattgttaagccattccagcctcttcctctgaatagaccagacgccctttcacttagttcagtgccagtccttttgccttcccaaccctgctgttaggcctgctgttccctttgctcttgattaggagagatggaaggagatgagctcccataactgaattggcctttggttcatgttttctccccatatgtatatatgccatatgtgaatatgccatatatatgtgccaacaaatctatctacgttgttcttttcaaattagcacgcagataggaattttgagtttcttcttcttttagtaactagtataacaagcactggtatttttgtacaaaaaagaaaaacaaaagattgactattgtggtctgcatgacataaacaaacaaatggtgatatcaaagcaacgtataccccagtccagtgtgtgttgccataatttgcaattcagcttaacagtgcacccaatctatatttgcattttgatattatttaagctctatgtacaaggttttgcatgtatttatatggttccttagggaaaaaaaatgctataaactgcaaatctgaaattcaaatgtgttgttccactgagaccagaagaagaagaggagttttaaaagggataatttgttggagccaataaagctttttgctgatgaacagaaaccaatactgctgtgcactgagaataaaaactcatgccca

SEQ ID NO: 45971 - DNA, 1663 bp, Homo sapiens
gggtggtcggtgtgcttgtgaccctgcctttgtgtggctgtcaccggtgggactggcggggactgtgtgattaacctccatttcagctaatcatgggagagattaaagtctctcctgattataactggtttagaggtacagttccccttaaaaagattattgtggatgatgatgacagtaagatatggtcgctctatgacgcgggcccccgaagtatcaggtgtcctctcatattcctgccccctgtcagtggaactgcagatgtctttttccggcagattttggctctgactggatggggttaccgggttatcgctttgcagtatccagtttattgggaccatctcgagttctgtgatggattcagaaaacttttagaccatttacaattggataaagttcatctttttggcgcttctttgggaggctttttggcccagaaatttgctgaatacactcacaaatctcctagagtccattccctaatcctctgcaattccttcagtgacacctctatcttcaaccaaacttgggactgcaaacagcttttggctgatgccctgcatttatgctcaaaaaaatagttcttggaaatttttcatctggcccggtggaccctatgatgggctgatgccattgatttcatggtagacaggctagaaagtttggggtcagagtgaaactgggcttcaagacttaccttgaattgtcaaaattcttatgtggaacctcataaaattcgggacatacctgtaactattatgggatgtgtttgatcagagtgcgctttcaactgaagctaaagaagaaatgtacaagctgtatcctaatgccccgaagagctcatctgaaaacaggaggcaatttcccatacctgtgcagaagtgcagaggtcaatctttatgtacagatacatttgctgcaattccatggaaccaaatacgcggccattgacccatcaatggtcagtgccgaggagcttgaggtgcagaaaggcagccttggcatcagccaggaggagcagtagtgtgtctctcgctgtcaatgatgagttgacccggtgtgttcttgtatagtcagtggcatcagcacccgtcagccggccttttccttcaggttcgtcaggctcaccggttctcactgtgtctgggaagtaggactgatggtcatcttcatgacaggcggcatctccactaagcctgtgtaactgttccctctttggttttcttagcttttgaatttgaagaagtacttttgaagactcccattttaagaaccgtgcaaattttgctaccaaaagtcttcaccactgtgttcttaagtgaatgttaatttctgaggtttgggactttgtggtggtttttttcttcttttcttttccattcttctttctttctttttatgttgtttgctgtaaatgctgcacatccagattgcatatcaggacattggttattttatgctttcttggatataaccatgatcagagtgccatggccactaccccactgtttgctctcctgcaaatcaactgcttttaatttacacttaaacaaattgttttgagtgttagctactgcctttctagatattagtcatttggaataaaaattcaatttcactgaaaaaaaaaaaaaaaaagtcgacgcggccgcgaatttag

SEQ ID NO: 45972 - DNA, 1216 bp, Homo sapiens
gcgcggccgcaatgaactgggagctgctgctgtggctgctggtgctgtgcgcgctgctcctgctcttggtgcagctgctgcgcttcctgagggctgacggcgacctgacgctactatgggccgagtggcagggacgacgcccagaatgggagctgactgatatggtggtgtgggtgactggagcctcgagtggaattggtgaggagctggcttaccagttgtctaaactaggagtttctcttgtgctgtcagccagaagagtgcatgagctggaaagggtgaaaagaagatgcctagagaatggcaatttaaaagaaaaagatatacttgttttgccccttgacctgaccgacactggttcccatgaagcggctaccaaagctgttctccaggagtttgggtagaatcgacattctggtcaacaatggtggaatgtcccagcgttctctgtgcatggataccagcttggatgtctacagaaagctaatagagcttaactacttagggacggtgtccttgacaaaatgtgttctgcctcacatgatcgagaggaagcaaggaaagattgttactgtgaatagcatcctgggtatcatatctgtacctctttccattggatactgtgctagcaagcatgctctccggggtttttttaatggccttcgaacagaacttgccacatacccaggtataatagtttctaacatttgcccaggacctgtgcaatcaaatattgtgggagaattccctagctggagaagtcacaaagactataggcaataatggagaccagtcccacaagatgacaaccagtcgttgtgtgcggctgatgttaatcagcatggccaatgatttgaaagaagtttggatctcagaacaacctttcttgttagtaacatatttgtggcaatacatgccaacctgggcctggtggataaccaacaagatggggaagaaaaggattgagaactttaagagtggtgtggatgcagactcttcttattttaaaatctttaagacaaaacatgactgaaaagagcacctgtacttttcaagccactggagggagaaatggaaaacatgaaaacagcaatcttcttatgcttctgaataatcaaagactaatttgtgattttactttttaatagatatgactttgcttccaacatggaatgaaataaaaaataagtaataaaagattgccatgaatcttgca

SEQ ID NO: 45973 - DNA, 1375 bp, Homo sapiens
cccatcagctttgacatcattacgaatttaatacgactcactatagggaatttggccctcgaggccaagaattcggcacgagcagcgccgagcgatgggcatctctcgggacaactggcacaagcgccgcaaaaccgggggcaagagaaagccctaccacaagaagcggaagtatgagttggggcgcccagctgccaacaccaagattggcccccgccgcatccacacagtccgtgtgcggggaggtaacaagaaataccgtgccctgaggttggacgtggggaatttctcctggggctcagagtgttgtactcgtaaaacaaggatcatcgatgttgtctacaatgcatctaataacgagctggttcgtaccaagacccctgggtgaagaatttgcatccgtgctcatcgaccagcacacccgtacccgacagtggtacgagttcccacttatgccgctgcccctgggccgcaagaagggagccaagcttgactcctgaggaagaagagattttaaacaaaaaacgatctaaaaaaattcagaagaaatatgatgaaaggaaaaagaatgccaaaatcagcagtctcctggaggagcagttccagcagggcaagcttcttggtgagaaggctgttgtgttggaggtggggagtcgcagagattgagtgtgccgaggcacttttcccttgtctcagttcctttgactgccagccatgcagtctaaagggttcactgataacaggctgcgagcacaaaggggaacgtttggtcaccctattcgtatgaagctgaaatgggaagcattgggtagaagagtctgcataggcccgtgcttggagtctttgtatttggggaagtctctgcccaggctggagggggctgtctcagtgatgaaaactttgtccagttctgctactgacagtaagtgaagataaagtgtgtctgaggagacagctggcttcatgcttgcccccagggtacctgaacccacagagattcttaagcgggtggagaggtttgggtagggccaccttgtcgttgtgctaaggatcacctactctcttgcagcgtgcatcgcttcaaggccgggacagtgtggccgagcagatggctatgtgctagagggcaaagagttggagttctatcttaggaaaatcaaggcccgcaaaggcaaataaatccttgttttgtcttcacccatgtaataaaggtgtttattgttttgttcccacatttatgttgcctgaatatatgactgttttctctgctttatttccttgccctgcaaaactgatctgggtgggtggctgcaaccccttgccttaacctctgcctcctactgtcctgagccaggctcaccacactgtaaagtcc

SEQ ID NO: 45974 - DNA, 2918 bp, Homo sapiens
gtgacacgcgaggctcctcagttacttagccaacgcagaggcgggaagtgagaggagtctggggcttgggctgccttccaggcccacggggcggccccgctcttttcggattggttacctttgggcagagtggagactgctgcacggactctggaaccatgaacatatttgatcgaaagatcaactttgatgcgcttttaaaattttctcatataaccccgtcaacgcagcagcacctgaagaaggtctatgcaagttttgccctttgtatgtttgtggcggctgcaggggcctatgtccatatggtcactcatttcattcaggctggcctgctgtctgccttgggctccctgatattgatgatttggctgatggcaacacctcatagccatgaaactgaacagaaaagactgggacttcttgctggatttgcattccttacaggagttggcctgggccctgccctggagttttgtattgctgtcaaccccagcatccttcccactgctttcatgggcacggcaatgatctttacctgcttcaccctcagtgcactctatgccaggcgccgtagctacctctttctgggaggtatcttgatgtcagccctgagcttgttgcttttgtcttccctggggaatgttttctttggatccatttggcttttccaggcaaacctgtatgtgggactggtggtcatgtgtggcttcgtcctttttgatactcaactcattattgaaaaggccgaacatggagatcaagattatatctggcactgcattgatctcttcttagatttcattactgtcttcagaaaactcatgatgatcctggccatgaatgaaaaggataagaagaaagagaagaaatgaagtgaccatccagcctttcccaattagacttcctctccttccacccctcatttcctttttgcacacattacaggtggtgtgttctgtgataatgaaaagcatcagaaaagcttttgtactttgtggtttcctctattttgaattttttgatcaaaaaactgattagcagaatatagtttggagtttggcttcatcttcctggggttcccctcactcccttttttgtcaaccccatctgtagcctcttcctctactcaggcagtcgacccgccacgatgagaagtgggaccagcagagggcgccaacttcaggagtccgctttcccaccaggcttcattcacccagtggaacctgaactgtttggtagagccacccggcccttccttcctcattgttgtttggtatgcgcacagttcctgtgggactgggccgtgagttttccattggaaagaagttcagtggtcccattgttaactcagcctcaaatctcaactgtcaggccctacaaagaaaatggagagcctcttctggtggatgctttgctccctctgagctgcccatgctggtctggcaaacacacctttctgctttgccttcacaaaagtaatgtgttccctttcccaccccttgccctgaccctcagggagtcagcctggcttccatcccatgggtgggaagacttcagcacaaaggaaagactaattcttgtcaggcatttttgaaaaggctgattatgtgtatcaaggtacagcatcgtagggttcccctaaacttgccctgtttttgtttttttagtttgttatccccttactgagcggcctctactaggtggctgtgattaaatgtcccaagcaaggatagggaaggggaatggttgagcctctggagatcattgtaaccaatcctgccagacctgtttggggcagtggggagcaaacctagataaggacctgtttggggcagcagggagcaaaatctcctttaacaaccaagcagttcctcattcacatcaacagagcgaggctgtgataacttaggaggcagcaatcctaatagtccttcagtgcattttagtctgtctccaactggacaccagtaggtagtgtcaagccagagattcggggcagtagataaatgttcattttactgatgcactttagtttttggtctgttacctgttttccagaaatttgtgggccttttaggcgggagttaggcgaccaaaccagtgagagccccaatccctgcagttttgtggcttcaagtgtgggtggacagtcctaatggggatctccagctccttcctgtgggctgccacagacagctacccccagaagggtcaatgttgggagtggttgtggctctgagctgctctacagagcttcagtgtgagaggatcgagccattgaaagctcattaccagtaggacataatttttggctctccctattcacaaccagtgcacagtttgacacagtggcctcaggttcacagtgcaccatgtcactgtgctatcctacggaaatcatttgtttctaagttgtgtttattcctggagtgacatgccaccccgaatggctcactttcactgaggatgctgtcctctgatttaggctgctgcctccagcctctggcttgagaacttactaaaggcacttccttcctgttaaacccctgttaactctccataaatttggtgattctctgctaggcctaagattttgagttaacatctcttgaagccaaactccaccttctgtgcttttttgcttgggataatggagtttttctttagaaacagtgccaagaatgacaagatattaaaaaaaaaaaagaaagaaaaaaaaaaaacacctacttttaaagaaaatacctaacagatttttaatatagttatctctaccactttcttttctagtttcttgattttcagctcaggctgcattctaactcatactgtgaagacaaaggtgtttttgattcagaaatatatgaaatctgcatagtcttaatttgtaaaaaataaagaaaattccttaaccttta

SEQ ID NO: 45975 - DNA, 3260 bp, Homo sapiens
gaattcggcacgaggcgcggcggctgcgaccgggacggcccattttccgccagctcgccgctcgctatggcgtcgctcaccgtgaaggcctaccttctgggcaaggaggacgcggcgcgcgagattcgccgcttcagcttctgctgcagccccgagcctgaggcggaagccgaggctgcggcggcgtccgggaccctgcgagcggctgctgagccgggctggccgccctgttccccgcgctgcggcctggcggcttccaggcgcactaccgcgatgaggacggggacttggttgccttttccagtgacgaggaattgacaatggccatgtcctacgtgaaggatgacatcttccgaatctacattaaagagaaaaaagagtgccggcgggaccaccgcccaccgtgtgctcaggaggcgccccgcaacatggtgcaccccaatgtgatctgcgatggctgcaatgggcctgtggtaggaacccgctacaagtggcagcgtctgcccagactacgacttgtgtagcgtctgcgagggaaagggcttgcaccgggggcacaccaagctcgcattccccagccccttcgggcacctgtctgagggcttctcgcacagccgctggctccggaaggtgaaacaccggacacttcgggtggccaggatgggaaatgggttccaccaaggaaactggaagcccacgtcctcctcgtgcaggggaggcccgccctggcccccacggcagaatcagcttctggtccatcggaggatccgagtgtgaatttcctgaagaacgttggggagagtgtggcagctgcccttagccctctgggcattgaagttgatatcgatgtggagcacggagggaaaagaagccgcctgacccccgtctctccagagagttccagcacagaggagaagagcagctcacagccaagcagctgctgctctgatcccagcaagccgggtgggaatgttgagggcgccacgcagtctctggcggagcagatgagaaagatcgccttggagtccgaggggcgccctgaggaacagatggagtcggataactgttcaggaggagatgatgactggacccatctgtcttcaaaagaagtggaccccgtctacaggtgaactccagtccctacagatgccagaatccgaaggcccaagctctctgggacccctcccagggagggagcccacaggggtgaaggaagctgccttgtacccacatctcccgccagaggctgacccgcggctgattgagtccctctcccagatgctgtccatgggcttctctgatgaaggcggctggctcaccaggctcctgcagaccaagaactatgacatcggagcggctctggacaccatccagtattcaaagcatcccccgccgttgtgaccacttttgcccacctcttctgcgtgcccctcttctgtctcatagttgtgttaagcttgcgtagaattgcaggtctctgtacgggccagtttctctgccttcttccaggatcaggggttagggtgcaagaagccatttagggcagcaaaacaagtgacatgaaggggagggtccctgtgtgtgtgtgtgtgctgatgtttcctgggtgccctggctccttgcagcagggctgggcctgcgaagacccaaggctcactgcagcgcgctcctgacccctccctggcaggggcctacgttagcagcccagcacatagctttgcctaaatggcttttcactttctcttttgttttaaatgactcataggtccctgacatttaagttgattattttctgctacagacctggtacactctgattttaagataaagtaagcctaggtgttgtcagcaggcaggctggggaggccagtgttgtgggcttcctgctgggactgagaaggctcacgaagggcatccgcaatgttggtttcactgagagctgcctcctggtctcttcaccactgtagttctctcatttccaaaccatcagctgcttttaaaataagatctctttgtagccatcctgttaaatttgtaaacaatctaattaaatggcatcagcactttaaccaatgacgtttgcatagagagaaatgattgacagtaagtttattgttaatggttcttacagagtatctttaaaagtgccttaggggaaccctgtccctcctaacaagtgtatctcgattaataacctgccagtcccagatcacacatcatcatcgaagtcttccccagttataaagaggtcacatagtcgtgtgggtcgaggattctgtgcctccagggaccagggggcccaccctctgcccaggggagtccttgcgtcccatgaggtcttcccgcaaggccttttcagacccagatgtgacggggtgtgtggcccgaggaagctggacagcggcagtgggcctgctgaggccttctcttgaggcctgtgctctgggggtcccttgcttagcctgtgctggaccagctggcctggggtccctctgaagagaccttggctgctcactgtccacatgtgaactttttctaggtggcaggacaaatcgcgcccatttagaggatgtggctgtaacctgctggatgggactccatagctccttcccaggacccctcagctccccggcactgcagtctgcagagttctcctggaggcaggggctgctgccttgtttcaccttccatgtcaggccagcctgtcccttctggggtccccaggcgacctcagagccacccgagtcctgcacgccacggctgcacggaggctggacggtgctcctgctccacttcctttttctaggcaggtcttgactgaagcgggggcctggctcctccattttggatgaaggctgtttgctgaaacacactcctgttccttccagctccagttcttgggagtccttttctagatacttcagccagcgactctctgagggctgcgatttttcctgctgcttcacattcccagcctgctggtgtcccacgttttcttcttcactggcactgacagtttcttctagagacctgagtggcagctctgaaacttgtccctgtagtagatttaacttttggacatggcgtctacaatcagcaccagagccttcaccataagcccgcaaaaaggactgcttctctccacaagctttgcatgtccacttgacactcttttttacctggtgcgcctggaagaggcggcagctgcagcagcgtagcacccgagaacgctgaagcgacggccatccctgcttgtgcac

SEQ ID NO: 45976 - DNA, 413 bp, Homo sapiens; identical to SEQ ID NO: 22709
  misc_feature (1)...(413): n = a,t,c or g

SEQ ID NO: 45977 - DNA, 2038 bp, Homo sapiens
ccagaggtggcgtgctgccgacttcgcgtttgccttgctggatgattccgcttgtttgccggctgcgtgagtgcttagagcttttcggtggaagatgccggacagtaacttcgcagagcgcagcgaggagcaggtgtctggtgctaaagtcatcgctcaggccctgaaaacgcaagatgtggagtacatatttggcatcgtaggcatcccagtgaccgaaatcgccattgctgcccagcagctagggcatcaagtacatcgggatgaggaatgagcaagcggcttgttatgctgcctccgcgattggatatctgacaagcaggccaggagtctgccttgttgtttctggcccaggtctcatccatgccttgggcggtatggcaaatgcaaacatgaactgctggcccttgcttgtgattggtggttcctctgaaagaaaccaagaaacaatgggagctttcccaggagtttcctcaggttgaagcttgtagattatataccaagttctctgcccgcccaagcagcatagaagctattccttttgttattgaaaaggcagtgagaagcagtatctatggtcgtccaggtgcttgctatgttgacataccagcagattttgtgaaccttcaggtgaatgtgaattctataaagtacatggaacgctgcatgtcacctcctattagcatggcagaaacctctgctgtgtgcacggcggcttctgttattaggaatgccaaacaaccccttcttatcatcgggaaaggtgctgcttacgctcatgcagaagagagtatcaagaaattggtggagcaatataaactgccatttttgcccacccctatggggaagggtgttgtccctgacaaccatccatactgtgtaggtgcagccagatccagggctttgcaatttgctgatgtaattgtgttatttggtgccagactaaattggattttacattttggactgcctccaagatatcagccagatgtgaagtttatccaggttgatatctgtgcagaagaattggggaataatgtaaagcccgctgttactttgctaggaaacatacatgctgtcactaagcagcttttagaggaacttgataaaacaccatggcagtatcctccagagagcaagtggtggaaaactctgagagaaaaaatgaagagcaatgaagctgcatccaaggaactagcttctaaaaaatccctgcctatgaattattacacagtattctaccatgttcaagaacaactacctagagactgtttcgtggtaagtgaaggagcaaatactatggacattggacggactgtgcttcagaactaccttcctcgtcacaggcttgatgctggtactttcggaacaatgggagttggtttgggatttgctattgcagctgccgtggtggctaaagatagaagccctgggcaatggatcatctgtgtggaaggagacagtgcatttgggttttctggcatggaggtagaaaccatctgcaggtacaacttgccaatcatactgttggtagtgaataacaatggaatttaccaaggttttgatacagatacttggaaagaaatgttaaaatttcaagatgctactgcagtggtccctccaatgtgtttgctgccaaattcacattatgagcaagtcatgactgcatttggaggcaaagggtattttgtacaaacaccagaagaactccaaaaatccctgaggcagagcctagcagacacaactaaaccttctcttatcaacatcatgattgagccacaagccacacggaaggcccagggaaggcttctcggaggtgattcttaaacggagatccagaaggataagcagagactaactcggcaaaggggagagggaagagatgtgcaacaggctctgtagcaagaggaaagaggaagcatggcaagtctgaggaagagggagatgcaactgtaatacaaggatttgtgcaggattttcattggctgacccgctctaatatgtaaataaagacgccagttggtggtcttgagtttta

SEQ ID NO: 45978 - DNA, 519 bp, Homo sapiens
  misc_feature (1)...(519): n = a,t,c or g
gnnnnngnnnnntnnnntnnnnnnatttgnantaccgntatgacatgattacgaatttaatacgactcactatagggaatttggccctcgaggccaagaattcggcacgagctaattcttgtcaggcatttttgaaaaggctgattatgtgtatcaaggtacagcatcgtagggttcccctaaacttgccctgtttttgtttttttagtttgttatccccttactgagcggcctctactaggtggctgtgattaaatgtcccaagcaaggatagggaaggggaatggttgagcctctggagatcattgtaaccaatcctgccagacctgtttggggcagtggggagcaaacctagataaggacctgtttggggcagcagggagcaaaatctcctttaacaaccaagcagttcctcattcacatcaacagagcgaggctgtgataacttaggaggcagcaatcctaatagtccttcagtgcattttagtctgtctccaactggacaccagtaggtagtgt

SEQ ID NO: 45979 - DNA, 1762 bp, Homo sapiens
  misc_feature (1)...(1762): n = a,t,c or g
cgcccccggnctaggttttggaggcgcgggaatgcgttcgttgctcagtgtcggacttccccctattcccatcggccgaggctgtcactttacgctcataaccgtttttctttactgcactcgtgtcgggaggaaagggacttgcgtggcacccccagacctccccgtctccgcttccacgtttggtacatcctgcctgaggcaggaagccgcagctgagggacggcctgtcgtacggtgcggatggtggtggcctgcgaggctcatttctagcaaggaacaaggctttcccgctttgattttataaatattatgtttacaaagctgtaatatatagaaattgataagacgtgtccctgtccctggaaacgcaggcaccgcgtgtttggaaagacattcatctgggctgtttgacagactccccagttggtgccatgctctgtgcttagggaactgtgagacccctggaggggtgggtaccgggaccgcactcagcctggggtttggaggcggcctcctataggaagcgacctgggacctaagatttttagactgactgtgggttcactggaataaaaaggaagaaacaaagagcattgcaggcatcgggactgtcacatttgacaagatcaaagctgcaggaaaatggacagtgaggttcagagagatggaaggatcttggatttgattgatgatgcttggcgagaagacaagctgccttatgaggatgtcgcaataccactgaatgagcttcctgaacctgaacaagacaatggtggcaccacagaatctgtcaaagaacaagaaatgaagtggacagacttagccttacagtacctccatgagaatgttccccccattggaaactgacgcttggctcctttcttgtggatggattttctcaaagtacacagataaagcatggtttgtttcagtctccaaattcaaacctttgagtaataaatcagcactcaaaaatgttacacccatttagtttgtggtagcaaagtgcaatgcgaaattgaatgagaaactgagatttctcagtaatggtgaatatttcgctctttaaacctaaaactcttcattgagtagcttatatttgaacatgattggttaaacatttgcctctacctctgattttgctttgctgtcaaagtttaacaccttccaactacttatgtgtgtcctgtaacacagggtgattgaacgtatgagagggaaaggcaaagaaaaaggaagccagacactaggagaattattaacttctcatacttccccacattgagaagcattcggagtgtatttagcctgtagatgttgtgatatgcaaatatcccattccctggttactggcattcctaagattcttcatggtattttcaaactttggataaatttacagattagaaagatatctgacagttaatctctgttctccttacaaattccttttgtgctgctggaaaggatctttggctaggtggatgactagttttattcaaagccttttctcaaagccctttcagttacaaccaccccactatggaatcagtatttagttatacatttgtataagaacctgtattttgaaaaacacattcatgtatatttattcctggaattatttgcctgttaaacagtgtctttcatgttctctccccagattgtaaactctgtaagaagctgcttgtatctgtatcccttgttgaaactctgaaaacactgaataactaaaatctcttctcatccttaaaaaaaa

SEQ ID NO: 45980 - DNA, 2236 bp, Homo sapiens
gaggagagtcgagggaggtgacgcgcgctgccggggcgaggttgcgaggggcggtgttgaagaatgtgtgggcgaacatcctgtcacttacctagagatgttctcacgagagcttgcgcctaccaggatcggcggggccagcagcggctcccggagtggagggaccctgataagtactgcccctcttacaacaagagtcctcaatccaacagcccagtgcttctgtctcgactgcactttgagaagtcaggtagcattggtgctgcagatagtcctgagaactgggagaaagtctgggacaactggaggctgctgacaatggccgggatctttgactgctggggagcccccagagggaggagatgtcctgtattcctataccatcatcacagtggattcctggcaaaggcttgagtgacatccaccacaggatgcctgccatattagatggagaggaggcagtttctaaatggcttgactttggtgaagtctcaactcaggaagctctgaaattaatccacccaacagagaacatcaccttccatgcagtctcttctgtggtgaacaactcgcgaaacaacactcctgagtgtctggctcctgtcgacttggtggtcaaaaaggagctcagggcaagtggcagtagccagaggatgttgcagtggttggccacaaagtcacccaaaaaggaagactcaaaaacacctcaaaaggaagagtcagatgttccccagtggtccagtcagttcctgcagaagagtccactccccaccaagagaggcactgcaggactcctagagcaatggctgaagcgggagaaggaggaggaacctgtggccaagcgtccttacagccagtgacacaggactttcagagaccaaggccagggtctgctgcactgctgttctgataataggttcttaacattgtatgtatatgtgtttgctttgggaggaggtggcactgtgttagttgacagttgtgggctcatgtagtcttttttgccatgagtagggagcccctagtggggctggtggacagctttggaagaggtgtcctgctgctgttaccagccatgtgggccccataggggcactgcgcctgctgccctttcctggcagggctggtggagtcttccctcaaagcatgccttacccagctgggaagtctctgccctgatctggtactccttgtagtaagctgttttctgctcagccactgggctctttcacttttttagttcttaaaaatttatttttaagttctaaaataaaataaaaataagttcttaaaatttatttttttcctgaataaattgtatttggtaaacttctgcctacattttggaaagtgatgctggtggggaaagttctagatcttacttggtttcttctagaatcagtcttcaggaatggattttgtcacaaatggggcatgggggctttctgaggaaataactacaagtcttggtggtgggctccttattatgtttctttttctttcattcttgatacttggaagtcgtctgaatcctttagcttcaaaccagcctgagtttgagtgcttgccgtagcagaaactatccttaccacaggtgggaaggaaaggaccagtttctagcagtgtcgggccactcctctttcgaacatccctaagggaggcattcacaaaagctgtcccaagcagctggaagaaaacagcttccgagatgaccaggaggactgggcggcgccgagcccagaacgctcctggcgcagcaccgttggcgttggccgattgctgctggtggggggcgggggtgcaggccccagtctctatgcaaatcagggatcagaagatcggaatttccaccaatcagcgggaagcctcggccctgtaactgctaatgggagacagcagcgccacgccacaggcttttcccctggtttcgggaggggtggggagccaggtggggctcccgcccagaccctttcccgaggtccgccctctccgccttttctctaaattcctcttttgagtgccctcccttccggttgagaggcgggggttggcccgtagttgtacactcagtcaccctgcactgtggaggcgggggcctcccttgtggactgatttgcgtgggatttggttgttttattaagagatttaaaaaattcagatgacttactagtatgactgttttgtcatatttgcttccaggttaataaatgacaaaaatgaaaaaaaaaaaaaaaaa

SEQ ID NO: 45981 - DNA, 479 bp, Homo sapiens; identical to SEQ ID NO: 22733
  misc_feature (1)...(479): n = a,t,c or g

SEQ ID NO: 45982 - DNA, 380 bp, Homo sapiens; identical to SEQ ID NO: 22735

SEQ ID NO: 45983 - DNA, 6498 bp, Homo sapiens
cgcacaaggtggcagcccctgatgtcgtcgtgccaacgctggacacagtccgccacgaagccctcttgtacacttggctggccgaacacaagcccctggtcttgtgtggccctcctgggtctggcaagaccatgacactcttcagcgccctccgggccttgcctgacatggaggtggtgggtctcaacttctccagtgctactactccagagctgcttctgaagacttttgatcactactgcgagtacaggcgcacacctaatggggtggttttggctcctgttcaacttggaaagtggctggtgttgttctgtgatgaaatcaacttgccagatatggataaatatgggacccagagggtcatatccttcatcagacagatggtggagcacggaggcttttaccgtacctcagatcaaacatgggtgaagctggagagaatccagtttgttggggcttgtaatccccccacagaccctggaagaaagcccctctcacacaggttcctgcgccacgtgcctgtcgtgtatgtggattacccgggccccgcctccctcacacagatctacggcaccttcaaccgcgccatgctgaggctcattccatccctgcggacgtatgcagagccgctcactgctgccatggtggagttctacaccatgtctcaggagagattcacccaggatacacaacctcactatatctattcaccccgtgaaatgactaggtgggtgagaggcatctttgaagcgctgagacctctggagaccctgcctgttgaaggcctcattcggatttgggcacatgaagctctgcgtctcttccaagatagactcgtagaggatgaggagaggcgttggactgatgagaacatcgacacggttgctctgaagcacttccctaacatcgacagagagaaggcaatgagccgacccatcttgtacagcaactggctgtcaaaggattacatcccagtagaccaagaagagttaagagattatgtcaaagctaggctgaaggtcttttatgaagaagaacttgatgttccgctggtgctgtttaatgaagtcctagaccacgtgctgaggattgacagaatattccgtcaacctcaaggccacttgcttctgattggtgttagtggagcaggaaaaactaccctgtctcgtttcgtcgcctggatgaacggtttgagtgtgtaccagattaaggtccataggaagtacacaggggaagactttgatgaagatctacggacagtgttgagacgttctggctgtaaaaatgaaaagatagcatttataatggatgaatctaatgtgttagattctggattcctggagcgaatgaatacccttctggccaatggagaggtgcctggtctctttgaaggagacgagtatgccaccttgatgacgcagtgcaaagagggggcacagaaggaaggcctgatgctggactcgcacgaggagctctacaagtggttcactagccaggttatccgcaacctccacgtcgtgttcaccatgaacccgtcctcggagggactcaaggaccgggcagctacatcaccagcacttttcaacaggtgtgtgttgaattggtttggagactggtccaccgaagcactgtatcaggttggcaaagaattcacaagtaagatggatctggagaagccaaattacatcgtgcctgattacatgccagttgtgtatgataagctgccgcagccaccatcccatcgggaagccattgtgaacagctgtgtgtttgttcatcagactcttcaccaggcgaatgctcggctagcaaagcgaggcggcagaacgatggccatcacccctcgccactacctggacttcatcaatcactatgccaacctgttccacgagaagcggagcgagctggaggagcagcagatgcacttgaacgtggggctcaggaagatcaaagagacagtcgaccaggtagaagaactgcgtcgtgacttgaggataaagagccaagagctggaggtgaagaatgcagcagccaatgacaagctgaaaaagatggtgaaagaccagcaggaggctgaaaagaagaaggttatgagccaagaaatccaggaacagctgcataagcagcaggaggtaattgcagacaaacagatgagtgtcaaagaagatcttgataaggtggaacctgccgtcattgaggcccagaatgctgtgaagtcgatcaagaagcagcacctggtggaggtgaggtccatggccaaccctcctgctgctgtgaagctggcgctggagtccatctgcctgctgctgggggaaagcaccacagactggaagcagatccgctccatcatcatgcgggagaacttcatccccaccatcgtcaacttctctgcagaggagatcagtgacgccataagggagaagatgaagaaaaattacatgtccaatccaagttacaattatgaaattgtgaatcgggcttccctggcttgcggccctatggtgaaatgggcaattgcacagcttaactatgcagacatgttaaagagagtggagcccctacgcaatgagctgcagaagctggaagatgacgccaaggacaaccagcagaaggccaacgaggtggagcagatgatccgagacctggaagccagcatcgcccgctacaaggaggaatacgccgtcctgatctcagaggcccaggccatcaaggcagacctggcagctgtcgaggcaaaagtaaaccggagcactgctcttctgaagagcttgtctgctgaacgtgaacgatgggaaaaaacaagtgaaactttcaaaaaccagatgtccaccattgctggggactgtctcttgtcagctgcgttcattgcctacgcgggttactttgaccagcagatgcgtcagaacttgttcactacctggtcccatcacctacagcaagccaacatccagttccgtacagatattgccaggacggaatacctttccaatgctgatgagcgtcttcgctggcaggccagctccttgcctgctgatgacctttgcacagaaaatgccatcatgctgaaacgattcaataggtatccgctgatcattgacccctctggacaggccacagaattcattatgaatgaatataaggatcgtaagatcacacggaccagcttcctggatgacgccttcagaaagaacttagagagtgcactgagattcggtaacccccttctggtccaggatgtggaaagctacgatccagttttgaacccggtgctgaaccgtgaagtgcggcgaacaggggggagagtgctgatcactctcggggaccaggacatagacctgtcgccatcgtttgtcatcttcctgtccacccgggatccaactgtcgagttcccaccagatctctgttcccgggttacttttgtaaacttcacagttacccgtagcagtttacaaagccagtgtctaaatgaagtacttaaagcagaaagacctgatgtggacgagaaacgatctgatcttcttaacttcaaggggaatttcagctccgtttgcgtcagctggaaaaatctctactacaagctctgaacgaggtgaaagggcgcattttggatgacgacacgatcataaccactctggagaacctgaagagagaggctgcagaggtcaccaggaaagttgaggagacggacattgtcatgcaggaggtggagaccgtgtcccagcagtacctcccgctctccaccgcctgcagcagcatctacttcaccatggagtccctcaagcagatacacttcttgtaccagtactccctccagtttttcctggacatttatcacaacgtcctatacgagaacccgaacctgaagggtgtcaccgaccacacacagcgcctgtccattataacaaaggacctcttccaggtggcgtttaaccgagtggctcgaggcatgctgcatcaggaccacattacctttgccatgctgctggcaagaatcaaactgaagggcaccgtgggggagcccacctacgatgcagaattccagcacttcttgagaggaaatgagattgtcctgagtgctggctccacccccaggatccagggcctgactgtggagcaggcggaggcggtggtgaggctgagctgccttcccgcgtttaaggacttgattgcaaaggttcaggcagacgagcaatttggcatctggctggacagcagctccccggagcagactgtgccctacctctggagtgaagaaacaccctgcaacacccattggccaggccatccaccgcctgctcctgatccaggctttccggcccgatcgcctgttggccatggcccacatgtttgtttcaacaaaccttggggagtctttcatgtccatcatggagcagccgctcgacctgacccacattgtgggcacagaggtgaagcccaacactcctgtcttaatgtgctctgtgcctggttatgatgccagtggacatgtcgaggaccttgcagccgagcagaacacgcagatcacttcaattgcaatcggctctgcagaaggctttaaccaagcagataaggcaataaacaccgctgtaaagtcgggcaggtgggtgatgctgaagaatgtgcatctggccccagggtggctgatgcagctggagaagaagttgcattccctgcagccgcatgcctgcttccgactcttcctcaccatggagatcaaccccaaggtgcctgtgaatctgctccgtgcgggccgcatctttgtgttcgagccaccgccaggggtgaaggccaacatgctgaggacgttcagcagcattcccgtctcacggatatgcaagtctcccaacgagcgtgcccgcttgtacttcctgctgggcctggtttcatgcgatcatccaagaacgcttacgatacgcaccactggggtggtcaaagaagtatgaatttggagagtctgacctgcggtcagcttgcgatacggtggacacgtggctggatgacacggccaagggcagggcagaacatctcaccggataagatcccgtggtctgcactaaagaccttaatggcccagtccatttatggcgggcgcgtggacaacgagtttgaccagcgtctgctcaacaccttcctggagcgcctgttcacaaccaggagtttcgacagtgagtttaagctggcatgcaaggtcgacggacataaagacattcaaatgccagatggcatcaggcgagaggagtttgtgcagtgggtggagttgctccccgacacccagacgccctcctggctgggcctgcccaacaacgccgagagagtcctccttaccacacagggtgtggacatgatcagtaaaatgctgaagatgcagatgttggaggatgaggacgacctggcctacgcagagaccgagaagaagacgaggacagactccacgtccgacgggcgccctgcctggatgcggacactgcacaccaccgcgtccaactggctgcacctcatcccccagacgctgagccacctcaagcgcaccgtggagaatatcaaggatcctttgttcaggttctttgagagagaagtgaagatgggcgcaaagctgcttcaggacgttcgccaggaccttgcagatgtcgtccaggtgtgcgaaggaaagaagaagcagaccaactacttgcgcacgttgattcaacgagctagtgaaagggatcttgcctcggagctggtcccactacacggtgcctgccggcatgaccgtcatccagtgggtgtccgacttcagcgagaggatcaaacagctgcagaacatctcactggcagctgcatctggtggcgccaaggagctaaagaacatccacgtgtgcctgggtggcctgttcgtgcctgaggcgtacatcactgccaccaggcagtatgtggcccaggccaacagctggtccctggaggagctctgcctggaagtcaacgtcaccacctcacagggcgccacccttgacgcttgcagcttcggagtcacgggtttgaaacttcaaggggccacgtgcaacaacaacaagctgtcactgtccaatgccatctcaaccgcccttcccctgacgcagctgcgctggggtcaagcagacaaacaccgagaagaaggccagtgtggtaaccttacctgtctacctgaacttcacccgtgcagacctcatcttcaccgtggacttcgaaattgctacaaaggaggatcctcgcagcttctacgagcggggtgtcgcagtcttgtgcacagagtaaacttttctagctgcccctttctgtaatagtgaaagttggtatttaacatttattcatttttaaaatatttggaaggtctgagcttgtgaaaagaaagtggttggtctgaggttggaggaagctgaatggaatctgacggttgggagtggtggaaattggaaggataccaggaggtatttgggaaggccagtggcgtggctcctttgaggaaataaaacactaagcatg

SEQ ID NO: 45984 - DNA, 1513 bp, Homo sapiens
ttgacatgattacgaatttaatacgactcactatagggaatttggccctcgaggccaagaattcggcacgagcgccgccgaggattcagcagcctcccccttgagccccctcgcttcccgacgttccgttcccccctgcccgccttctcccgccaccgccgccgccgccttccgcaggccgtttccaccgaggaaaaggaatcgtatcgtatgtccgctatccagaacctccactctttcgacccctttgctgatgcaagtaagggtgatgacctgcttcctgctggcactgaggattatatccatataagaattcaacagagaaacggcaggaagacccttactactgtccaagggatcgctgatgattacggataaaaagaaactagtgaaggcgtttaagaaaaagtttgcctgcaatggtactgtaattgagcatccggaatatgggagaagtaattcagcttacagggtgaccaacgcaagaacatatgcccagttcctcgtagagattggactggctaaggacgatcagctgaaggttcatgggttttaagtgcttgtggctcactgaagcttaagtgaggatttccttgcaatgagtagaatttcccttctctcccttgtcacaggtttaaaaacctcacagcttgtataatgtaaccatttggggtccgcttttaacttggactagtgtaactccttcatgcaataaactgaaaagagccatgctgtctagtcttgaagtccctcatttaaacagaggtcaagcaataggcgcctggcagtgtcaagcctgaaaccaagcaataccgtcatgtttcagccaagcccagagccctaagattacaaacaactatggccggaacctcctcagctctccctctgcagagttccctaccctaagagaatgttaccacctgaacagtcctcggtgaatctgagaggagaggatggggtaaggcagaagcaccagctgtactactagaagggagcttttggtggtagatcccctggtgtctccaacctgactaggtggacagagctcaaagaggccctcttaccgctagcgaggtgataggacatctggcttgccacaaaggtctgttcgaccagacatatcctagctaagggatgtccaaacatcagaatgtgaggccaaccttctatcagagttaaacttttgacaagggaacaaatctcaaactgatccatcagtcatgtagctagctgtagagcttgcaacttaatagcagcagctgcccaatgccatgtgaagtaacaaactggtttttggtttttttttccccttcagttttaatgttatgtgtaatgtatttaaacccttatttaaataaaacttgttttcagaaatacctgacttgcacattatttatatatagtcgatcttgggcatataaaggaaccatagaaatgggcagtggaggattcgtccacacccacagcttctcaacgggcctgaatttggccaagaaaaacctttatgagcttg

SEQ ID NO: 45985 - DNA, 1895 bp, Homo sapiens
cggcacgaggcggcacgaggcatttctgactgaagaagctctaaaagtgaagagacctcgttttgatgtatcgctggtttatttaactcgaaaatttatggatcttgtcagatctgctcccgggggtattcttgacttaaacaaggttgcaacgaaactgggagtccgaaagcggagagtgtatgacatcaccaatgtcttagatggaatcgacctcgttgaaaagaaatccaagaaccatattagatggataggatctgatcttagcaattttggagcagttccccaacaaaagaagctacaggaggaactttctgacttatcagcaatggaagatgctttggatgagttaattaaggattgtgctcagcagctgtttgagttaacagatgacaaagaaaatgaaagactagcatatgtgacctatcaagacattcatagcattcaggccttccatgaacagatcgtcattgcagttaaagctccagcagaaaccagattggatgttccagctcccagagaagtaggactctatcacagtgcacataaggagcaccaacggacctatcgatgtctatttgtgtgaagtggagcagggtcagaccagtaacaaaaggtctgaaggtgtcgggacctcttcatctgagagcactcatccagaaggccctgaggaagaagaaaatcctcagcaaagtgaagaattgcttgaagtaagcaactgatggcatttgagaatttatgtatcactgagttttttgggaatatcttcgtggagaattacgcatcaaatttgattctcagagcaataaattatccatgaagtgctctcgttctcagtagcggcatcatggccagtagtgtctttgaggagtttcaccacttagattactgagtaattgtgggtttccacatttgaaaacaactccttttataattattcactgctttttgtcagtgaaatagacatcttgcctcctgaagtagcttcatcacagagtgtcatgaagacagacagtcaggctgaaatggacagttctttgtggactctacccttcccttcaaggagtatgtcatatatcacaaaagaaattgccttacactggttcatgtttgccagttacctgttgtacattgcatagatgtacacacgaatttaaatgtgatgtctttgtatatatctgtataatgttgagattacttacgaaatatgtctgagtgacacttttcacccttgtacagccaaaataatgtatatatggaaagtgacagacaaattctctaatctctttggtatctataacttattagaatcctctggatgagggttagaagagactttttccaaacttctacatgtagaagtatcataaatgtgctacacatttatgtttgtggatttaattaaagtattttaatatggttttcagtgctaaaattggagtcagatacttcttggttttaagctgtctacctaattgctgtctcccagcagactggtggcatgcccagtggctttgggggcaaggatagaaatgccatcaggaaatagctgaattcattgtgaaacatgaattcagtcatggtgataattggaaactcctttcaggtttttgcaagtagattttgtaatgtttgtgtatgcagccttgctgttgagtcagtccaaggggttttacttaggacaagttgtaccttgccctctctccagctctgctcccacattttcacatacctagctgtttctacctcgattgggtaagtcatttaccactctgtgcctcagtttactctgtagtttaccattagactgtgagctccttgagggactttgtcataatcactgttacatcccagtgcctcacaccatgcctggcccttaagaagtgctcaataaa

SEQ ID NO: 45986 - DNA, 450 bp, Homo sapiens
  misc_feature (1)...(450): n = a,t,c or g
gagtccttgaanccctattcntgatccnaatttaatacgactcactatagggaatttggccctcnaggccaagaattcggcacgaggatctccatttggaatccattaattcatgaggttttgcctcattccacacagcttccatatctgaagtgtttagtggagcaaaaattgtaccataaacttgtgtttactcttttcattcggatcatagtcaaagggctgtagcattactgaaacagtcacagttgaccctgggtcaataattccactgttgggcctcacacagtaccggtgaggcacggtagtcttcactttgagacacacttttctatccgatggatttcgcaatttaagatttgtagtgactacatctgtgaaggggcctttgaatttgaggtctatgggcgggtcgaggaccacgatctgctcgngcttnccgtggccccg

SEQ ID NO: 45987 - DNA, 1255 bp, Homo sapiens
gtggggaaccgaggggcaaccaggggaagatggggtgctggaggagagcttgtgggagccaaggagcaccttggacatctggagtctggcaggagtgatgacgggtggaggggctagctcgaggcagggctggtggggcctgaggccagtgaggagtgtggagtaggcgcccaggcatcgtgcagacagggcgacatcagctggggacgatgggcctgagctagggctggaaagaagggggagccaggcattcatcccggtcacttttggttacaggacgtggcagctgccgaaggccaagacgccaggtccggtggacgtgacaagcaggacatgacatggtccggtgtgacggcgaggacagaggaggcgccgtccggccttcctgaacaccttaggctggtggggctgcggcaagaagcgggtctgtttctttacttcctccacggagtcggcacactatggctgccctctgggctcccagaacccacaacatgaaagaaatggtgctacccagctcaagcctgggcctttgaatccggacacaaaaccctctagcttggaaatgaatatgctgcactttacaaccactgcactacctgactcaggaatcggctctggaaggtgaagctagaggaaccagacctcatcagcccaacatcaaagacaccatcggaacagcagcgcccgcagcacccaccccgcaccggcgactccatcttcatggccaacccctgcggcggacggttgaccaccagccaccacatcatcccagagctgagctcctccagcgggatgacgccgtccccaccacctccctcttcttctttttcatccttctgtctctttgtttctgagctttcctgtctttccttttttctgagagattcaaagcctccacgactctgtttcccccgtcccttctgaatttaatttgcactaagtcatttgcactggttggagttgtggagacggccttgagtctcagtacgagtgtgcgtgagtgtgagccaccttggcaagtgcctgtgcagggcccggccgccctccatctgggccgggtgactgggcgccggctgtgtgcccgaggcctcaccctgccctcgcctagtctggaagctccgaccgacatcacggagcagccttcaagcattccattacgccccatctcgctctgtgcccctccccaccagggcttcagcaggagccctggactcatcatcaataaacactgttacagcaaaaaaaaaaaaaa

SEQ ID NO: 45988 - DNA, 1112 bp, Homo sapiens
atttgagcaattttctcgacttgtcgacattcgttattaactgagcaggaatcaggagaggaacccggtcctctccacacagcccagcagagagcctacgactagatttgcatctttacgtcctgcgcggaggctgctacacacatgcagaagtcatgctggtggcctggacagtgaagggagagaagtggatttgggagacatttaggagatggcaccgaaagcgaaggaagctcctgctcctcctaaagccgaagccaaagcgaaggctttaaaggccaagaaggcagtgttgaaaggtgtccgcagccacacgcaaaaaagaagatccgcatgtcactcaccttcaggcggcccaagacactgcgactccggaggcagcccagatatcctcggaagagcacccccaggagaaacaagcttggccactatgctatcatcaagtttccgctgaccactgagtcggccgtgaagaagatagaagaaaacaacacgcttgtgttcactgtggatgttaaagccaacaagcaccagatcagacaggctgtgaagaagctctatgacagtgatgtggccaaggtcaccaccctgatttgtcctgataaagagaagaaggcatatgttcgacttgctcctgattatgatgctttcgatgttgtaacaaaattgggatcacctaaactgagtccagctggctaactctaaatatatgtgtatcttttcagcataaaaaaataatgtttttcataagaatgacaacttaattagaatcaaatctataagctttaagattttacgtttctagtaagtataatattagcttatttgactagaactcaagcagaataggaatttatgcttgttttatattcaataatgataattttgaagatatagttgttttattacaccaaaaatactatattaatcttatttaactaagttttatccaaatcatgttaacttaagaaacatttgatcagttcctatatttctaggagtttggtgaatatttatttataaatgcttatttttttccaagccaagttaggaatagagcacttttaggagggtttccataaatggaattttgtaatggctctctgggagtt

SEQ ID NO: 45989 - DNA, 884 bp, Homo sapiens
tttttttttttcattttcctccaaacagatttattgaatacagcaaaattctatatacaaagtgacctggacctgctgcttcaaaacatgatcctttcttactaatatcttgatagtcggtccatagagcattagaaagcaattgactcttaaataaacagaaaagtgcctaatgcacattaaatgaatgggcctaactactggaactttagtagttctataaggtaattaacataggtaggatccagttcctatgacaggctgctgaagaacagatatgagcatcaagaggccattttgtgcacttgccacccgtgatgccatcgtgtttctggatcataatgttccccattatctgattctagacacaccacagggaatatcagtggggtcagaggttagcttagctgcttgctgggctagaacagatatcactccagcatgctcatctgacagggtcccgcggcaacccagattaagtccttgtgaatctgtgcacaggactccaacaatggagggattcttcattgtgtcttccaagtgctgctccaaggtcgcctccatcccacccaccgaccactccggctcagaacccagcggcacggcacgtccttctccaccacaggcctcagtcacttgacgcgagcggggcgtggaccgtaacggcgcctccaaagggacaaaattgatcacggtgcaacgtccgcgttctttactggaaaacatcactgcgcttccgtcgcacagagcctgacgaaggcttgggctccccgcgcggtgaccgtcgaggtgacctgcacctggctccatggcggaaccggccggcacggattattcccctctcgggagaggtctgcagccgggcctcagtgcttcagttcgtg

SEQ ID NO: 45990 - DNA, 896 bp, Homo sapiens; identical to SEQ ID NO: 13524

SEQ ID NO: 45991 - DNA, 433 bp, Homo sapiens
  misc_feature (1)...(433): n = a,t,c or g
gccaaaatcacagaacagaatttcatagcccaggctgccgtgttgtttgactcagaaggcccttctacttcaagttttgaatccacaaagaattaaaaactggtaacaccacaggctttctgaccatccattcgttgggttttgcatttgacccaaccctctgcctacctgaggagctttctttggaaaccaggatggaaaccttactttnctttcntccattcattggctttntgtgtgcaagntgactgggaaagggatttgnatacctnngtgtnngcccttnttgnctgccnananaanggtcgttggangngntccttggnctacggtaatgccagngcctgggaaggccctggttacttancangtntttggtntncngnggccccagtncctggaaangccccgttnnttannananncngaaggg

SEQ ID NO: 45992 - DNA, 683 bp, Homo sapiens
cgatgtataaatgaaagaaattgagatggtgcacgatgcacagttgaagtgaacttgcggggtttttcagtatctacgattcatagatctggaattcgcggccgcgtcgacctcggctttgacagagtgcaagacgatgacttgcaaaatgtcgcagctggaacgcaacatagagaccatcatcaacaccttccaccaatactctgtgaagctggggcacccagacaccctgaaccagggggaattcaaagagctggtgcgaaaagatctgcaaaattttctcaagaaggagaataagaatgaaaaggtcatagaacacatcatggaggacctggacacaaatgcagacaagcagctgagcttcgaggagttcatcatgctgatggcgaggctaacctgggcctcccacgagaagatgcacgagggtgacgagggccctggccaccaccataagccaggcctcggggagggcaccccctaagaccacagtggccaagatcacagtggccacggccacggccacagtcatggtggccacggccacagccactaatcaggaggccaggccaccctgcctctacccaaccagggccccggggcctgttatgtcaaactgtcttggctgtggggctaggggctggggccaaataaagtctcttcctccaagtcaaaaaaaaaaaaaa

SEQ ID NO: 45993 - DNA, 1658 bp, Homo sapiens
gagattatcccagttcaccccctcttgtgaatctagagacaactggtggtcatagcgtgcgattcaatccaaacctttataatgatggcaaggtttgtttaagcatcttaaacacgtggcatggaagaccagaagagaagtggaatcctcagacctcaagctttttgcaagtgttggtgtctgtccagtcccttatattagtagctgagccttattttaatgaaccgggatatgaacggtctagaggcactcccagtggcacacagagttctcgagaatatgatggaaacattcgacaagcaacagttaagtggggcaatgctagaacaaatcagaaacccttcaccatgttttaaagaggtaatacacaaacatttttacttgaaaagagttgagataatggcccaatgtgaggagtggattgcggatatccagcagtacagcagtgataagcgggtaggcaggactatgtctcaccatgcagcagctctcaagcgtcacactgctcagctccgcgaagagttgctgaaacttccctgccctgaaggcttggatcctgacactgacgatgccccagaggtgtgcagagccacaacaggtgctgaggagactctaatgcatgatcaggttaaacccagcagcagcaaagaactccccagtgacttccagttatgagctgcattgatgtggacttcatagacacaaaggcttcgaagcacaagccaaatatgtcaatatttgtatgtaagaaactaattatgtaataggtaatgaaactgaaactatactatgcccttaaggagatccagtttaattcaaggtgatcttttatttacctgtacaggagtgtaaacttttttgtgcttttatttttcaattgtgagaaccactgattggtatgttcaacaaatttgtgtatacaaagaaatggataaatcactgctatataagggaaactaccttaggaaagaatgtttactgaatgtttattttattttattttttttttactatagagtgaggggttgttaacaaagaatatatattggtcattcttacaactactatttaaagtcagcaacttttcactgaatttgatagattttatgtttggccatatcttcatgctcacatttgatttctgaagacctcctacatacacttcaataaaagttaaatggacatactccctcttttttgatttactggtacatttttaaaataataaatctgccataaaatgcattatatctggagacttgcacttgtatggatgaatttattacattcaacatatttaattttatgccttctaattctaagatgcagaaaaaaataaatgaacatgattttattctatgccaacatttgggcctctgaatgtatctgttatttgaatttaagtatttgaaaaggaatggtcaatttgaaagtcattctaaactgattttttttttctaaagggctccttttttcctggactatgtggttttatgactaaagtcacatgtatgtattaaacattgaggctctgtagaggagagaggatgtacctctctggtgctgttacagtacattctgtacctgccatacaggctcattttcatgcaaattcttcctagagccaaataaataaagacttaggtgaaaaaaaaaaa

SEQ ID NO: 45994 - DNA, 1755 bp, Homo sapiens
  misc_feature (1)...(1755): n = a,t,c or g
tccccaatcccccaaccccccttccttggtcttgtccttggtggctaagacttagctctgcaggggatgttaaaagcacagttaagtaggacgtggctcctgcacagccccaaaaaccagcttactcccttaagcccagggtgtgaggccctcgactatattccttcaaaatgtacttaggctctggttactgggatggccagtagatgtaatgcagatggttggagtttggggagggttaggaggcatcaagcaggacaaggtgctgctgagttcagagggcccacgttcaagggatggaggtggaacctggagaccgactcttaaaagcacagtccgtggttgggtgtggtggctcatgcctgtaagtaagtctcagccctttggaggccacagcagaaggattgcttgagcccaggtactcaaannnnnnnnnnnnnnnnnnnnnnnnnnnnnnnnnnnnnnntcagccttactgtgaagcctccaaggctgctcgcaggcagctgtggctctcgggaagggaggctgctttgcccagcagggaacatttggggcagggggtaaattttgccagtttgagcatcatgaggtgtaacaagaaatgggttgaatgggccaaatgcaaggagtgcatctctgggctgcaaactgacttgagtgctgcactattgctattccgtgcaaacaaaactcagcttttcctgactcagttccttgacttagtggcctttacaaaaaaagttgagtagtgtgtggcctgctgtcgcacagccccctagttagcttcatggtttctcagcttcagacccctccagcccacagaggagcccatggagggacccacttcccttggtccagacagctgggagtgggttaggcccactgctgttttgagcagggccacttgctccatttcactgaaggctttgctgggtgaaaacacttcagcatctcctcctcaggtcaacccataaagaccaggtccagcaccgtggtcttggcacatccctggcctcaggccctcacctaacagtgaggcagcagctgcccagccccgcaatgtgcctgctgtcaggcagctcttgcctgaaacttacttccacattctttcctgatgggcaggtggctgaaggcccagccatcagtgtcgcttgttgccaccccgtgcctcccttggcctctctgagctttgcccagaagaccaacaatcatacataccctaactgggacaccactctgcagaatgcagatgatccattctggaggaagctgtcccttgagctcagtgagctcccaggcaagcagggcatctggccgacttccctcacaacagctgctcccacatcccctcggactggagcttcagccctgactgaggtgggcagacctaagacctgagaccacaagattagctcagtgtctaccaagcatctagccactgtccagggccagagcataccacgtctgcagtgcctgtgagcagagccagcagttgccctgtgactgtaaccaccaaattgtccaaacacccgctgcagttagcaagaagggtaggcttcaccctcctttactgaggagaatgatgcggaggagtttcctctccagggctaggcaaggcaggcgagcagccagaagccgggtgcccacagggcagggacaggaaggctgtgctgctactggctgctcacttctcatcaacctaccctntgaccactaaccaaaccttgnctcttgctgtntcgntgntttaca

SEQ ID NO: 45995 - DNA, 2229 bp, Homo sapiens
gcgcggcgccggtgagctgaggccaggccccgtggctcatgcctgtaatcccagcactttgggaggccgaggtgggcggatcacttgaggtcaggagttcgagaccagcctggccaacatggcgaaaccccgtctctactaaaaatacagagactagccgggtgtggtggtgggtgcctataatcccagctacttgggagactgaggcgggagaatcgcttgaaccagggaggtagaggctgcagtgggccgagatcgcgccactgcactccagcctgggtgacagatagagactctgtctcaaaaataaaacaaaacaaacactttccacccatggacaccgtcatgtctaagtcagagtctcctaaagagcccgaacagctgaggaagctcttcattggagggttgagctttgaaacaactgatgagagcctgaggagccattttgagcaatggggaacgctcacggactgtgtggtaatgagagatccaaacaccaagcgctccaggggctttgggtttgtcacatatgccactgtggaggaggtggatgcagctatgaatgcaaggccacacaaggtggattggaagagttgtggaaccaaagagagctgtctccagagaagattctcaaagaccaggtgcccacttaactgtgaaaaagatatttgttggtggcattaaagaagacactgaagaacatcacctaagagattattttgaacagtatggaaaaattgaagtgattgaaatcatgactgaccgaggcagtggcaagaaaagggggctttgcttttgtaacctttgaccgaccatgactccgtggataagattgtcattcagaaataccatactgtgaatggccacaactgtgaagttagaaaagccctgtcaaagcaagagatggctagtgcttcatccagccaaagaggtcgaagtggttctggaaactttggtggtggtcgtggaggtggtttcggtgggaatgacaacttcggtcgtggaggaaacttcagtggtcgtggtggctttggtggcagccgtggtggtggtggatatggtggcagtggggatggctataatggatttggtaatgatggaagcaattttggaggtggtggaagctacaatgattttgggaattacaacaatcagtcttcaaattttggacccatgaagggaggaaattttggaggcagaagctctggcccctatggcggtggaggccaatactttgcaaaaccacgaaacccaaggtggctatggcggttccagcagcagcagtagctatggcagtggcagaagattttaattaggaaaccaaagcttagcaggagaggagagccagagaagtgacagggaagctacaggttacaacagatttgtgaactcagccaagcacagtggtggcagggcctagctgctacaaagaagacatgttttagacaaatactcatgtgtatgggcaaaaaactcgaggactgtatttgtgactaattgtataacaggttattttagtttctgttctgtggaaagtgtaaagcattccaacaaagggttttaatgtagatttttttttttttgcaccccatgctgttgattgctaaatgtaacagtctgatcgtgacgctgaataaatgtcttttttttaatgtgctgtgtaaagttagtctactcttaagccatcttggtaaatttccccaacagtgtgaagttagaattccttcagggtgatgccaggttctatttggaatttatatacaacctgcttgggtggagaagccattgtcttcggaaaccttggtgtagttgaactgatagttactgttgtgacctgaagttcaccattaaaagggattacccaagcaaaatcatggaatggttataaaagtgattgttggcacatcctatgcaatatatctaaattgaataatggtaccagataaaattatagatgggaatgaagcttgtgtatccattatcatgtgtaatcaataaacgatttaattctcttgaatgaaatgacaactgtatggatttgggactggcagagatttggactttccctacccactccccctgataataatgttgaatgcttctatcacaattcaagttcaaagctctgccaggggaattaggaacctaagctgctggctaatgccgctccataaatcccgcagatttgaaagtgtctgggaaggcccttttaaaaatacccaatttccg

SEQ ID NO: 45996 - DNA, 435 bp, Homo sapiens
  misc_feature (1)...(435): n = a,t,c or g
ttgaanaccgcttgactgattacgaatttaatacgactcactatagggaatttggccctcgaggccaagaattcggcacgaggtcgcgggcaagcatggcgtgggccgtattgacatcgtggagaaccgcttcattggaatgaagtcccgagcctttccccttgcccgtgagccctccggaggctgcctgggagggtggcagccaggaagccggtgctgggggctcaggaagaggagggttctgcctggcctctgcccaccagacattctctgctcccggtggcactggcctcattttcctggggacacctgtgatgggccagtagctggaggaccttggacaagtcacagctcttcctcgagccctgaaccccacctgcgccctcccctctctggactgatgggaggcgatgctgtggcctcgaatgttctcga

SEQ ID NO: 45997 - DNA, 440 bp, Homo sapiens; identical to SEQ ID NO: 13624
  misc_feature (1)...(440): n = a,t,c or g

SEQ ID NO: 45998 - DNA, 1954 bp, Homo sapiens
  misc_feature (1)...(1954): n = a,t,c or g
ccagttgctgccctgagaagagaagacaacctccatctatttattgcttcctgagaactgacctggatgcggccctctgcagggccagttcttcagtcctgtggtccctggactggtgggaacctgaactaggagtcctgggagagctgtggtgggaatatgggctggcactgctgcagggcaagaacattcatgtaggagcccgaggaccagcaggctgggaatggggagcaagtcacgtcagctctgtcattccccacagttaacaaatttggcggggtnggaagtcctgagtgctccgtccctcttagcattcactcctgagctgcgggagaggtnggcccagagaacagcagagtcagttacacctgcagctcttgtctaaagtgattagatggccaccctcaccactgtccagtccagcagcagcctggctgccttgtcatggcctcctgggggcagaaggcgatgtggaccacgggatttgtagccagccagctcccaggccaacgcccaaagccctgatgacctggttcttctgaggccctcaacctggcatcttagggtatggtcaggcaacagggtgaccagctgtcctggtttcccaggacatggaactttcaatgctaaaactgggacattacccagcaagtggggatggttggtcccctaccagggagagggcctggggctcttgcttcccgagaacgcctgtggcttgaagaaccttgactgcttggtcctcaggtatctacctcccaccttctcctcatctgtggagcaagccaactcagtgccccagaccccacctgatctgcatctttgtttgcatctccagagacacctgaggccccagagcttgaggcaaagccaggccgtccaaatcctgtgtgccgtggacgagtggccactttactactcctaaggctaagatgttgagagctcagaccactgctcagagcagtaatccctgctcagaatgctcccagttccctcgtccctgcccaggtctcttgtctcttgggaaggaactgataggtcgggccattgttgggccatcactgagcgctcagtatctcaagagactctgttcattctgctcgtatcccaaggcctggttggtcaaactctgggcaaagggttttcaggatgaggaggtcaagacaggatgtccagagctaccgagttcatctgtgggtgttgggggcaagtgggggctgaagtcctgtgcaggctgcgctggccccacctgccttgtgccctggagtggggtttctccttgttgaagaagaggcatccttctctgatgtgcacaaacacaatgtatgaccagagccttgcaactcaaagtgtggtctgtggacaagcagcggcagtaccaccctgggagcctgttaaggaatgcagagtctaaggcctcaacccaaaacctcccgactcagaccctgcattttagcaagacccccagctgattcctataagcactttagagtttgagaagcaaggacctaggctggggatgtcctccgagcagagggtgaagtttctctcagttctctccctgccacttccagggatctgagcctgtgttcagcctcctccctaacccaccctgggagacacttggcctgttagattgttccagagtctgcatggcactcctgaagaagggagtgtgacctgcagtcaccaggagatgagggttaggtgtgcccagccctccagacccggcctttctggttaacccctgcatgccaagctgcctgctgccccaggtcctcacctcaggcctttgaaggggcagcttctggaagttgttttctcctctgcttggagagtttgcccttgtctgtcttggaaagtgtgggcagccacagatgcccccaaatcagagctcacagtgagtgagcccctaagcttcagtctgcaataaagaatgcattggtttcaaaaa

SEQ ID NO: 45999 - DNA, 1608 bp, Homo sapiens
gtcggcttgtcaggtggtggaggaaaaggcgctccgtcatggggatccagacgagccccgtcctgctggcctccctgggggtggggctggtcactctgctcggcctggctgtgggctcctacttggttcggaggtcccgccggcctcaggtcactctcctggaccccaatgaaaagtacctgctacgactgctagacaagacgactgtgagccacaacaccaagaggttccgctttgccctgcccaccgcccaccacactctggggctgcctgtgggcaaacatatctacctctccacccgaattgatggcagcctggtcatcaggccatacactcctgtcaccagtgatgaggatcaaggctatgtggatcttgtcatcaaggtctacctgaagggtgttgcaccccaaatttcctgagggagggaagatgtctcagtacctggatagcctgaaggttggggatgtggtggagtttcgggggccaagcgggttgctcacttacactggaaaagggcattttaacattcagcccaacaagaaatctccaccagaaccccgagtggcgaagaaactgggaatgattgccggcgggacaggaatcaccccaatgctacagctgatccgggccatcctgaaagtccctgaagatccaacccagtgctttctgctttttgccaaccagacagaaaaggatatcatcttgcgggaggacttagaggaactgcaggcccgctatcccaatcgctttaagctctggttcactctggatcatcccccaaaagattgggcctacagcaagggctttgtgactgccgacatgatccgggaacacctgcccgctccaggggatgatgtgctggtactgctttgtgggccacccccaatggtgcagctggcctgccatcccaacttggacaaactgggctactcacaaaagatgcgattcacctactgagcatcctccagcttccctggtgctgttcgctgcagttgttccccatcagtactcaagcactataagccttagattcctttcctcagagtttcaggttttttcagttacatctagagctgaaatctggatagtacctgcaggaacaatattcctgtagccatggaagagggccaaggctcagtcactccttggatggcctcctaaatctccccgtggcaacaggtccaggagaggcccatggagcagtctcttccatggagtaagaaggaagggagcatgtacgcttggtccaagattggctagttccttgatagcatcttactctcaccttctttgtgtctgtgatgaaaggaacagtctgtgcaatgggttttacttaaacttcactgttcaacctatgagcaaatctgtatgtgtgagtataagttgagcatagcatacttccagaggtggtcttatggagatggcaagaaaggaggaaatgatttcttcagatctcaaaggagtctgaaatatcatatttctgtgtgtgtctctctcagcccctgcccaggctagagggaaacagctactgataatcgaaaactgctgtttgtggcaggaacccctggctgtgcaaactaaaggggctgaggcccctgtgtgatattg

SEQ ID NO: 46000 - DNA, 5683 bp, Homo sapiens
ccgcccccggcctcccgcccttccccttcccgcccgctccccttttcccctcagtcgcctcgcgcctgcagtttttggctttcacccccaaccagtgaccaaagacttgaccactcaaagtccagctccccagaacactgctcgacatggacaccggtgtgattgaaggtggattaaatgtcactctcaccatccggctacttatgcatggaaaggaagttggcagtatcatcggaaagaaaggagaatcagttaagaagatgcgcgaggagagtggtgcacgtatcaacatctcagaagggaattgtcctgagagaattatcactttggctggacccactaatgccatcttcaaagcctttgctatgatcattgacaaactggaagaggacataagcagctctatgaccaatagcacagctgccagtagacccccggtcaccctgaggctggtggtccctgctagtcagtgtggctctctcattggaaaaggtggatgcaagatcaaggaaatacgagagagtacaggggctcaggtccaggtggcaggggatatgctacccaacttcaactgagcgggccatcactattgctggcattccacaatccatcattgagtgtgtcaaacagatctgcgtggtcatgttggagactctctcccagtcccccccgaagggcgtgaccatcccgtaccggcccaagccgtccagctctccggtcatctttgcaggtggtcaggacaggtacagcacaggcagcgacagtgcgagctttccccacaccaccccgtccatgtgcctcaaccctgacctggagggaccacctctagaggcctataccattcaaggacagtatgccattccacagccagatttgaccaagctgcaccagttggcaatgcaacagtctcattttcccatgacgcatggcaacaccggattcagtggcattgaatccagctctccagaggtgaaaggctattgggcaggtttgggatgcatctgctcagactacttctcatggaactcaccattccaaacgatttgattggctgcataatcggggcgtcaaggcgccaaaatcaatgagatccgtcagatgtctggggcgcagatcaaaattgcgaacccagtggaaggatctactgataggcaggttaccatcactggatctgctgccagcattagcctggctcaatatctaatcaatgtcaggctttcctcggagacgggtggcatggggagcagctagaacaatgcagattcatccataatccctttctgctgttcaccaccacccatgatccatctgtgtagtttctgaacagtcagcgattccaggttttaaatagtttgtaaattttcagtttctacacactttatcatccactcgtgattttttaattaaagcgttttaattcctttctctgttcagctgttgatgctgagatccatatttagttttataagcttctccctggttttttttttttttggttttttttttttggctcatgaatttttctgtttgtcatggaaatgtaagagtggaatattaatacatttcagtttagttctgtaatgtcaggaatttttcaaaaaaattaaaagatggactggagctttttctttgtgaatagaaactggatgccacagtgattcatgtgggttttattcctcttgtcttgctgttatttttgtaccttttatccctcaaaggacccttcttgggttttgaatggaagcctttattccggttaagatgttttcttctattttaccacttccatctttttttgtggccctcgatcctatttttccctgactccatgcttggttggcccttataaaacttgtgcccaaaagattgaggattagactttccgaggacttacctgtcctaggggagtaggcaagcacttccactagggagggggtgggggaaaggaatgacacatgacatacatggcatacacattaagcagttgatcatatgtctgactgggttccagtttcttgggaatgttggtccccttgttcaggcttgcatattttaaactaaaaatttcagtctattgtttttagtaacttcatttatagtcctccataacaagttagaaggatgtatctgctaccatttattcctataattttagaaagttggggcttgacattatactcatttagtgagagtagatgcaaaaaagtggaggggcaggagaacttctccagacacctcagataaagtccggagcccaaggctttatcttaaccatgtatggtaccccattcattcatcaagaaaaccctcaacagctgggcctgcatggagtgttatatttcaaggtttttcacaggggttacagtaggacagtccccaccccaatcaggcaccaggataaaagcagggacttaaacagcaccccggttcttcagcctgagccatcacatgctatcagtctcctaacctccccctgggccttaagacagggcttgggcagagaagataaatggtgggacaaaaaaatgagttacattgccacctgagaaacctcagaggggaggacccagccttagcctccctcctcccaagtgcaaaatgtgtaaacagagtaaacggaacagaaaagtgcagtctaagtggttttctctcctgcccctcccaccgcccctccccccaccccctattatttggggataaagaatataaagacaaccctggcttttctattgccttgttgcttgctgaatataaggaatggggtggggcaggaaggggcttgcccttagccacagctctacggctgtgcctcattcatttccacagctgccagtgtccctagagtttatcaggtgaattggtcaggggatcagtctccctcgagcctgacttacggctgggacagccccatctttctgttgattatgtggcgcatatatatatatatatgtatatatatataatttatataaatatttctctatgtacaaggaatacgagtggctttcatggagggagggaagctgggggccgcaacgatcaacgctgttggagttgtccaattcagtgctgtcacagtctgagtcctcagaattgggagggccccgctctctgagaagttcctggtgtggaatgggcagggagctgggttcagggccagggatgacctctgaaggaggtgggtccagtgggatttctgagccctgggagcacatgtcatcagaccgctcatctggccgctcatcagtgttggtgctgccaacttcaggtgtgccactgggggaaggttcactagctgtgccttcctccccatctgatggattctctgagctgaaggtagatagtgactggcgcatgttcaggctctgaggccacctctggcttgatgtcagctctacttcactgtctacctctccttcctcctcttccgatgagatgccacgtttctgacttcgggtgacggcagccctgtacagcagtgcagctggggtcaagtgctgggacccagcccggcttcctccccggcctgaggtcccttcccttccagttcccagaagccccacaccttcaccaggccctactggaggaggtggttcccctttggctcccccaggtgaatctgggctggtggagccaggggctgagccctcacttggtggggtgtcaccccgggccggaggtggtgagccaggatccccagctccgcctgtggccccccggccccgggaccctagtgctgctgacagcaggtctggggacgatgaagacattttgcggagcaggaggtcatgatgaagcccacggagggcgggagggcaggcctcccaggctgagggtccccctcctaggccccctgggcttcctggtcctccaggttcatggggtggcacagctgtacgaagcccaggcaggtccccacagctccccttggcgctggccttgcggtgacgggtcttgccacggcgactccgtcctggtgaggggggggccttaggacacccaggaagccccaccccactcagggctgcatctagtttagggagcaaagactccgccttgaggatatctggcctttggctatggggtgacagattctgtggcacattcctcttcttgataagcttctccattgtgtttccatgcaggaggccccgggaagggtgtggcttcagcaggcctgggcacctccgctctaaagcttgctctcgcctgagcagctccctctccttgagttccagctgcaacatgagggcattaagttccatatacaggttgttggctctctccagcttcctttcatagtgctccctgatgtccagggcgtgtctgagctcctccctcctcctcatcaccagttcctcttctaggcggtgcagacaggtcccttctgacttaatcttttcaaagtgcagttttacttcttcccgccactctgcctgggacttaaagtaagtctcctggggtgtggagagtacatcagctgaggcaatgtccagatgcagcaggatctgtcggaatgatgggcgatttcgtggtttgctattccagcactggcgaagcaggatcttgaaaccatctgggcaactggagggcacgggcagatggagactgttgcttcccacaccccagataatggctgaggaatctacgtctttgtaggggatctcaccagtcagcagttcccatagcaccacgccaaaggaccagatgtcgaccttctcagacacaggttcattgcggatcacctcaggggccatccaggctactgtccctgcaaaggacatcttggtgctcttgtcactcagctccttggaagtgccaaaatctgagatcttcaccacatcgtcgtaggtgattagcatgttgggtgacttgagatccctgtggataatcttgtgcaggtgcaggtagttcatgccaccagcgatgcccatggaccagtcaaccagtaaggagggggtgacagggcggccagcccgcagtacctcatacagctggccctgggcgcagaactccatgaggatgcagtagcagggagcctgggtgcacacacccttgaaagtgatgatgttggggtgcttcagctttcgcaagtgcttgatgtcggtttctttgaggtctcgcaccttcttcacagccacctcctccccgtggaagcgccccaggaagacagcaccctgggcccctgagcccacccactgcaggtccaggatttcctcaaaggggacctcccaaaggtcttcctgctgctgcttgtgctcagtggagtaggctttgccaatcatggtccagacagggcgcaggcagccaaagaggccctcaaggaagccactgccactctggcactgcagtcgcacctcgtcagctcgaactctggatgcccgactctcaggtgacccagctgctccccctgggccccctgcatcctgctcatgtagctgcaggacatgggtaggcgtcaggtccttctcgggagtgcagtcagaagtgtctgggtccagcttgcgcatggatgcctcacttagggtagacacaaagcccccaaaggaaggagagggtgttcgggtctcatggaggcaagccatcgcctctggcccctggtatgatggtgaacactgggccctcgggggctccgcggccgcagcacaaaaggcggcgctgctgcagctccgctccggatgct

SEQ ID NO: 46001 - DNA, 1173 bp, Homo sapiens; identical to SEQ ID NO: 16081

SEQ ID NO: 46002 - DNA, 1054 bp, Homo sapiens
tcccaccccctagcgccgctgggcctgcaggtctctgtcgagcagcggacgccggtctctgttccgcaggatggggtttgttaaagttgttaagaataaggcctactttaagagataccaagtgaaatttagaagacgacgagagggtaaaactgattattatgctcggaaacgcttggtgatacaagataaaaataaatacaacacacccaaatacaggatgatagttcgtgtgacaaacagagatatcatttgtcagattgcttatgcccgtatagagggggatatgatagtctgcgcagcgtatgcacacgaactgccaaaatatggtgtgaaggttggcctgacaaattatgctgcagcatattgtactggcctgctgctggcccgcaggcttctcaataggtttggcatggacaagatctatgaaggccaagtggaggtgactggtgatgaatacaatgtggaaagcattgatggtcagccagggtgccttcacctgctatttgggatgcaggccttgccagaactaccactggcaataaagttttttggtgccctgaagggagctgtggatgggaggcttgtctatcccctcacagtaccaaacgattccctggttatgattcttgaaagccaaggaatttaatgcagaagtacatcgggaagcacatcatgggccagaatgttgcagattacatgcgctacttaatggaagaagatgaagatgcttacaagaaacagttctcttcaatacataaagaacagcgtaactccagacatgatggaggagatgtataagaaagctcatgctgctataccgagagaatccagtctatgaaaagaagcccaagaaagaagttaaaaagaagaggtggaaccgtcccaaaatgtcccttgctcagaagaaggatcgggtagctcaaaagaaggcaagcttcctcagagctcaggagcgggctgctgagagctaaacccagcaattttctatgattttttcagatatagataataaacttatgaacagcaactaaaagggaaaaaaaaaaagtcg

SEQ ID NO: 46003 - DNA, 531 bp, Homo sapiens; identical to SEQ ID NO: 13640

SEQ ID NO: 46004 - DNA, 459 bp, Homo sapiens; identical to SEQ ID NO: 22998
  misc_feature (1)...(459): n = a,t,c or g

SEQ ID NO: 46005 - DNA, 1623 bp, Homo sapiens
gtcgctagtggccgctggggctgggaggggtgtgctagagaggcgcagcttctctgggcgtggtttttatcctgggggaaggatcggtggaatgtgaggggaggtggaggagatggcggcgacggcccgggaagatggcgccagcggtcaagagcgaggtcagcggggctgcgagcactatgacagaggatgtctcctaaaggcaccttgctgtgacaagctttatacttgccgcttgtgtcatgataacaatgaagatcatcaactagatcgctttaaagtgaaggaagtgcagtgcataaactgtgaaaaaattcaacatgcccaacagacttgtgaagaatgtagcacattgtttggagaatattattgcgatatatgccatttgtttgacaaagataagaagcagtatcactgtgaaaactgtggaatttgtaggattggtccaaaggaagattttttccattgtttgaaatgtaacttatggcctagctatgaatcttcaaggaagacacaagtgtattgaaaatgtgtcccgacagaattgtccaatatgtttggaggacattcacacatcccgtgttgttgctcatgtcttgccatgtggacatcttttacatagaacgtgttatgaagaaatgttgaaagaaggctacagatgtccattatgtatgcactctgctttagatatgaccaggtattggagacagctggatgatgaagtagcacagactcctatgccatcagaatatcagaacatgactgtggatattctctgcaatgactgtaatggacgatccactgttcagtttcatatattaggcatgaaatgtaagatttgtgaatcctataatactgctcaagctggaggacgtagaatttcactggatcagcaatgacgagcctacacagtactggagaacttggcattttctgatatagaaaaaggctttccttggtatcgtgttatcatgtgtcgtcatctatgcattagagttgatgtgttttgtactagtgtcacagcataaaatcatattacaagtacgtaaggattcagggtctcttgatagacttatcatagctctatattgaatgaaagccactgtgcttgtgttttgattggaaattcctttagtgtcagttttttggaagccaatgatgtttgccactgatacattcatagaagtgtattatattttcatgaagctttgctttaagtgacactacgcgtgcagttcatttctagttcttgatagaactgcacttaattttcagtagtagtcttgactttttaagggctgtgttatattaagttctcccttactgttaaaacctaattaaatatgctttagaattttctaagacagtcctctggatcctctaaatgtgaattttgatgtaataactgctaataaaattatattgaaacagtgttttatagaaagttttttccaaagttttctatgtttggctcaattagggcagtatcatcagttctataatgtaaaagaaattttctttcttttgaggtattccataaaagtagttgggaaaattattatgtaaaataataagactcttccaaagccttaataaaaacatcaacattgaaaacaaaaaaaa

SEQ ID NO: 46006 - DNA, 478 bp, Homo sapiens; identical to SEQ ID NO: 23004
  misc_feature (1)...(478): n = a,t,c or g

SEQ ID NO: 46007 - DNA, 504 bp, Homo sapiens
  misc_feature (1)...(504): n = a,t,c or g
attggaanaccgtttgactgattacgaatttaatacgactcactatagggaatttggccctcgaggccaagaattcggcacgagctggaagaagcatcccgtcaatgttgactttctgggaatctacataccccctacaaacaagttctcacctaaagcccacggactaataggccagttcatgcaggaaccaaagatacacatcttcaatgagagaccaggaaaggaccctgagaagccagaggccagcatggaagtgaaggggcagaagctgatcatcaccaggggcttacagaaagactacagaacggatctagtgtttggaacggacgttacctgctggtttgtgcacaacagtggaaaaggattcattgacgggcattacaaggattacttcgtgcctcagctctacagctttctcaaacggccttaaaggtttatagtttgggaaattatatatattaatatacatctttcccctgtcacttttgcagatattcttcg

SEQ ID NO: 46008 - DNA, 2665 bp, Homo sapiens
cccgccgcccatggagcgcgccgcgccgtcgcgccgggtcccgcttccgctgctgctgctcggcggccttgcgctgctggcggccggagtggacgcggatgtcctcctggaggcctgctgtgcggacggacaccggatggccactcatcagaaggactgctcgctgccatatgctacggaatccaaagaatgcaggatggtgcaggagcagtgctgccacagccagctggaggagctgcactgtgccacgggcatcagcctggccaacgagcaggaccgctgtgccacgccccacggtgacaacgccagcctggaggccacatttgtgaagaggtgctgccattgctgtctgctggggagggcggcccaggcccagggccagagctgcgagtacagcctcatggttggctaccagtgtggacaggtcttccgggcatgctgtgtcaagagccaggagaccggagatttggatgtcgggggcctccaagaaacggataagatcattgaggttgaggaggaacaagaggacccatatctgaatgaccgctgccgaggaggcgggccctgcaagcagcagtgccgagacacgggtgacgaggtggtctgctcctgcttcgtgggctaccagctgctgtctgatggtgtctcctgtgaagatgtcaatgaatgcatcacgggcagccacagctgccggcttggagaatcctgcatcaacacagtgggctctttccgctgccagcgggacagcagctgcgggactggctatgagctcacagaggacaatagctgcaaagatattgacgagtgtgagagtggtattcataactgcctccccgattttatctgtcagaatactctgggatccttccgctgccgacccaagctacagtgcaagagtggctttatacaagatgctctaggcaactgtattgatatcaatgagtgtttgagtatcagtgccccgtgccctattgggcatacatgcatcaacacagagggctcctacacgtgccagaagaacgtgcccaactgtgggccgtggctaccatcttcaacgagggagggaacgcgctgtgttgatgtgggacgagtgcgcgccacctgctgagccctgtgggaaggggacatcgctgcgtgaactctcccggcagtttccgctgcgaatgcaagacgggttactatttttgacggcatcagcaggatgtgtgtcgatgtcaacgagtgccagcgctaccccgggcgcctgtgtggccacaagtgcgagaacacgctgggctcctacctctgcagctgttccgtgggcttccggctctctgtggatggcaggtcatgtgaagacatcaatgagtgcagcagcagcccctgtagccagggagtgtgccaacgtctacggctcctaccagtgttacttgccggcgaggttaccagcttcagcgatgtgggatgggagttcacctgttgaagacatcgacgagttgcggccctgccccaccgggggccacatctgctcctaccgctgcatcaacatccctggaagcttccagtgcagctgcccctcgtctggctacaggctggcccccaatggccgcaactgccaagacattgatgagtgtgtgactggcatccacaactgctccatcaacgagacctgcttcaacatccagggcgcgttccgctgcctggccttcgagtgccctgagaactaccgccgctccgcagccacatgatcgtaggggaactccccatgaggccatcggtgcaggctggagaagagaaggcaagttggcaggagtggagaccatgggcatttgagccacttcctcatgtaacttacttgtgccttcaggacctgctcaagccccgatcacgtatataccacttccatctgatgatggaatgctgctgtgcatgacccactttatggctagatgggtcagaaagcacccagttcatgataggcagttcaggtcatatggtgacttgatgacccatagtcaaacattcagtttccaccaaagcccagtaacaggccaagagctgtctctcaaaagaagagtagttatctgcagaagatggcagggccttgctccgaaagcctagagaccgccactgtgattcacctatgggggcctgccaaaggctgcagccagcatccttatctgccactgacacctcaagcaacattggatctgctgggtcatatggcccaagtggcagagcaacttgcacaacagcctggacctgtcatagagctttctcctgttctggaccccactcaaaactggcagcctttcaggtcactcgataaatgggccagagtaacacactcaaacgaggaatgtgttgcctccaaaatccaaagaggcccactaggcattgtgcctctttcttggttttaagagcagcaagatgcaagtacttatccttcaccgtagaagaaatatcctaacatgccccatgtcactgggtccctagaaattttactgaggtagaagttccctgaattttaatcatatttatttcccatcctctgatgcaaatgtctcaccaataagtccagtgtgtttgctacttcttgctcactggatccaatcagcataatgtcatcaatgtaatggaccaatgtgatatcttgtggaagcaaaaagcgatcaaggtctctccg

SEQ ID NO: 46009 - DNA, 584 bp, Homo sapiens
gtggagagcagcaggtaagtggtttcccgcactgccggtatccgccgccatccggactcccgggtcctctgtgcaggttggaggatggttggttgtggcgagcgaggctgaaggagccgggacgcggggctctgggcctcgggaactgagccggtactcacctccgccccttctccccgtcgctgtccgcagccatggccctacgctaccctatggccgtgggcctcaacaagggccacaaagtgaccaagaacgtgagcaagcccaggcacagccgagcgccgcgggcgtctgaccaaacacaccaagttcgtgcgggacatgattcgggaggtgtgttgctttgccccgtacgagcggcgcgccatggagttactgaaggtctccaaggacaaacgggccctcaaatttatcaagaaaagggtggggacgcacatccgcgccaagaggaagcgggaggagctgagcaacgtactggccgccatgaggaaagctgctgccaagaaagactgagcccctcccctgccctctccctgaaataaagaacagcttgacagaaaaaaaaaaaaaaaaaaaagtcgacc

SEQ ID NO: 46010 - DNA, 2145 bp, Homo sapiens
gtggagggccacatctgccagagcctgggagtctgcgaaggccgggacccggttccccggcccacagtgggggtgtgcaaacccgagagaactgggtaagttggggtcggcttgcagtttggggtaccccgagggcggtgtacgtcggtaagattgtaacagtattactggaagacttattcgactgtcctgatgatacttgtaataggaagtgccgtcagaagcgataactgacgacgtctaatgtctatctgaccgcagtcgctgaaacctctacaacttagttgaccgtaactgccagagccctgccctggaattcctgtccttactccctctttaagattgcgtacccactgcagagtgctgaagacggggtagccacgaggttgcaaattcgtgaagaatcagcatcatgtttggcagctgagtattggagccaggagcctgccatgaggttttgagaacagagtgctgttttagagctggcagcagcatctcagcccaagagaaggttatattcccagaggatgtcagtcccaaggaccagtagctgccatcagtttggattctgaaaactaactggcatcaacactgggtgtagaaacatgcttgccttatgtatcagaggacatgctcagcagatccaagagatatatttggcaactttttctagaaaaggcacattgggtatcattcattacattcttgagtgttttttcgggttttcatttttttttctgagacagtcttgctgtattgcccaggctggagtgtgggtggcacaatcacagctcattgcatcctcaatcacccagggcctaagcaatcctcccaccttgtagctgggactacagctcacagcacacctggctaaaattttttttttgttgagacggattctctatgttgccccaggctggtctcaggctcctgggctcagatggtcctcctgcctcagcttccaaaggcacaggccaagttgtagctttgtcccttgccatcatgcccaacaagaggttctataccttttaatgaattgactttcataaattggttatgttggtgggcaagttctttaagctggaaattgtaaattcctcctgaaatgttttttcatgcagttaccatgaactaatactacaataaaggatggtcttgggtgtcaattcttgaaaatgtgtatttgaagaaaaagtaaatttcgcctactgttgtcagatattagcagtccagatattcgctctagcttgtaaacttccctgtggtcagcctaagctcttaaccccctattctacagctttagactgaaggcaaaagctcaaagcatttaaggcctcctcaatttcggcccctgctgctctgtgctctgttccttggtgtagctttgttccagctcctgcagcattgcaccattcctaaccacaaccttaacagcatgtagggccccatactctaggccccatcttgctgtcttcctgtgttggaatcttgcctaccaaggcctgtcaagagggtcctcccccatactgtttgcccacaaggttcaagagtgattggctcccagtcttcctggactgaactacttggatctaggggttgcctgttatttagaagagatcccttaactggtagggccctttcagtaggacagtatttgggtaaggggagggtataagatgagaacctttgctaagttaggttcctttgggagcctccagtttgtttctccctctccccagccatcttgttggatctgccaagggattggactccttcattgtcctaggtttttaaggttttaaagcccaccttctgcagtcggttttctggaatgtgttggtggattacttaagagttatggggaaagagttcttacggcctgtctaggtcagtgaagtcatactggcaagtgacaagaaggaagccaggtttgtcacttaccctgcatgctaaggacatcagagcccacatagaagtctggtagtttttcagccagcagtgggtagggaaggtggataggggatttctgaacaggactttatgcctgtatgcatgggcaccatgtctgtcctgagcactaccacatggcatcgtaggctgctctgtcaaaggatatagcgatagctggtcctatgggcagatgcc

SEQ ID NO: 46011 - DNA, 332 bp, Homo sapiens
gcacagttgaagtgaacttgcggggtttttcagtatctacgattcatagatctggaattcgcggccgcgtcgacggcacagggagaagggataaccctacacccagaccccaggctggacatgctgactgtcctctcccctccagcctttggccttggcttttctagcctatttacctgcaggctgagccactctcttccctttccccagcatcactccccaaggaagagccaatgttttccacccataatcctttctgccgacccctagttccctctgctcagccaagcttgttatcagctttcagggccatggttcacattagaataaaa

SEQ ID NO: 46012 - DNA, 1157 bp, Homo sapiens
ggtaaggattcggcgggcaagcgggtgtaatcagcagccatccgttcttgggcatggtggcttccgaccgcggggaccccgagagtctcttgtcggccgagtagcagccaggaaggagagactgggatggttttttatctgttgctttcttaaatcaagggccgccgggccggagatggatggagggaccggggatttgggaactcgaaaacgagctgagggaagggagcctgtggaaatagactggagtctgggtagtgtcgtttcctagagaatggtctcgaagtaacttctcggtaaagtcttcacggaatttccagaccacacttgcccactgggtggcttttaggacccgagacgtgtgcaggcttttccaggttcggccaaaatgaagtttaatccctttgtgacttccgaccgaagcaagaatcgcaaaaggcatttcaatgcaccttcccacattcgaaggaagattatgtcttcccctctttccaaagagctgagacagaagtacaacgtgcgatccatgccccatccgaaaggatgatgaagttcaggttgtaccgtggacactataaaggtcagcaaattggcaaagtagtccaggtttacaggaagaaatatgttatctacattgaacgggtgcagcgggaaaaggctaatggcacaactgtccacgtaggcattcaccccagcaaggtggttatcactaggctaaaactggacaaagaccgcaaaaagatcctcgaacggaaagccaaatctcgccaagtaggaaaggaaaagggcaaatacaaggaagaaaccattgagaagatgcaggaataaagtaatcttatatacaagctttgattaaaacttgaaacaaagaaaaaggggaagaaacgacagcctcacttctgtatggactgctgatgtggcctgccatcctgttcagcgggcattgtctttggagcagcaggagactaggatgcctctcactcacatcgagttcctggctggccagctgctcagggctcaggctggggcctcccattgacatcctccccctacactccctctctgagcctccgtcgcccctcctgttgggtaagggtgttgagtgtgacttgtgctgaaaacctggttcatatataataaataatggtgatgaaaag

SEQ ID NO: 46013 - DNA, 498 bp, Homo sapiens
gaagtaggcaggggcgaggcggctggggaccgcggggcggacgggagcgagtatgtccgctctgactcggctggcgtctttcgctcgcgttggaggccgccttttcagaagcggctgcgcacggactgctggagatggtggagtccgtcatgccggtggtggtgtgcacattgagccccggtatagacagttcccccagctgaccagatcccaggtgttccagagcgagttcttcagcggactcatgtggttctggattctctggcgcttttggcatgactcagaagaggtgctgggtcactttccgtatcctgatccttcccagtggacagatgaagaattaggtatccctcctgatgatgaagactgaaggtgtagactcagcctcactctgtacaagagccaggtgagaatttcaaggattatcgacttcatattgcacattaaagttacaaattaaagtggcttggtcaagacatgagaaaaaaaaaaaaaaaa

SEQ ID NO: 46014 - DNA, 2087 bp, Homo sapiens
ttaacatgattacgaatttaatacgactcactatagggaatttggccctcgaggccaagaattcggcacgagcggtttgcacaatgtcggaaatggctgagttgtccgagctgtatgaagagagcagtgacctgcagatggatgtgatgcctggcgagggtgaccttccgcagatggaggtaggcagcgggagccgggaggctatccctgcgtccctcccgcagcggggcccaacagctcgaggaggaaggcccaatggaggaggaggaggcccagccaatggcggcgccagaggggaaacggagccttgctaacgggcccaacgctggggagcagccaggccaggtggcgggcgcagacttcgagagcgaggacgagggcgaggaatttgatgactgggaggacgactacgactatcccgaagaggagcagctcagtggtgccggctacagagtatcagccgctcttgaagaagccgacaagatgtttctgagaacaagagaaccagccctggatggcgggtttcagatgcattatgagaagaccccgtttgatcagttagcttttatcgaagagctttttttcactgatggttgtcaatcgtctgaccgaagaactcggctgtgatgagattattgatagagagtagttagatgctgttaaaagaggaggaaactacttgaggagggacccaactttccgctatcttttgggttcattccaaatagttttgtgccattgaaaaacttgaccttcaaaaaaatttgtttttcagaatagaacacaataggacagtgactgcacagttgtgaaaaaggaagagaatcattaaagaaaaagaaaaaagattttaagaccgttgaaatcaattatcaaggaacgtccttaaaacacctatgggcttttgactttgttattgatccagattattttccttgcattggggaaaatatctttcatatttgtttgctgtaaagatggttttgcaagaataagtcatgaccaagacaaactgccaatacaaaagcccactgatactaattatataatgagaaaaaaatgtatccaactaggacacatatcttttgagttatttggactgaaagcttaagaaaacttggaaaattctattttgtgatctagtcaagccacagttatcaaaggctacattttcagtgtaagataaatggatgagtaaactcaaatatgtatcacgtgtgctttgtatcttaagatgtgtttccaagagcatctgaaattttgtttgtacatgtatcttgatcatttataaagccactgtgatctataaatcaagaaaatccattgtcataaccatttttaaaagtcaaaaattaagacatccttaattaaaaagtttcaaatctagacactaaatgtgtgtgaatgtacaaagaaaacaaaccattgcttatgctgttatatactagagaaattttgttttgcttgctgttttaacttgacagatgaaggactttagttgaacttcatattgtaagaactgttaataaaagttgtcaagtaaaaagcgctatatctaaaaagactttatgaacagttattctatcaacttttaaaggttttaaacctgcccagaaattaccttggtatctgaagtttccctctgtctcctcctctaattaagcttgttatttgtcatgcaccagcattggagataataaaatttcttgttctgtgtattttgtttggctaatagtattgcatacatactttctctgtatactactttctattgtatgtgttaaccagtattaagggaaaatgatccagcttcagctatctaattcacaaattaatttctggaaattaaactttgtaaattaagtttttgcctataagaatttgctggtctgggaaaacctgccctatcaatgagtatgttgccgtggttaccttactaagatgctgaagttctaggagagtaatgattacatcagaaggctaggttcagcaaaataagtgtatcagcaggttttatcatgatcagtaaaaatgttccaaatgcttctgctccattatagcagtaaagaacgaatatccaatgcaaa

SEQ ID NO: 46015 - DNA, 334 bp, Homo sapiens
cgcagttttatccggtaaagcgaatgattagaggtcttggggccgaaacgatctcaacctattctcaaactttaaatgggtaagaagcccggctcgctggcgtggagccgggcgtggaatgcgagtgcctagtgggccacttttggtaagcagagtctgacgcggccgcgaattccagatctatgaatcgtatatactgaaaaaccccgcatgttcacttcaactgtgcatagtgcaccatctcaatttctttcatttatacatcgttttgccttcttttatgtaactatactcctctaagtttcaatcttggccatgtaacctctgatctata

SEQ ID NO: 46016 - DNA, 2497 bp, Homo sapiens
gccgcccagaaacagaaggtggtggaaaaggaagcagagacagagcggaagaaggcgctcattgaggcagaaaaagtggcccaggtggctgagatcacctacgggcagaaggtgatggagaaggagactgagaagaagatttcagaaattgaagatgctgcatttctggcccgggagaaggcaaaggcagatgctgagtgctacactgctatgaaaatagccgaagccaataagctgaagctaacccctgaatatctgcagctgatgaagtacaaggccattgcttccaacagcaagatttactttggcaaagacattcctaacatgttcatggactcctcatgtgctttgaaatattcagatattaggactggaagagaaagctcactcccctctaaggaggctcttgaaccctctggagagaacgtcatccaaaacaaagagagcacaggttgatgcaagaggtggaaatgttctccatatcaagatgtggcccaaggggttaagtgggaacaatcattatacggactcttcagatttacagagaacttacacttcatctgttccacctctcctgcgatagtcctgggtgctccactgattggaggatagagccagctgtctgacacacaaatggtcttttcagccacagtcttatcaagtatcctatatgtattcctttctaaactgctactcatgaatgaggaaagtctgatgctaagatactgcctgcactggaatgttaaacactaaatatataacaagctgtgttttcctaagctgagatctgttgaataatgtttacattcgtcccccggggaaatgtatgctcagccaccattcaagagatgactgagaaggagatggtaagttcaagaagactgattgcacctggggacccaggccctttctttgggatccagtcccagccttcatccatgtgattaagatccaggccgctgaagttccccaggggaatgatcttccacttgagcaaccttttacttgatacgatttgcacctttctgttttcctgcagtcagggtggtggcctgcagggacctgagctttgctacccaaccagattcctcatagagattcctaatcactagtttcttgtattcataaactcagagatacagagggcttggtttgaagttggggtgagatgaaacctttgctctgaggccaaagctctgggggccttgcattccctgcattgggttgatgactgtcagcatcactgccgcagcatgcttgactaaggtacctggttttagccacagccacctccttgtatgttacctttcagctctggccaagagtgggacagggttttaaccacaaataggagcagcatgcaattcctagtgacttgctgcacagtattgtatcataattacaggaagtttttatttttaaaactggatctggggtatattcatttgccccatcacctctgtctaaaggcccaagtcctagggctgccatggtcacaaagcacactgatgctccttaagattgtttatctgggagcccacatagtgtggaacaaaaagtcacctagaaagcatccttggtcatcattgtctccttcccacctggcccagagatgcttaaatccaagttgtttctccagctgtcacctcccccaggagatcaggattccactgacgtcctgggcagccagtgaatttaattttccatgagaaacaacagagttaacctgtggcattaggagacctacttcatgtggaccctttttttccttcagtttaacttttctgggagcagtgtgctgcgtagttcggcctgagtttgtgcagcttgttaagacaactcttgtgtaacgctatgttgaagctcaacaaaaaagtcatgggaccacttctagaaatctttcagctgtcaggcctgtcagtctcatgacagtttgttggttgtgccaaacactttatttgggaaaggaaagcccagatttgaatgggtctttcccctgggccttatcctatagaggcatttgtaatatggagaaaataatttttcatttttgctcatttaattctataaattctctttataaatgaattttgtgttctttagttctccttaaaagaacttttgaattataaaaataaaatctttacctgtcgaattgttgctgcagatgattgttgtggaaaatctggatcattgacctctgtgctttcattcctagagatgttttatagttacatgagcaaaagctgttgccccaaagtgatggccctggaggcggggctgaggaacagggaaatgccgctgtgaagtcttaaagcacttctgcttaaactccatgtgtgaggagtgtgcctccctgtgccctctcagctctgaggctggccgtctttcggggtgttccttttggcaaatatacactgtaatcttgagtctaaatttatatgttgaaatgctaccttttttaaaataagaaactaaataaaattattttactatc

SEQ ID NO: 46017 - DNA, 3758 bp, Homo sapiens
  misc_feature (1)...(3758): n = a,t,c or g
tcgtactgtcgcttaggccgacccgctcgcagcgacaaccagccctctacctcttttcgctctcccttaagtaataaaccgtctttccttatgacgagtcttaaactctttgggaggaataatgccggcgtcttccggaacccgacctcgccccgtgacctcagaggtatacttccgggacacggaagtgacccccgtcgctccgccctctcccactctctctttccggtgtggagtctggagacgacgtgcaggtaggagcccgggcgcgacaatcggggggcatctgcggcgaggggacctgtggggcttgggacgagagacgggggtctttccgtgggaaccgagctaggtgccgggcaagagacgcgcggctggcccacctggatcctggccaactcgggattgagttcattcctggtctcagaaggcccgttttgcttcagggaggagcttgtgaagtaagggtgagcgtggtccagccttttaagcctcggccccgcaatacggcggcacggccgcgtttgagctgcacagcgtagttgagggaacccgggacagacgtgggctcccgctctacctcgccaaacttttttcttggtgatcgcaggcccacgctaatctcgtttgtttcctcgtctgcaaaataggaataacaatagcaccgatcccatggtttgtagtgatcattcaaagaaggaaagcagggaaactctcgcactatgttggatgcttctaaatctggcgattctttgcgttgctgagtcgggcacgttgcaagttctggcgctcaggcccagcaccaatgtttgctgtcgcttgccctcgtttgatatactcctgatgaccactctgctcgttactttagggatgttagaacggagaaactgcaaattggcatttactgaatggccatcatgccgaaacatactcatgcttacgtatttgagatatgctggagcctttctatgcttctcgaggcagaactttgggcttctctcctgtggcgcgttccttacaatagttaacgcactgggtcgtgctcattggtctgatttgaagataggaacatttaacttcgtacacccaagacttacacttgaagtacttactgtggtcacacacttaactgaaagtttatatagggaaggcagaggagagatctaggaacacctgagacagactagggtaagttatttgtggtgtagaggcatcttgccactgtctttactgtgaccataggctgagacactctctatcttcaccatctgcaggatatcgattagtgttagtgtcttctgaaaatgttaaattgttctgaacaccaggaggttcagaaggcctgggctttaggcggaagcagtcttatcctagccttccactttctcattcattctcacccgccttcctcctgtcagtttctctctcccttagatcttgtgacagtatgattgcaattattatgcaaggtcataataggttagagttattttagtctcaggacccatcagatttctgagatgggtcttttccattagcctgccttttggatatattttagtgcctttgatatttgatgttggtgacaaagatttagttctaaatagttgtgggagtcaaatcagttgcatttttgaacattttgaagggatcaggtggagcacaggaaaacaggagatgagaggcttgagggctgtgttggtaagggacccttgaattctaagctgaggagttcatgcaggaatcaagcagctccctcgccccatgaaggtgttaggaatggtaccagtacatgggtagctgttggtcttgggtttcttcttgccttttggggtgcagccttcagcgatctgctgctagatccctaggcttctatcttgtaggtgctgtgagctgagctgttggtagtttctggggaaaggatacttctcatggtactttgccatatggccacagttgatacccccccaagtgcaaggagaaagaagttttagtgaggcagaaatgagagattacagtagagtattggatggagagtacagggacataagcaggactagggtttcatttaatagccagggaaagggatttctgaaatattttgtctgttaaccttatttcttttccttccactcagaaatggcacctcgaaaggggaaggaaaagaaggaagaacaggtcatcagcctcggacctcaggtggctgaaggagagaatgtatttggtgtctgccatatctttgcatccttcaatgacacttttgtccatgtcactgatctttctggcaagtgagtacctgggtggagaggcatccagctggcaaaaggctgaggaaggtaatggctgggacgggctagcagttcaggggattctctctaaagaaatccctgttttgtccaggtaagaaaatgtgcttgtccatttagcccacaaatattgtgatttcccaggggttacaagagaggagacacattcttcgtccttaacagcgtgatggtcattgaatccttggtttcttgggaattatcttctttccctagttccctttgcagagcagcatggactgcaatgggctctgggtgcgggttcgacggccatttagcaagttgtgacttgtgtgaaatcactcagattctgagttttggtttcctcatatgtaaaattaggacagtaatgtctaccttgtggagtaatggtaaggattaaatgcaaaagtagatatataaaatgttaatactgagtatagcttatattggccatcaaccccactgactaactccatagagagcccatgaccatcatcctccaccatgactgagctgtgttgctcttcactcattaggatatcgtaagcattccttgttggacgaggaagaaatgaccctgtgctttttgtccccagggaaaccatctgccgtgtgactggtgggatgaaggtaaaggcagacccgagatgaatcctcacccatatgctgctatgttggctgcccagggatgtggcccagaggtgcaaggagctgggtatcaccgccctacacatcaaactccgggccacaggaggaaataggaccaagacccctggacctggggcccaagtcggccctcaagagcccttgcccgctcgggtatgaagatcgggcggattgaggatgtcacccccatcccctctgacagcactcgcaggaaggggggtcgccgtggtcgccgtctgtgaacaagattcctcaaaatattttctgttaataaattgccttcatgtaaactgtttcaactccagtcttctctccttcatcaggggctactcaggcatttgatttcttcctcctatttggcttcttgggagaaggagcctgaggagagctgagatcctggtgctgcatttggggtcttttccatgctacttgcggcattaagttgccttggtcatctaaagcagaccaaggcgttggagacctcgttttgagtggagatgctggttctaaatatggaccaattcttaaagagccagagtgggaactgttgatccaagtgtagcctgaagcgaaagaggagccttccagacccatgccatatataaacacacgtgggtgtgcattctccccccacaccttctgtgcaaagctgggagctcactccactgcgtcttgctttttttcacttggcagatcttggagattgttccacatcagtacataaagnacataaagattgtcaccccacaaatacncaccaagtnctattttcatcancgataaaaa

SEQ ID NO: 46018 - DNA, 3734 bp, Homo sapiens
  misc_feature (1)...(3734): n = a,t,c or g
tgcctgcgtttgaaccctgcctggctctgccatttcctaccacttaactgcactgtggctgagttttctgatctgtaaggtgggaataataatgatacctatctcataggggaatgaaaggatcaaatgagttcatatttgtaaagcaatttgaaagagtgcctagcccacagtaagtgctacataagagtttgttaaatgaatctgcaaaaaaaaaaaaaattacaaaaaggtacctaagggtccgggtgactatatncttccatcaagactagtgaagaatggttgttttttccattcatccctacatttctttttttaataatgataaacatgcaacttttttgtagctttacaacaaatacccagatgctgtggccacatggctaaaccctgacccatctcagaagcagaatctcctagccccacaggtatttttaaacttctcataattaaactacagtgatgaaacatagccacacncaggccatttgggctgctcagatgaatcctgcctgcctgctggcaaactgtgcttaggacattgactgatctgccatgttggcttctctctgtgttaagccatccacagatgaggctgaaaaataaaaactgctttggattaaaaaggttaacttttgaataaaaaagctaggcatgtgtgatgcgcactaacacgtgccattccttcttcagaatgctgtgtcctctgaagaaaccaatgactttaaacaagaggtaagttctcattttcaatcagaggcccatcatgccttgaagagatgaaagaaggcattgcctggattctcttctgatgaaatttcattagcaagttttccagctaattggcagtctaaaacttgctcataaataaaacatgtatttactaaatatcagaaatactaggtttcctcggataagtttagcattacagaagatgtttattaatgcctgttatttgaaacattaatctgcttgcaatttatttaaggtatttgtagatatctaatatctaataagcatctaattaatgcatatcaaagctaagattttgcctttaggaaagttttctttcctaataaaatagtttatttgacaactattctttttattaggatcattcatatatttgctaagcaaagagtaaatttattttccttaagattcaatttgaatatactaagaatattaaagcaagttagataaattacccaatatatttgtcaatttgaaatttgatagacattagttgtttaattcaatgggcagttttgagctgcagtttatacacacatgcataacagagtcacctttcaattatccatgttaataggaaagtggttatagattttagtacacacattaaaatatggatactcttctcttttgataaatctcatttcaaataaaaaaaccagtctcataattatgtatctgtatctattacatcattgaatttagtaaataatgtttaatatgtataaggaaaaacaatgttattgacatgaagattatactcacatatttggcttgaaaatatctataaaaataatttctgttgcaaagtaagaaatgttcttcagaatgttattaatccctgtgttaaaagagaaattggaagatgctcactttagctcctaaaagccatggtatgtactgtgaatgcaaagattctgaaactaaataaaaagaaagatagtaaaagactaatgtgctataaaggctaagggaaaataaaaacccatatattaattttcccggccatcttaattttcagacccttccaagtaagtccaacgaaagccatgaccacatggatgatatggatgatgaagatgatgatgaccatgtggacagccaggactccattgactcgaacgactctgatgatgtagatgacactgatgattctcaccagtctgatgagtctcaccattctgatgaatctgatgaactggtcactgattttcccacggacctgccagcaaccgaagttttcactccagttgtccccacagtagacacatatgatggccgaggtgatagtgtggtttatggactgaggtcaaaatctaagaagtttcgcagacctgacatccaggtaaatcctttaacagacacacctgatggttctgactagcgctcaagtctaggaaaccacagtttgnatattcattcattcattcatccattcattcatccattcagcaagaattcattcatattctactttatgaccattgaatacaatctttttctgcttggcggttttgtaagtctacataattctctctagatttgattctcaaacacaattctactttttgaaatcctggatcacttattttcagattaaaataaatggaaaacaccaattatttacaacaaataatggtcatgttttgaagttaaatacctaagaggaattgtagttgcaaattacactgaatccttagtcacagagaatctggatttgacatagggttgccgtttactattctctttactttttaactaacaattcacttcctctttatgtaggtttcaatataatgaaacctacctcataggtttcattacatatgtaagtgatgtagttattaaactaaatgagatgacatatgtgaaaggccttggtaaagtactatacaaagtaacatgctagtattatttcagccagatttagacaatttttagtataagatgacctaaaagctagagagtggaaaaggattaccatattcccatccctagccgttcatataattattcttcatttgtgccgtgattcagtaccctgatgctacagacgaggacatcacctcacacatggaaagcgaggagttgaatggtgcatacaaggccatccccgttgcccaggacctgaacgcgccttctgattgggacagccgtgggaaggacagttatgaaacgagtcagctggatgaccagagtgctgaaacccacagccacaagcagtccagattatataagcggaaagctaatgatgagagcaatgagcattccgatgtgattgatagtcaggaactttccaaagtcagccgtgaattccacagccatgaatttcacagccatgaagatatgctggttgtagaccccaaaagtaaggaagaagataaacacctgaaatttcgtatttctcatgaattagatagtgcatcttctgaggtcaattaaaaggagaaaaaatacaatttctcactttgcatttagtcaaaagaaaaaatgctttatagcaaaatgaaagagaacatgaaatgcttctttctcagtttattggttgaatgtgtatctatttgagtctggaaataactaatgtgtttgataattagtttagtttgtggcttcatggaaactccctgtaaactaaaagcttcagggttatgtctatgttcattctatagaagaaatgcaaactatcactgtattttaatatttgttattctctcatgaatagaaatttatgtagaagcaaacaaaatacttttacccacttaaaaagagaatataacattttatgtcactataatcttttgttttttaagttagtgtatattttgttgtgattatctttttgtggtgtgaataaatcttttatcttgaatgtaataagaatttggtggtgtcaattgcttatttgttttcccacggttgtccagcaattaataaaacataaccttttttactgcctatataatgtttttaaaaaaaaa

SEQ ID NO: 46019 - DNA, 1037 bp, Homo sapiens
gcgagggtgacaggaaaccctgtgcagggagcgccgccatcttggaccagcccgaggaagatactgagggagcacaggagcagtcaccgctgccactgctactgccgctactgctgccggcgcgtctgcacctctcggcctgccagtgtacctgccggcgcctcggtcgaccgcccccgccccctctcccgctgcgtccgcactcctgttcctggtcctgacgcccccctcccgcccggaaagctgcccagccaccagcaaccccccagtgccaccatggcaactgcaccatacaactactcttacatctttaaatatattattattggggacatgggagtaggaaaatcttgcttgcttcatcaatttacagaaaaaaaatttatggctgattgtcctcacacaattggtgttgaatttggtacaagaataatcgaagttagtggccaaaaaataaaactgcagatttgggatacggcaggacaggagcgatttagggctgttacacggagctactacagaggagctgcgggagctcttatggtctatgatatcactagaagaagtacatataaccacttaagcagctggttgacagatgcaaggaatctcaccaatccaaatactgtaataattctcataggaaataaagcagatttggaggcacagagagatgttacatatgaagaagccaaacagtttgctgaagaaaatggcttattgttcctcgaagcgagtgcaaaaacgggagagaatgtagaagatgccttccttgaggctgccaagaaaatctatcagaacattcaggatggaagcttggatctgaatgctgctgagtctggtgtacaacacaaaccttcagccccgcagggaggccggctaaccagtgaaccccaaccccagagagaaggctgtggctgctagtgacctctttgctgtggcccctcatttgacctttcacctctgtctgttggaagcagtactttttactgcctcattgtcttctgtacatcttactgggtttaattaaaaaaaaa

SEQ ID NO: 46020 - DNA, 2718 bp, Homo sapiens
atgtttgcagaaaggcaggaaactttattgaataatcttttctttggggtagagaagttgagaaaccaaagcgtatccaggtcagagaggagagagatccgacaggaagagaagagcacagagggcccaccatcaggagagagtcaggacagggggtcctgagagcagagggactgagccttgggtccagcagcccctcctctctcctgcagggaactgccggctctctcctcctctgggtgctgaagacagagggaggggacgccaggcagatttaaggcctacggacatcagaagtgcggcgaccagaggcattagaggtggtggtaacagaggcactagaagtcgtggtaacagaggtgctacgggggctgacgcttcctgctgaggaagggaaaccaatcatcttggcgtcctggccctcgagcaggctgcggtaggtggcgatctcctgctccagacgtgtcttgatgtccagcagcatcttgtactcttggttctggcactccatctcactgcggagctcgctcagctgggcctcgatgctgctgatgagtccctggatctgctgcagctgcagggcatagcggcactccgtctctgcaacagtgttctccagcccagctttcatgctcagctgggactgcagctcaatctccaggccttgaagcgtgcgcctgagctccgtgatctctgtcttgctggtctgaatcatggcagtgttggtagacacctccttgttcagctctgcactcttggcgtggaaccattcctcagcatcccggcggttcctctctgccatggcctcgtactgctccctcatctctgccagcacgcgggtcaggtcaatgcctggggtggcatccatctccacgttgacctggccgaccacctggttgctaaattccttcatctcctcttcatggttcttcttcatgtaggctagctcttcattcaggctctcgatctgcatctccaggtcagtcttagacagagtgagctcatccagcacccggcgcaggccgttgatgtcggcctccacgctctggcgcagggccagctcattctcatacttgagcctgaagtcgtccacagccagcctggcattgtcaatctccaggatgacccggttgttttcaatggtggcggtcaggatcttgtcccggagctcttcaatggtcttgtagtaggggctgtagtcccgctcagggctagctgggctctgcttcaggtgccagtcacggatcttcacctccaggtcagcgttggcctcctccagggcgcgcaccttctccaggtaggaagccaggcggtcgttgaggttctgcatggtgatcttctcattgccagtgaggaggccgccatcacaagcaccaaagtcaacaaagccaccagcaaaacccccaccaaagccacctccaaggccacctccatagccacctccaaggccacctccatagccacctccaaagccactatcagcccctccaccaaaaccacagctcacgccgcctccatagcccccagctgatcccccagacacaaaccgagttgaacaggtagagacaccacggcctcctcccagctggcaagagccacccccgaaaccacctccatagctggcagaggagctctgcaggcggaggctcatggtgagagcaggatccgctcgccggacagcggccgaggggttcccgcaggcccggacgccggacctctgacttaaaggagaagaaggaagttgtggaagaggcagaaaatggaagagacgcccctgctaacgggaatgctgagaatgaggaaaatggggagcaggaggctgacaatgaggtagacgaagaagaggaagaaggtggggaggaagaggaggaggaagaagaaggtgatggtgaggaagaggatggagatgaagatgaggaagctgagtcagctacgggcaagcgggcagctgaagatgatgaggatgacgatgtcgataccaagaagcagaagaccgacgaggatgactagacagcaaaaaaggaaaagttaaactaaaaaaaaaaaggccgccgtgacctattcaccctccacttcccgtctcagaatctaaacgtggtcaccttcgagtagagaggcccgcccgcccaccgtgggcagtgccacccgcagatgacacgcgctctccaccacccaacccaaaccatgagaatttgcaacaggggaggaaaaaagaaccaaaacttccaaggccctgctttttttcttaaaagtactttaaaaagggaaatttgtttgtattttttatttacattttatatttttgtacatattgttaggggtccagccattttttaatgatctcgggatgaccaaacccagccttcggagcgttctctgtcctacttctgactttacttgtggtgtgaccatgttcattataatctcaaaggagaaaaaaaaccttgtaaaaaaagcaaaaatgacaacagaaaaacaatcttattccgagcattccagtaacttttttgtgtatgtacttagctgtactataagtagttggtttgtatgagatggttaaaaaggccaaagataaaaggtttctttttttttccttttttgtctatgaagttgctgtttattttttttggcctgtttgatgtatgtgtgaaacaatgttgtccaacaataaacaggaattttattttgctgagttgttctaacaaaaaaaaaaaaaaa

SEQ ID NO: 46021 - DNA, 440 bp, Homo sapiens; identical to SEQ ID NO: 23212
  misc_feature (1)...(440): n = a,t,c or g

SEQ ID NO: 46022 - DNA, 4096 bp, Homo sapiens
ggggaggatggaagcgctggcgccgggggcgggcggcccggcatgtaatagcggtggtgctgggcgacgtgggccgcaacccccgtatgcagtaccacgcgctgtcgttggccatgcacggcttctcggtgaccctcctggggttctgcaactccaaaccccatgatgagctcttgcagaacaacagaattcagattgtggggttgacagaacttcagagtcttgcagttgggccccgagttttccagtacggagtcaaagttgtacttcaggctatgtacttgctgtggaagttgatgtggagggagccaggtgcctatatctttctccagaaccccccaggtctgcctagcattgctgtctgctggttcgtgggctgcctttgtggaagcaagctcgtcattgactggcacaactatggctactccatcatgggtctggtgcatggccccaaccatcccctcgttctgctggccaagtggtacgagaagttctttgggcgcctgtcccacctgaacctgtgtgttaccaatgctatgcgagaagacctggcggataactggcacatcagggctgtgaccgtctacgacaagcccgcatctttctttaaagagacacctctggacctgcagcaccggctcttcatgaagctgggcagcatgcactctccgttcagggcccgctcagaacctgaggacccagtcacggagcggtcggccttcacggagcgggatgctgggagcgggctggtgacgcgtctccgtgagcggcccagccctgctggtcagcagcacgagctggacagaggacgaagacttctccatcctgctggcagctttagaaaagtttgaacaactgactcttgatggacacaaccttccttctctcgtctgtgtgataacaggcaaagggcctctgagggagtattatagccgcctcatccaccagaagcacttccagcacatccaggtctgcaccccctggctggaggccgaggactaccccctgcttctagggtcggcggacctgggtgtctgtctgcacacgtcctccagtggcctggacctgcccatgaaggtggtggacatgtttgggtgctgtttgcctgtgtgtgctgtgaacttcaagtgtttacatgagctggtgaaacatgaagaaaatggcctggtctttgaggactcagaggaactggcagctcagctgcagatgcttttctcaaactttcctgatcctgcaggcaagctaaaccagttccggaagaacctgcgggagtcgcagcagctccgatgggatgagagctgggtgcagactgtgctccctttggttatggacacataactcctgggccagaggctaaaaccccaggacccctgctgtccttcccgcagcttcttcttggagtctcagggcaaaccctttcgagcagcacctcccagtggccagaagctgaaatgacagcagtggtactgcctggtaaaagaattggttctgtgacccgggaagctttggttggccttgatttcttctctggaggcttggaaacgcttcctctcttcttctgttcttcacgccccatgcccctgctagcgtattactgttctgtgacttccctgtgacctctgcagaactcctcatcctgcgtttggtctccaggtgtcccctttctgccgtgttcctaacattttgattcctgtcttgaaaaaagcacctgctgcaccgtaagcccagggatgtggcagctgcagtgggcttggctttgtgaggaactgagtgtgtccacgttgggggaacatcatacttgatacacacgtttttatttgcacaaagaaaatgctgtttttggagccagaattttcatgtctgatttatggtgattttcttaagaaccagaactgctggcagaaagggggcacccacacgcttagatagccgatgtcttattagagggcagtttgtggttcctgatttggaaattaacattctccaaacattccagtccaatgaaagttttatccgctttcccatataaaaattcttcccatgagagtgacttgattctcacaatcccgttggagtcgtgtatgagtcctacagtgtgaggttcagcattgccatctccaagtgctctccatagggaaacagtttctggtcatgatgagcttccgcttcccatctgatcccagcccagcctagctcggtggtgaacagctggcacgtctctgggttgtggacggtaaaggccacgtagacctcaggagcccgctggtgctcccagcaggcagccagcctccgcaggaccccgaccagcgacacgatggcttctgggcaatacagcacgtctgttagtgaaggctgccgggttctcgatggcccattctgccaggtagagggcagcatctcatgtgaccaggcctgtgatgtcgtgggagatgatggctgtgctctcggagagtgtgactgagcctcccgagggctgcaccaagagagggcgagagagtcagtccagcaatcagaaggcaagtggcttagaagacaagtagccatccaccacatggctgaataaaccatgacaggaccaatcgccactcagcaatgagaagcagctaactgttgacatgccaacagcttgcacggacctcaagggtgtcacgtggcatgaaagacactcatctcaggccacacaggattccattcatcgaacattcctgagacaacggaattctggtgatggagcacagcccagtaaaggcgccattccccattttacagctggggaaactgagttacagagcttgtctgcactgagtcatcaggagcaaatgctagatcagggtctctctctctgccacccaggccagagtgcagttgacgcagggcaggggagccccgaagtgggagcatagtgtgtccggaactggtggggttcttggtctcactgactttcaaggaaaggaagccgcgggaccctcgcgaaactcctggagggcagaggcatgcctgccatcttcatcattgcattaccaccacccaacactatcgggggacctgccctgataatcagtctacaggtgtatccagcagctccagagagacagcgaccagcaagaaggggccatgatgatggtggtggttttttcaaaacgaaaatggggattatgtagggaaaagaaagagagatcagactgttactgtgtctatgtagaaagggaagacataagagactccattttgaaaaagacctgtactttgaataattgctttgctgagatgttgttaatttgtagctttgccccagccactttgacccaaccactttgatccaatctggagctcacaaaaacatgtgttgtatgaaatcaaggtttaaggcatgtagggctgtgccaggacgtgccttgttaacaaaatatttgcaagcagtatacttggtaaaagtcatcgccattctccattcttgattaaccaggggcacaatgcactgcggaaagccgcagggacctctgcccaagaaagcctgggtattgtccaaggtttccccccactgagacagcctgagatatggcctcgtgggaaaggaaagatcttaccatcccccagcccgacaccagtaaagggtctgtgctgaggtggattagtcaaagaggaaagactcttgcatttgagatagaggaaggccactgtctcctgcctgcccctgggaactgaatgtctcggtataaaacacgattgtacatttgttcagttctgagatgggagaaaaaccgccctatggtgggaggcgagacatgtttacagcaatgctgccttgttatcctttactccactgagatgtctgggtggagagaaacataaatctggcttacatgcacgtccagtcatagtaccttcccttgaacttcattatgtcatagattctattgctcacgtttgttgctgaccttctccttattatcaccctgccctcctactacattcctttttgctgaaataatgaagataataatcaataaaaactgagggaattcagagacctgtgccagtgcaggtccttagcatgctaagcgcaggtcccctgggcccgctgttgtttctctat

SEQ ID NO: 46023 - DNA, 3282 bp, Homo sapiens
gccagcacctgcaggcggagaagaagaagatgcagcagaacatccaggagcttgaggagcagctggaggaggaggagagcgcccggctgttattgttcggctgggctcggtcgggcgctgtctccctcggctctgcgggtgtcagttcgtccggcttcctcacagcccctcactcccggcggctgacagcagcagcggcggcggcgggcggcgcctggcgtttcgaggctgagcggcaccggggttggggcgcggaggaggagcagcagcgggaggaggagccgtgtgccctggcactgagcggccgcggccatggcgtacgcctatctcttcaagtacatcataatcggcgacacaggtgttggtaaatcatgcttattgctacagtttacagacaagaggtttcagccagtgcatgaccttactattggtgtagagttcggtgctcgaatgataactattgatgggaaacagataaaacttcagatatgggatacggcagggcaagaatcctttcgttccatcacaaggtcgtattacagaggtgcagcaggagctttactagtttacgatattacacggagagatacattcaaccacttgacaacctggttagaagatgccccgccagcattccaattccaacatggtcattatgcttattggaaataaaagtgatttagaatctagaagagaagtaaaaaaagaagaaggtgaagcttttgcacgagaacatggactcatcttcatggaaacgtctgctaagactgcttccaatgtagaagaggcatttattaatacagcaaaagaaatttatgaaaaaattcaagaaggagtctttgacattaataatgaggcaaatggcattaaaattggccctcagcatgctgctaccaatgcaacacatgcaggcaatcagggaggacagcaggctgggggcggctgctgttgagtctgtttttactgtctagctgcccaacggggcctactcacttattctttcaccccctctcctcctgctcagctgagacatgaaactatttgaaatggctttatgtcacagaagactttaatccgtcaaattcttgtataactttgaataaatggttaatgttcacttaaaagacagattttggagattgtattcatatctatttgcatttgatttctaggtcaattgatgtgattatttttgttaaatgttgtcttgtgcccttaactacggaactgaattgtattaaacactacaaagtcatcttgagtattttaaatcggtttgtgtagttaggtttcccaacatctgtggttacctaatgtttaatattatagaactgtcctcagaaactttgtcaattttcacggctataaggaaacagaaggactcttttaattctgtatttatcatttactttctgtatatatagtttaataacctgcttgggtgtaatttgccaagcttgaattctttaatgcatttgcataaattctatactgtttagagcttaaagctacagaagcattgttaggaattgcttggacactgaattttaaactttttgacattgttaacaagcatgttcatcttttcttgtcactagtccaagaaaaatatgcttaatgtatattacaaaggctttgtatatgttaacctgttttaatgccaaaagtttgctttgtccacaatttccttaagacctcttcagaaagggatttgtttgccttaatgaatactgttgggaaaaaacacagtataatgagtgaaaagggcagaagcaagaaatttctacatcttagcgactccaagaagaatgagtatccacatttagatggcacattatgaggactttaatctttccttaaacacaataatgttttcttttttcttttattcacatgatttctaagtatatttttcatgcaggacagtttttcaaccttgatgtacagtgactgtgtaaaatttttctttcagtggcaacctctataatctttaaaatatggtgagcatcttgtctgttttgaaggggatatgacaataaatctatcagatggaaaatcctgttacaaagtagaaaagctttagtaatttactcagtgtggtggttttatcctttttttctttttctcccttggtctataatgaaattgttacagcagtgcaaaataaaatcctatgtataaaagtgttctttttttttattatgaccacctcttttttaatgtatttttagtccacttacagcttttacatgggtttaagcatgttttttaaaagggtcagaatggttaacactcaaccctttttaaaaattttgctaaaatgcgacaaatctcaccatactgaaattatttttgttgatggtgtaagcagtgtaagcaagtgttttctcctgaactagcacaaaagcacttatgcctgaaagaaagcataaagaagttctaactctgaaactaactactttcatttcgctcatggccttcaactttctacaggtcttccctgaagattcagcagtactctctcaaaggtttgacagtactcttgtgggaaatcaccaaatgctgtcatagttttgttttaactgtctccttgagggcagagggaagggtgagagaaaatctgttttcatgggtatttgtagtacagcctttttttctttcaagtggctgtatcaaattcactggtcttactaatcactgtctttaccagtgagtacaaaaagttaaggcaactaggacaggtactgctctataccaagaagagaatgattctttggaaattgttatttttaagcttctgttaatttttccagaagtttagtgcgtttcttttcccatactttctcccctaattcttttatttgaagaagagaacttaatggcaaataaacaacaaaccaggacatgcattttaataccctaaggaaaaatggaaccctcaaatataactcctcccacaaccaccctaatgtgcctcagtctggggcagcaggtggacttctcaatagttcttttccacattctctacaaatcacatctaccgttaaggaatatgttatgaatcctttctgttaattgagaaagcaatgttattgtctgtgatttccagtctttgctcattttattatccctgtcaaataatgtaatattggtacctgcagttgaatttgtaatattgtaattgaatttttagttgatcttcgatcagtttttatagcatctatggacatagaaaatcagtcactgaaaaaaataaacacagctttcaatgtctcactcaaa

SEQ ID NO: 46024 - DNA, 1278 bp, Homo sapiens
tcacgggggcctcacttcattctcttccacgtcatttggtggtagtggcatgggcaacttcaaatcgatatcaacttcaactaaaatggttaatggcagaaaaatcactacaaagagaattgtcgagaacggtcaagaaagagtagaagttgaagaagatggccagttaaagtccttaacaataaatggtgtggccgacgacgatgccctcgctgaggagcgcatggcaggaggccagaacgccctgccagcccagcctgccggcctccgcccgccgaagccgccccggcctgcctcgctgctgagacacgcgcctcactgtctctctgaggaggagggcgagcaggaccgacctcgggcacccgggccctgggaccccctcgcgtccgcagcaggattgaaagaaggtggcaagaggaagaagcagaagcagagagaggagtcgaagaagaagaagtcgaccaaaggcaatcactagaccggacttgaggcacgcggtgcacccccagacgctggcgctccaccgtgctcggcatgcggtcgtgcacacgcgctaggtagcagcgtcggtcaggactgtttcgaggccacactcgctcggcaggattatgcgatcacggatcagtcagagcagggtcaggagacggggctgacggcacgggtggcggggacagacgtttgggacttggccgcgactctctgcttctctccagctctcaatctgctgcattttcctctagtgcttccggatcctcttcattcttttcggctactcaaccactccgcatgctgctggaatatttctggctttagaagtacaggagggcgcagatggctaactgagtaacattcatgaaatgaggctttctgtggcggcgtagtgtttggaattagaaggtaattcagtagagtgtaacttagagaatattgcaagtgacacattgaatcctgcccgtcagggcaccttttcctcagagcaatccggccacacgaatagaaggctgtcgtgaatcacatcagatgtaaaatcattccttctgtttactcttttaattttcatcctttgcaggtagtgcaaattcaacttcaaatatggtgtaggttttgctagattccatatttttttcttggatttttgctaattatttttagcaaaaaatttttgctcagtggcaccctccctagtgtccatgggttagggccatgctggggaaaacgggccggtatttacacacgcgcaaaacacccagagacggcacaaggaggttgaactcaatg

SEQ ID NO: 46025 - DNA, 1627 bp, Homo sapiens
tatgacctgattacgaatttaatacgactcactatagggaatttggccctcgaggccaagaattcggcacgagcggagaagggggctggccccaggaggaggaggaaacccttccgagaaaacagcaacaagctgagctgctgtgacagaggggaacaagatggcggcgccgaaggggagcctctgggtgaggacccaactggggctcccgccgctgctgctgctgaccatggccttggccggaggttcggggaccgcttcggctgaagcatttgactcggtcttgggtgatacggcgtcttgccaccgggcctgtcagttgacctacccctttgcacacctaccctaaggaagaggagttgtacgcatgtcagagaggttgcaggctgttttcaatttgtcagtttgtggatgatggaattgacttaaatccgaactaaattggaatgtgaatctgcatgtacagaagcatattcccaatctgatgagcaatatgcttgccatctttggttgccagaatcagctgccatttcgctgaactgagacaagaacaacttatgtccctgatgccaaaaatggcacctactctttcctctaactctggtgaggtcattctggagtgacatgatggactccgcacagagcttcataacctcttcatggactttttatcttcaagcccgatgacggaaaaatagttatattccagtctaaagccagaaatccagtacgcaccacatttggagcaggagcctacaaatttgagagaatcatctctaagcaaaatgtcctcagatctgcaaatgagaaattcacaagcgcacaggaattttcttgaagatggagaaagtgatggctttttaagatgcctctctcttaactctgggtggattttaactacaactcttgtcctctcggtgatggtattgctttggatttgttgtgcaactgttgctacagctgtggagcagtatgttccctctgagaagctgagtatctatggtgacttggagtttatgaatgaacaaaagctaaacagatatccagcttcttctcttgtggttgttagatctaaaactgaagatcatgaagaagcagggcctctacctacaaaagtgaatcttgctcattctgaaatttaagcatttttcttttaaaagacaagtgtaatagacatctaaaattccactcctcatagagcttttaaaatggtttcattggatataggccttaagaaatcactataaaatgcaaataaagttactcaaatctgtgaagactgtatttgctataactttattggtattgtttttgtagtaatttaagaggtggatgtttgggattgtattattattttactaatatctgtagctattttgttttttgctttggttattgtttttttcccttttcttagctatgagctgatcattgctccttctcacctcctgccatgatactgtcagttaccttagttaacaagctgaatatttagtagaaatgatgcttctgctcaggaatggcccacaaatctgtaatttgaaatttagcaggaaatgacctttaatgacactacattttcaggaactgaaatcattaaaattttatttgaataataaaaaaaaaa

SEQ ID NO: 46026 - DNA, 468 bp, Homo sapiens
  misc_feature (1)...(468): n = a,t,c or g
tgnnntttgaatactncngaanaccctttatgacatgattacgaatttaatacgactcactatagggaatttggccctcgaggccaagaattcggcacgagagtgtttgtgaactttcctagttctctatgttgttagtgcagccagcacccagtggggacctactagaaaaaggaactggcatgcacacgtgcccagcaggaaaagcttcgtcttcacgtcggctgctgccatccagaagaggccctggagcctcacgccgtcgaggctgctctcaggcgttctgttccgggcgaggcttgtgctgcaaggaagggcaccagcatgcaggctgccactggagggtccgggtgctgcgggcagagttcagcgcttgtccaccctcccttagctctgactcagtgcatcctactgtggggacatctcgtgaggggacacgaaatgactgatctcaccctttcccagtat

SEQ ID NO: 46027 - DNA, 1666 bp, Homo sapiens
  misc_feature (1)...(1666): n = a,t,c or g
atgaagaggaagactatgatgtttataaaagtgaatttcctactgaagcagatctggaagacttcacagaagcagctgtggatgaggatgatgaggatgaggaagaaggggaggaagtggtggaggaccgagattactactatgacaccttcaaaggagatgactacaatgaggagaatcctactgaacccggcagcgacggcaccatgtcagacaaggaaattactcatgatgtcaaagctgtctgctcccaggaggcgatgacggggccctgccgggccgtgatgcctcgttggtacttcgacctctccaagggaaagtgcgtgcgctttatatatggtggctgcggcggcaacaggaacaattttgagtctgaggattattgtatggctgtgtgtaaagcgatgattcctccaactcctctgccaaccaatgatgttgatgtgtatttcgagacctctgcagatgataatgagcatgctcgcttccagaaggctaaggagcagctggagattcggcaccgcaaccgaatggacagggtaaagaaggaatgggaagaggcagagcttcaagctaagaacctccccaaagcagagaggcagactctgattcagcacttccaagccatggttaaagctttagagaaggaagcagccagtgagaagcagcagctggtggagacccacctggcccgagtggaagctatgctgaatgaccgccgtcggatggctctggagaactacctggctgccttgcagtctgacccgccacggcctcatcgcattctccaggccttacggcgttatgtccgtgctgagaacaaagatcgcttacataccatccgtcattaccagcatgtgttggctgttgacccagaaaaggcggcccagatgaaatcccaggtgatgacacatctccacgtgattgaagaaaggaggaaccaaagcctctctctgctctacaaagtaccttatgtagcccaagaaattcaagaggaaattgatgagctccttcaggagcagcgtgcagatatggaccagttcactgcctcaatctcagagacccctgtggacgtccgggtgagctctgaggagagtgaggagatcccaccgttccaccccttccaccccttcccagccctacctgagaacgaaggatctggagtgggagagcaggatgggggactgatcggtgccgaagagaaagtgattaacagtaagaataaagtggatgaaaacatggtcattgacgagactctggatgttaaggaaatgattttcaatgccgagagagttggaggcctcgaggaagagcgggaatccgtgggcccactgcgggaggacttcagtctgagtagcagtgctctcattggcctgctggtcatcgcagtggccattgccacggtcatcgtcatcagcctggtgatgctgaggaagaggcagtatggcaccatcagccacgggatcgtggaggttgatccaatgctcaccccagaagagcgtcacctgaacaagatgcagaaccatggctatgagaaccccacctacaaatacctggagcagatgcagatttaggtggcaaggaacgcggacccctggcggaanggattgcaggtnggccggaagatccnacgattccgatcgactngcaancagnanccgctcca

SEQ ID NO: 46028 - DNA, 2451 bp, Homo sapiens
aaggtgctgttccgagaaggagaaggaaaagggcttgacacgtattcactcggccccggacgtgggaagcaagccgtctggcttcggcctcacatcggtcctgtgctcgggacggcggcgttggcggactgatccgcggcggtgaagaggcgcctgtgtctggcagagctggtgtgagacgagacaatcctgccccgccgccgggataatcaagagttttggccggacctttgagcatacaccgagagagtgaggagccagacgacaagcacacactatggcgctgaaacggattaataaggaacttagtgatttggcccgtgaccctccagcacaatgttctgcaggtccagttggggatgatatgtttcattggcaagccacaattatgggacctaatgacagcccatatcaaggcggtgtattctttttgacaattcattttcctacagactaccccttcaaaccacctaaggttgcatttacaacaagaatttatcatccaaatattaacagtaatggcagcatttgtctcgatattctaagatcacagtggtcgcctgctttaacaatttctaaagttcttttatccatttgttcactgctatgtgatccaaacccagatgaccccctagtgccagagattgcacggatctataaaacagacagagataagtacaacagaatatctcgggaatggactcagaagtatgccatgtgatgctaccttaaagtcagaataacctgcattatagctggaataaactttaaattactgttccttttttgattttcttatccggctgctcccctatcagacctcatcttttttaattttattttttgtttacctccctccattcattcacatgctcatctgagaagacttaagttcttccagctttggacaataactgcttttagaaactgtaaagtagttacaagagaacagttgcccaagactcagaatttttaaaaaaaaaaatggagcatgtgtattatgtggccaatgtcttcactctaacttggttatgagactaaaaccattcctcactgctctaacatgctgaagaaatcatctgagggggagggagatggatgctcagttgtcacatcaaaggatacagcattattctagcagcatccattcttgtttaagccttccactgttagagatttgaggttacatgatatgctttatgctcataactgatgtggctggagaattggtattgaatttatagcatcagcagaacagaaaatgtgatgtattttatgcatgtcaataaaggaatgacctgttcttgttctacagagaatggaaattggaagtcaaacaccctttgtattccaaaatagggtctcaaacattttgtaattttcatttaaattgttaggaggcttggagctattagttaatctatcttccaatacactgtttaatatagcactgaataaatgatgcaagttgtcaatggatgagtgatcaactaatagctctgctagtaattgatttatttttcttcaataaagttgcataaaccaatgagttagctgcctggattaatcagtatgggaaacaatcttttgtaaatgcaaagctgttttttgtatatactgttgggatttgcttcattgtttgacatcaaatgatgatgtaaagttcgaaagagtgaatattttgccatgttcagttaaagtgcacagtctgttacaggttgacacattgcttgacctgatttatgcagaattaataagctatttggatagtgtagctttaatgtgctgcacatgatactggcagccctagagttcatagatggacttttgggacccagcagttttgaaatgtgtttatggagtttaagaaatttattttccaggtgcagcccctgtctaactgaaatttctcttcaccttgtacacttgacagctgaaaaaaaacaacatgggagtaataatgggtcaaaatttgcaaaataaagtactgttttggtgtgggagttgtcatgaggctgtgttgaagtgacttatctatgtgggatattgagtatccattgaaatggatttgttcagccatttacattaatgagcatttaaatgcaacagatatcatttcaggtgacttaacatgaatgaataaaagtcaatgctattggattgttttttgtttgacaagtgctatctgtgccactgatttaacttctgtagtaacaagggcattaccattcttcacctttcctaattctgatcccatagttttacatttttcctgtttattttgattttgttcactgctttatttcttaaagttctagcacatctgtgactcctccacttccacatttttgcactgcttacacttacgtgcaatcttattccttgtctgcacacacatgtggaaagctagaaataaatgttaaaacttactttttataaacattttaaaaa

SEQ ID NO: 46029 - DNA, 3751 bp, Homo sapiens
gttcacagctaaacagactgctctgtgcagggagaggccctacagtgaagggaaaagtagacacttgattgtggactaatttgttcagtatttcccaaaaacttacagctaacaataatattaaacaggttttattagcatcttatacatctgacactctctcctaagcatccagtttattttctagtcacgggttacttactaaaagtctgtgtaacatgagctcacatcagattagaaaacatcaagtggggtagtatttttgactgaattaacatacaaaagaaattgcctatatcatggtatatgggctccaagggtagttcatacttcagcctcttcattcttttctgcttttgtcacctgttacagaaaatgatctataaaatcctcataaataagacatgagttttgcctgtaatgagtaggatgaaaaaaggccagtgccgcatgctatgaaacaatagcaactttacaggggaatccaaggtttgtgtgcacaaaaattataagcggcattttctgctatgctggaaaaactgaagtataaaacacaaatgaactaagcctttcaaggatgaggtatcaccaacactggtagctgtttaatatattcatcttacaactggatgctaaaaatgcaatcactgtaattaataaagttgaggaaaacacaaagattagctaacaggggtaaaagatcatttagagtaaaataaatgtgtaacattctctatgttctcaatcacctgggaaggcagtctatggaatatcaggaagtaagagttttcttgttttcaggaacatggaggtatatacacttcagaattcagaaggtaactggggctataaatagtaattaaaagaacaaaatagaagcaggggggttccattatgcaggctgtcgcccattttcctgaaatcttgatgtttttgagcctctcctatttaaggacaaaaccatttagcacaaaacacaaacctcagaaagggtgccagctggaccacaaagcactgatgaaaaggcagagaggatatacttcccaaactttcattaggatgtaaaagccattttgaaaaagtctccactctatgtcaagttgactcctcaatgcaacatgcatctcaatgaaatataatttgagtagtgttgtgttggtatgcatcatgattatgactccaagaaaaatatatctagtgcattctagaggttttgtggaggacgctgtaaaacaaagtttgaagtaaacaataataaaatacaaaaataaaaaaccagggttttttttttctccaaattcctggtttaataaggacttgtttattttgaggaaaaaaggtcccaaacatcaggctgttcacaaaaataacccacagtatcaactttagaaaacaaatcttaagactataacactaattatttttctagaggatgcatttgacatgccaactctcattcacaaaaatacattgttacatttgtgttgaactgccccacacagcacactaatgtgagggtgtaacacacatacttctaactcaaagctgctttcaagagctactcaactaaatgagattgcctttgcagttagggaagcaactactgaaccttatgtatgaatgaaaagaactgtactccctgcataacaagagattattttggagacagttgataaaaaccatacatcctttttattgttaagtcataaagaggtatcaaaattaaaagcaaaaattacagggtaagacttaacaaaactactaggagcgtcaaaggaagtgaaaatgggactaggcgcggggcaatatgaattaatgaacatgggaaggacaaggatggggagaacagtgagcatgtgctgaagatactaggggagaggatctggtgaaaaatttgatcttagacaagcgcctaggtaaagaaataatgggataagatttctaaaccccactatgtgcttaagagtcatcctcgccattggcgctgtctctgtcatcctctcctttcctcagcctctttttcatcatccttgatcaactccagctggtcatccccccgatcttcattatcatcatcatccagtaggtccccctcctcaggcagagtcatctgcacccccctcagactccatcttcacattagtctcatctttcttcacggagctgctgctctgctcctcttctgacttatcattcttcatctctactgcttgtttgctctgttccttttcaattttttccaggttttccaggagagaatccactttttgttttatctgggtcagctccttcttaatggcctgaaggtcatctcctttcaactttccagacttggaagatccccgctgtccactcttagaattgaagccacttttgccccttcgtgaagtgtttcctgatacacgctgacgtttcgagggcactacagcccgagcaataggaggaggaggaggtacacgtgctgggtaactgtacatcctatcataatagtcccgttgaaagtcatagtccaagtcaaaagaggagctgagtagaggggacggagaagggtgttctgttactgacccgtacatctccgcttgcagatcgtttcacacctgcttttcctcggttcacttttggctctgcagccaggttaatatctaaaacctggccagcaatcattctgccatcctctcctgctacagcagcccgggcatttctctcattaacatactgaacgaaggcaaagcccttatgaacagagcagcccacaattttgccatacttcgaaaagattgcctccacatcaagatttcttgacccacaagagtgttgagattcccaatgaatacacggggagttcatggagcgaggatctgtcttgttggtaacgttgctggccatcgtgtttgatggtaaggtttctcacaaagccggaaaatgtagctgaagatcaaaaaaatctcactgtaaaaaaacaaaaataaaaatagcccagattagaaaaacgggaggtgcaaaaatgtcaagtcagtaaagttcatttcttttctctttccaaaagcagtttccacaaaaaccgcaaggataaagttttcagtagcagacaagcaaagccctttccacatcatcaatcaatcttaaaaatacacgaggaagtagagaggtcagtttatgagaggctaaaaggctcctcctcctctaacccaactgctgcagaaaaaatagaaatagaaattttaaaaattacatcttaaatccaggtcccggttttggaaacaattaaaaaaaaaacacctgtacatttgctgtagtgcacaccaagttgcatcattatgtttaaaatgtctttataaaatcagttttggaatggaatgtgtgtgttctggaagggtggggaagggaggttaaaaatcaaagctgagctccagtgagtagggatggggttcgccttgctgccctgtgaaaggagaagggacagattgagtcagagttcctcagaaatgttgtgccctaaacccccaagacagaaacatctgtctactgcagctaacacattttggtaaagcattaacattccactgggatgggatagcctccatagaatcacctctaccagtgactgtcttcacaattcttcaacatcaatagatgactaaaattaactaaattcatgtcaatatgcccttgagggtctcaaaaagagtatatcccaaatgttcatcttgataatgagcagtttgggcaaagaaaatacagaaaaaccggg

SEQ ID NO: 46030 - DNA, 6743 bp, Homo sapiens
ccgcccccgacccgagctctttcgtctgcctgccagtttcctgcgtccccggagaggatcctgctgagcccagcctcccccctccccttctcctcctctcccttggagagcccgggcagccactgccccgcagccccagtgacaggaggagaccataacccccgacagcgccatggcccagattctgccaattcgttttcaggagcatctccagctccagaacctgggtatcaacccagcaaacattggcttcagtaccctgactatggagtctgacaaattcatctgcattagagaaaaagtaggagagcaggcccaggtggtaatcattgatatgaatgacccaagtaatccaattcgaagaccaatttcagcagacagcgccatcatgaatccagctagcaaagtaattgcactgaaagctgggaaaactcttcagatttttaacattgaaatgaaaagtaaaatgaaggctcataccatgactgatgatgtcaccttttggaaatggatctctttgaatacggttgctcttgttacggataatgcagtttatcactggagtatggaaggagagtctcagccagtgaaaatgtttgatcgccattctagccttgcagggtgccagattatcaattaccgtacagatgcaaaacaaaagtggttacttctgactggtatatctgcacagcaaaatcgtgtggtgggagctatgcagctatattctgtagataggaaagtgtctcagcccattgaaggacatgcagctagctttgcacagtttaagatggaaggaaatgcagaagaatcaacgttattttgttttgcagttcggggccaagctggagggaagttacatattattgaagttggcacaccacctacagggaaccagccctttccaaagaaggcagtggatgtcttctttcctccagaagcacaaaatgattttcctgttgcaatgcagatcagtgaaaagcatgatgtggtgttcttgataaccaagtatggttatatccacctctatgatcttgagactggtacctgcatctacatgaatagaatcagtggagaaacaatttttgttactgcacctcatgaagccacagctggaataattggagtaaacagaaagggacaagttctgtcagtgtgtgtggaagaagaaaacataattccttacatcaccaatgttctacaaaatcctgatttggctctgagaatggctgtacgtaataacttagccggtgctgaagaactctttgcccggaaatttaatgctctttttgcccagggaaattactcggaggcagcaaaggtggctgctaatgcaccaaagggaattcttcgtactccagacactatccgtcggttccagagtgtcccagcccagccaggtcaaacttctcctctacttcagtactttggtatccttttggaccagggacagctcaacaaatacgaatccttagagctttgtaggcctgtacttcagcaagggcgaaaacagcttttggagaaatggttaaaagaagataagctggaatgttctgaagaactgggtgatcttgtgaaatctgtggaccctacattggcacttagtgtgtacctaagggctaacgtcccaaataaagtcattcagtgctttgcagaaacaggtcaagtccaaaagattgttttatatgctaaaaaagttggatacactccagattggatatttctgctgagaaatgtaatgcgaatcagtccagatcagggacagcagtttgcccaaatgttagttcaagatgaagagcctcttgctgacatcacacagattgtagatgtctttatggaatacaatctaattcagcagtgtactgcattcttgcttgatgctctgaagaataatcgcccatctgaaggtcctttacagacgcggttacttgagatgaaccttatgcatgcgcctcaagttgcagatgctattctaggcaatcagatgttcacacattatgaccgggctcatattgctcaactgtgtgaaaaggctggcctactgcagcgtgcattagaacatttcactgatttatatgatataaaacgtgcagtggttcacacccatcttcttaaccctgagtggttagtcaactactttggttccttatcagtagaagactccctagaatgtctcagagccatgctgtctgccaacatccgtcagaatctgcagatttgtgttcaggtggcttctaaatatcatgaacaactgtcaactcagtctctgattgaactttttgaatctttcaagagttttgaaggtctcttttattttctgggatccattgttaactttagccaggacccagatgtgcactttaaatatattcaggcagcttgcaagactgggcaaatcaaagaagtagaaagaatctgtagagaaagcaactgctacgatcctgagcgagtcaagaattttcttaaggaagcaaaactaacagatcagctaccacttatcattgtgtgtgatcgatttgactttgtccatgatttggtgctctatttatatagaaataatcttcaaaagtatatagagatatatgtacagaaggtgaatccaagtcgacttcctgtagttattggaggattacttgatgttgactgttctgaagatgtcataaaaaacttgattcttgttgtaagaggtcaattctctactgatgagcttgttgctgaggttgaaaaaagaaacagattgaaactgcttctgccttggctagaggccagaattcatgagggctgtgaggagcctgctactcacaatgccttagccaaaatctacatagacagtaataacaacccggagagatttcttcgtgaaaatccctactatgacagtcgcgttgttggaaagtattgtgagaagagagatccacatctggcctgtgttgcttatgaacgtggccaatgtgatctggaacttattaatgtttgcaatgagaattccctcttcaaaagtctttctcgctacctggtacgtcgaaaggatccagaattgtggggcagcgtgctgggaaagcaatccttacaggagacccctaattgaccaggttgtacaaacagctttgtctgagactcaggaccctgaagaagtgtcagtaactgtaaaggctttcatgactgcagaccttcctaatgaactcattgaactgctggagaaaattgtccttgataactctgtattcagtgaacacaggaatctgcaaaacctccttatcctcactgcaattaaggctgaccgtacacgtgttatggagtatattaaccgcctggataattatgatgccccagatattgccaatatcgccatcagcaatgagctgtttgaagaagcatttgccattttccggaaatttgatgtcaatacttcagcagttcaggtcttaattgagcatattggaaacttggatcgggcatatgagtttgctgaacgttgcaatgaacctgcggtctggagtcaacttgcaaaagcccagttgcagaaaggaatggtgaaagaagccattgattcttatatcaaagcagatgatccttcctcctacatggaagttgttcaggctgccaatactagtggaaactgggaagaactggtgaagtacttgcagatggcccgtaagaaggctcgagagtcctatgtggagacagaactgatattcgcactggctaaaacaaaccgccttgcagagttagaagaatttatcaatggaccaaataatgctcatatccaacaagttggtgaccgttgttatgatgaaaaaatgtatgatgctgctaagttgttgtacaataatgtttccaattttggacgtttggcatctaccctggttcacctgggtgaatatcaggcagctgttgatggggctaggaaagctaacagtacttcggaacatggaaagaggtctgcttcgcctgtgtagatgggaaagaattccgtcttgctcagatgtgtggacttcatattgttgtacatgcagatgaattagaagaacttatcaactactatcaggatcgtggctattttgaagagctgatcaccatgttggaagcagcactgggacttgagcgagctcacatgggaatgtttactgaattagctattctatactctaaatttaagcctcagaaaatgagggagcacctggagctgttctggtctagagtgaatattcccaaggtgctaagagctgcagaacaagctcatctttgggcagaactggtgtttttgtatgacaagtatgaagaatatgataatgccataattaccatgatgaatcatccaactgatgcctggaaagaagggcaattcaaagatatcattaccaaggttgccaatgtggaactatactacagagcaatacagttctacttagaattcaagcctctgttgttaaatgatttgctgatggtgctgtctccacggttggatcacactcgtgcagtcaattatttcagcaaggttaaacagctaccactggtgaaaccgtatttgcgttcagttcagaaccataacaacaaatctgtgaatgaatcattgaacaatctttttattacagaagaagattatcaggctctgcgaacatcaatagatgcttatgacaactttgacaatatctcgcttgctcagcgtttggaaaaacatgaactcattgagttcaggagaattgctgcttatctcttcaaaggcaacaatcgctggaaacagagtgtagagctgtgcaagaaagacagcctttacaaggatgcaatgcagtatgcttctgaatctaaagatactgaattggctgaagaactcctgcagtggtttttgcaggaagaaaaaagagagtgctttggagcttgtctgtttacctgttacgatcttttaaggccagatgtcgtcctagaaactgcatggaggcacaatatcatggattttgccatgccctatttcatccaggtcatgaaggagtacttgacaaaggtggataaattagatgcttcagaatcactgagaaaagaagaagaacaagctacagagacacaacccattgtttatggtcagccccagttgatgctgacagcaggacccagtgttgccgtccctccccagggcaccttttggttatggttataccgcaccaccgtatggacagccacagccctggctttgggtacagcatgtgagatgaagcgctgatcctgtagtcacctattttcgtactgaaacatcgtctttacccacttctcagtttataatgggggaaaacaggcaacgtgttcttgtaacctttatttcatgaaggacttctttttgtttctaactataaacttggatcacctatgttaaaaccttatttcacattccacatcattttagaatttattttcgaaggggaatagtttcaatgttttattcacttgggctttttttcttccccctctttctttaaagaactgctcaatattcaatctgttgtgaagaacctgatttgcactctgtagtgtttaaagaaacaaagaaactctaatattgaatctcttaaatttagtgtatgtaaacagcttacaaatacgtattgtctaaatgcatttaaatctgttttattcaaagaaaagctaaagcaaaaacactggcatatgaccatgcaagactgtcagtgccaacaaagacaacactaatcagcacatcgtacactggattgcagtgcttccccagattattgaaaaatgttacagacaacttgcctgatttttaaatgagcgtaaaaggccctctaacctatgcaggtttccccattatgcatatagaaaatgctagtatgttttgctcacttcatatgtaacaggtgccccttatgttgtgctgtatcctgtgctttttctgtgggaccattccattcaggagcaaagagcaccatgattccaatcttgtgtgtgtttactaacccttccctgaggtttgtgtatgttggatattgtggtgttttagatcactgagtgtacagaagagagaaattcaaacaaaatattgctgttcttcagttttgtttgtggaatttgaaattactcaaatttaaaataaattactggactgtggaaataacatagaattgaagttttaattaaataccactcaaacgaaaagaacagtagtttttgtagttttatattggatactgaggcattagggaggcatgaaaggaagaggaatgaggattgagacatgtgaagacattgtgcattatatcaatgtgcattcctgtagttcattaacaaggtacatgcaatagtctaaagaaccagagtcactactatagtggcttaacatttaatctgtctccaatattttaaccaagtgacaccgaggtttttatcgaagcatttcacttaaatgaacaaatcatggctgttatattaacttgaaataaaatatatttaaacatgtagttaacatgctctttctcatcatgaattataaaggtgcccaaattatgggtatcttgatttttttcaaaaattggttgtgtgaatccagctcttgcttatggctgagaatgttcctaaagttcatttcactatcccttaatcctcaatagctacacatacccccttgcctagttagtcttgcactgctttacaactctcttagggcaattacctaacataagctccacagaagagttttttaaaacttaaaatccctgtcccaccaggtgtggtggctc

SEQ ID NO: 46031 - DNA, 1980 bp, Homo sapiens
aacagctatgacatgattacgaatttaatacgactcactatagggaatttggccctcgaggccaagaattcggcacgaggaagcagcggcccggggcgactgagcggacaaacggaagtgtcaggttacggtctgagacatcaccgccaagctgggcatcggggagatggccgagactgaccccaagaccgtgcaggacctcacctcggtggtgcagacactcctgcagcagatgcaagataaatttcagaccatgtctgaccagatcattgggagaattgatgatatgagtagtcgcattgatgatctggaaaagaatatcgcggacctcatgacacaggctggggtggaagaactggaaagtgaaaacaagatacctgccacgcaaaagagttgaaggttgctaataatttatactggaatctggcatttttccaagccaagagaagatcgaatggctttttgcagctaactactatgtgtagacaggttttatattataaagtatgcattcttatcaccctagtatatagttagtttgtagagtgatttccccccagtttcttgaacatggtatcttcacatcttggaccttggtcagttgtgctattcattattaaacactaaaactttggcggttcttgcataacattgtcagattttttagtgtatttctgtgaagtcattttttttcttgtcattccttttgtagtagttgctgtttggataaaagttgatgtgtgattttttattaaacaaatagtaaacccttcaattatagttagtcttggtgaagtaagatgtttgtagactttagagttctttaattcttggcacaacgtgactgttgagctaacaccaaatagtgtgttggcaatacttttcaaatggctgaaaacacctaaaaattgttcattcagaaatatctgtcactgctctgttgccaaaactcagaatagaacttagacgtatgtctgagtccctgagatcacatgctaaagtcgatggaaaagtaaccactgccactgtcttgtgtcagaacttttacagtacagaaaataacagaatagccttctgtaatgaggcgtttgttagagttttgcatgagattctaatacttcagtagggaccctacctacgtggttcatctacaatggttaccataaaaaatctggcaggattttaaaactcaatcagtctttcctttgagctagtgacttgaaaagaaagagagaaggaaaagagaccatattaagtccatgccagttgcttggctagaatatgatcaacgacttgtagtagactcaagtttttaaaaaacactattttacttaaactgtttcttatctaaattcttgcagagtgtcaatgttatcattgattatagaagacagggataatacctttatctctggccactcaaaaatgcagtgccaggagtgctaaacctagaggccaatactgatgacctggaaggtgatccatatgattgtcaccacaaagtgcttttacacaaaaacttgaaaatttgaaaaacatgatttttttaagtttctcatctcaccagtcttggtatttatattgcaaatctatcaaagtaagaaataatttgtgctgtatacaaattacatggggaacataaaggagtgagatccttctgtgataaaatgaattcaccactctggttacccaactacagaacctcctttgatcaggccagtaggttgtgatgcaggctggagcccccgaatgccccacacacactgcagcattgaccagaccatccgaaacctgcgtccctggtgatgttctcaagcctcggaagtggcaaatggaaatgatatggccggttgcggttgtaggagagttgtgacttaggcaggagtcgacctcctcaagtaatggaacgatttcaaaggcaggctgccctgaccaaaaatatctgccatgaataaaggtgcctgaaatcctgctatgaag

SEQ ID NO: 46032 - DNA, 1242 bp, Homo sapiens
tttttttttttttttttgcttccactgaatgagtctctttttattctcttggtaatctcttccagttaactacttccgttgtaggtgatgaaatgggtaaggctccacacttcagatgttggcactgctatgagcatggtctttccctttattgcaactcaaaatcagaacctttgattcttttttatattccagtcccagaagtagtctccactgtagaagttaattgatgagtagtagcctacaatcaggctctagcttctccaggaacactacaggatcaatttagtttaaatatgcattaaactaaaaggcattctctcaaatgagtttaaatgcattttatttttagacaacctacatggacatgtttttcttaaaaacaatgcctccactccaaataaatcacagtcaaaataaatgaagagctcaagatgacatcagtcccatttgtcttaagtcctggtgttgtgtggatgacaagcagaagcccagttatgatgacaggtgatagatccaaaataattgccacatttgttaacatttttccatttctaaaccatccttaaaggaaaatcatatatgggggtcacaccatcctcacggtagtccaatagagcaaccatgccatctggattcatgttttcacccaataaaggaactgggtagtttttgaaattaggcaagggatgtgcttgatttgttctgcagccccctgtcataaaaaggttttactctttctgggtctctggttcttcaagtttcccctttgattgatttcatgtaatctttgatgtacttcttgtaggcttcttttgtgaaacttgtttcctgcaggtgatggttcatgacaatatcgacaccagtgattactgtgctttcggtaccttcgccctcggggccttcagcggaggcatttccaccaatgagcgagtcatcaatgttaccttctgtcctactgaccatcttcccctccacctccaggcacaacccgtccgcgatctcccggatcttgtagatgtcggagaacatctcatcgtggctgatgaggtcccggtagataatcatgatggcgactgaagggagacgacgacggcgctagcttagcacgagcctgaaactcggagcgagcgcggtgcagccggagcggcgctcggggggaggggggagcgggcggaaaaggccgactcagccgctccccaacctcatatagagggcacgtccctctacgtcatcgcccgc

SEQ ID NO: 46033 - DNA, 1069 bp, Homo sapiens
gggaaaatggcgcctcacgacccgggtagtcttacgaccctggtgccctgggctgccgccctgctcctcgctctgggcgtggaaagggctctggcgctacccgaggtacagaagcaagtttgaggtcgggctgaagcagggtcgctggccagccagtgcgtcgcgctcgccagcggctgcccccttctcctcggcgggcctgcggttctgatttcgtccctgacgcttcccgaccctgcccagccagatatgcacccaatgtccagggagcgtgcaaaatttgtcaaaagtggccttttattgtaaaacgacacgagagctaatgcttgcatgccccgttgctgcctgaatcagaagggcaccatcttggggctggatctccagaactgttctctggaggaccctggtccaaactttcatcaggcacataccactgtcatcatagacctgcaagcaaaccccctcaaaggtgacttggccaacaccttccgtggctttactcagctccagactctgatactgccacaacatgtcaactgtcctggaggaattaatgcctggaatactatcacctcttatatagacaaccaaatctgtcaagggcaaaagaacctttgcaataacactggggacccagaaatgtgtcctgagaatggatcttgtgtacctgatggtccaggtcttttgcagtgtgtttgtgctgatggtttccatggatacaagtgtatgcgccagggctcgttctcactgcttatgttcttcgggattctgggagccaccactctatccgtctccattctgctttgggcgacccagcgccgaaaagccaagacttcatgaactacataggtcttaccattgacctaagatcaatctgaactatcttagcccagtcagggagctctgcttcctagaaaggcatctttcgccagtggattcgcctcaaggttgaggccgccattggaagatgaaaaattgcactcccttggtgtagacaaataccagttcccattggtgttgttgcctataataaacacttttttctttttaaaaaaaaaaaaaaaagtcg

SEQ ID NO: 46034 - DNA, 2542 bp, Homo sapiens
cagcttttttcaattcccatttatttttggctcttggggcgatgtcatcttttcaatatgaaaaaaagcagcaagttcaacataaaatagaaatctcaaatgtaggatagaacaaaaccaagtgtgtgaggggggaagcaacagcaaaaggaagaaatgagatgttgcaaaaaagatggaggagggttcccctctcctctggggactgactcaaacactgatgtggcagtatacaccactccagagtcaggggtgttcattcttttttgggagtaagaaaaggtggggattaagaagacgtttctggaggcttagggaccaaggctggtctctttcccccctcccaacccccttgatccctttctctgatcaggggaaaggagctcgagtgagggaggtagagttggaaagggaaggattccacttgacagagtgggacagactcctccaaagagtagagcttggagggagattgaaagtggagataatactgctgacacctccccttgaagctgagatgggaaatggacatacttagaaatttagtgactttaatagcctggatttccctctccaaaacttttagaatggaaaatcccatccccttccttatatagtgacttctacccactaccttctaccattttctactttgggcttaggatgatggccattatctacatgtgttttcagcacctggttggttctaaatgggatctggagacccagcttcttggagatttttaagaggaagtattaactggacaaatggaatgggcaccagaaagaaatacaggggtcacccagaatgggcagaaacctagggtttcccagagtgggaaagagagaggagacattcaacaaacaagtatttattgagcgcctactatgtgccaggcactgttctagaccccccccagaagaaaaaacaaaaaacaagatagaggcagcaaacacaaattctgagggagaggaaaggggcagttgagtaagacggctaagggaactgagaagcctgaggtgatgggggctctgccttaggcctcctcttcggcctcctcaccgaaatcctcctcctcttctgcggtggcatcctggtactgctgatactcagagacgaggtcgttcatgttgctctcagcctcggtgaactccatctcgtccatgccctcgcctgtgtaccagtggaggaaggccttccggcggaacatggcagtgaaactgctccgagatgcgcttgaagagctcctggatggctgtgctattgccaatgaaggtgactgccatcttgaggccacgaggtgggatgtcacagacggctgtcttgacattgttggggatccattccacaaagtagctgctgttcttgttcttgcacgttaagcatctgctcatcgacctccttcatggacatccgaccacggaagacagcagccacggtgaggtatcggccgtggcgggggtcacaggcagccatcatgttcttggcatcgaagacctgctgggtgagttccggcactgtgagagctcgatactgctggcttccacggctggtgagaggggcaaagccaggcataaagaaatggagacgtgggaaggggaccatgttgactgccaacttgcggaggtcagcattgagctggccagggaaacggaggcaggtggtgacaccactcatggtggctgagacaaggtggttcagatccccgtaggttggtgtggtcagcttcagagtgcggaagcagatatcatagagggcctcgttgtcaatgcaataggtctcatcagtattctctaccaactgatggacggagagggtggcattgtagggctcgaccacggtgtcagacactttgggtgaaggcaccacactgaaggtattcatgatgcgatcagggtattcttctcggatcttgctgataaggagagtgcccattccagagcctgtgcccccgcccagtgagtgggtcagctggaagccctgcaggcagtcacagctctctgcctccttccgtaccacatccaggacagaatcaaccagctcggcgccctctgtgtagtggcctttggcccagttgttacctgccccagactgaccaaatacaaagttgtctggtctaaagatctggccaaaaggacctgagcgaacagagtccatggtccccaggttctagatccacccaggatggcacgaggaacatatttgccacctgtggcttcattgtagtacacaggagatgcggtccagcttgcaggtcgctgtccccgtgggtaggtgccggtggggtcgatgccatgttcatcactgatcacctcccagaacttggcaccgatctggttgccacactgaccagcctggatgtgcacgatttccctcatggttaaaatttaatttttttgctcgcctcaaggtatgtatggggcaagaaaataagtaattttttttctccgcagggtcgccaggctggaaggttggaattgcgccccagagggctggagcagcgaggtgcaaacgcgacggcaggaaggttctgctcgtgcc

SEQ ID NO: 46035 - DNA, 4271 bp, Homo sapiens
  misc_feature (1)...(4271): n = a,t,c or g
gacctgtgaagacatatttcagttttattatcttttaggcatagacgggtatgttaatccatttccacaaacaattcctataatcacatatagggagtgaaccttgaacttgcaaaacctgtttcctgttgccaaagagttaaattggagagccgaaacctcaaaagttgaggatttggaattctttttcttcttagcatcttcgtgcatgtggctgccattaaacaagtaagctttcctctttatccaggcactgaatcgatggtaataatgttgtctttttttttcccggcaaactttctgctttcggtccagagctctgagtttctcatgttctgctctcgaggttctgacagctgtttttggacttaattaaccattgcaagtggaaaccaagaaataattgtagcataactctctctattgtcatgttgcttctttctgcaaatatatcttaggaagttagactttaaacctttgatctcccacaccaaaagagaaaataatatttatatggaagtaattttattttagtgtttgtgatttattgtggagagcaggtgtttaaaaattttagaatttctttaacaaaattctaaagagaaaataaaaaagaaatcacagtatttacagagataacagaatggcttagccatgcaaaacaaataactttggtttttccccttttactttgggtttaaatgttgaccaagattcaattttttttcctgccaaataaaacttcaataaaagtttagaggcaaaataacgtattttctttttttcccataatattttatacagcatcgagtctaagaatattttatgcatttaatccataccaatgcactacggaagcttttattaaacggagtcactattgcccagacagtaaatggtttacaaatgtacaataacgtatgtttctaaataatgcagaagtggcaaagtattattcctattctcatctgactttaattttcaatttatttttcattgccttcataattttttatttcatgagtctaagaaacaaacaccagttttccttttcctttcaataacatagttctatacctagaaatctgatgttcatttatcttccctttaaagttgtgtaaatcctgggaaagaaatcgctgtgcagtgttctcccagaaaccaggcttctgcttgaaagagcaaagtttaaaagtctagtcacaagtagcccatatctggtctacttcaaaaagtttccatttatactaccaccttaaaaatttcctcaagcataaaacatgtttataaagttacaaatttgaatgtaactaaagatacatagacattttattattacactttcatgtactgcttgataaattatgtatcagttaaaaacactaaattatctcaaggtgcattcaatatctgtagggtagttaacaaaaacacacacgaaaaaaatatatattctatattctgtggaaaataacacagctttgataatgaccactgttaaaaactccaattctgattgatatctttttaaacatgaaataggtataattttaaggcagtggataacccaaaggatttaacaccaatttgtaattatagtgatttacattgtgatctatgaaaatgggaatgttgaccatgatttttccaaactgtctctcacacatgcttgtgttttttcttttgacagaaaataatttattagcaggtgtctgtagaggtaagtgctaccaaattctgttttatgtctttttcagaataggtaaaattgtcagtttgggagtaccattatgtatgtgtgtctatatgcatctgtgatttatttctgagagttcgctggtggcatatcaaagagtcggctcctatggtgtctatcagtctgactctcggcctcccctcccttgtgataaaaatcacagtttttaattagggcaatatgagtgtccccaatcttcacaagctgccacctttgggttttaggtgcttatgagaaaagtttgggggcattgcctgatagcaatcagaatcagaaatgtacctgctcagattatccatataaacaattgaaataaaaacattacattatacatcagattaacagcaactcccagaacaaagcttacagtgtataaaaatagctacgtaaaaaatttacataaaaggcaaaccaaaaagaaatcctcagtgcagacatttacggaaaaaaaattgaaccaaacacaacatatgacctattatcatggctgccaaaacttgttcttattgtttgtaattaaatttcatttgttttacttgagataattctctgaaaacctgtgacagcttggtagaatgaactgccttaatacttgaaccatgaattgctgtcaatgtctttgtttatgtcttaaatacaatccacgttcatgcttcaattggtctatatgatttttatctctggacaactaggacagtttctctcttaggcttcagttttgtgattgttttcttctaactttttgttttcttccatattaccgaggtccttgtttacatgttttgatgcagtctttgacttcttcatgtacagccagtagacgacaccagcaacaagggcagcaaggaggagaccaacaacgattcccacaattagttttgcctggtcattcaccttttctctgttttcatcacttatctcgtctgcctcatcgtgttctggaatacttatagcagagacattcaaggagtttactgttctctccagttggttttctgctgtgcaagttaatgtaacattctcttcaggggaaatgataattttactataatacctgccattaatataaggagattcctctgtttggtttatgacgcttccactgccagtaattgtccactgaatggctggctttggaaaaccttccacatggcagattattgttttagatagtccactgggatcagttttctttgtcatttttatttgaggtttgccttctacaatgagagtcaatgactctcttttctttagtccttcaacctcctgcagagcagtttcgcagacatagtttccagcatcctgataatgaagactagaaaatgacgggctagatcgaagcctgatgttatctttcatccataccacagttgcattcctgctagcagatattgtgcatgacacgggtagggcatcaccaatctgtctagtcacttctccacttgggtttaaggacaaatccaaatagtgaactgtgatggctgttgaagcaatcatgctttttttgtctatcagggaacacttgtagtctcctgttgcattgcgcctcacatccgtcagtgtgtaagtatttgagcttcttattccttcgggctgtcctggtaagtaaaacaaaaattcctctgggggagggttgccattccctaagcatttaagagtgatgttatccccttctttgatggcactttttgtgtggcagcacttgtattgtcacctgctctgtaggatagtaaatatcaaatactgcctgttcagaatgaattgttttctggccagatggtccataatatgtcaccgagcaggtgaatggcatttgtatgtcagccttggttgtcttgtactccagggtggaagtcatggtatagagctgagtcactgggtccatttcctttttaaaaattatgaccaccgctccttcaaggggatgtagcacttttccattcctgtaccatgtgatattgccatctggataactgtcttctgaaatgcagtcacccaacttttttagctgctctgtttcgagaaacagtgctttgcttacaatttcaggtttagatggttgcttgaacaccttgactattgtaggtgcctcaaacacgttgtcctcagttactagcatgcacacaaatctcttttcatcactgatccttgcattactgatagacaaagtgtagttttctgagaggttcaatctgtctttgtattctggtacatcgtcgtactgcacacttttctttgtagaggatctgaaggcaataaatactggggaccatcgggcttttcatatttccatttgccaaacatgagattctgaggtacgtcaagtcggcaaggtatgataatggtatctccatatgctgaatttacagtataccatccaaggcctggcctgaagacggtggcggagatcaagaggcagaagagcagacggcaggaactggcccccttggattccatattcctcctccttcttggtgggccactgacggagtccacgccnacaggagggggcgtc

SEQ ID NO: 46036 - DNA, 1636 bp, Homo sapiens
gcgatggcggcagcggcaggtggaggggctggcgcggcccgctccctctcgcgcttccgaggctgcctggctggcgcgctgctcggggactgcgtgggctccttctacgaggcccacgacaccgtcgacctgacgtcagtcctgcgtcatgtccagagtctggagccggaccccggcacgcccgggagtgagcggacagaagccttgtactacacagatgacacagccatggccagggccctggtgcagtccctgctagccaaggaggcctttgacgaggtggacatggctcacagatttgctcaggagtacaagaaagaccctgacaggggctatggtgctggagtagtcactgtcttcaagaagctcctgaaccccaaatgtcgcgatgtctttgagcctgcccgggcccagtttaacgggaaaggctcctatggcaatggaggtgccatgcgggtggctggcatctccctggcctatagcagtgtccaggatgtgcagaagtttgcccggctctcggcccagctgacacacgcctcctccctgggttacaatggcgccatcctgcaggccctggctgtgcacctggccttgcagggcgagtcttccagcgagcactttctcaagcaactcctgggccacatggaggatctggagggtgatgcccagtccgtcttggatgccagggagttgggcatggaggagcgtccatactccagccgcctgaagaagattggagagcttctagaccaggcatcggtgaccagggaggaagtggtgtctgagctagggaatggcattgctgcctttgagtcggtacccaccgccatctactgcttcctacgctgcatggagccagaccctgagatcccttctgccttcaatagcctccaaaggactctcatttattccatctcacttggtggggacacagacaccattgccaccatggctggggccattgctggtgcctactatgggatggatcaggtgccagagagctggcagcaaagctgtgaaggctacgaggagacagacatcctggcccaaagcctgcaccgtgtcttccagaagagttgatgagggctacagctgttggggctctgccaggtcccctgggaccaactacagctccaatcagaaaccctgcgcttccttgagtgtggcttccccacttttcctgcattgtggagctgactgagtacaccggtgaggctggggtctctgccaggggaggtcactggaacagcgagcaagggactggtgcctcgctggtgctgggtctctggtttgctgcagagccgtaggacactcctggctcctcagtaggacagacagacgcaggcgggtttattttggaggggtacttgtggcattttcctgtattgtcttggacatgggatgtggggaggtggaaatgatgagcagtagcatcatttctccctgttgggttttagccagtttgccaagcaagcgcatcctagcagggtccccgagcagcaggttgtgtggatgaagggacaggcacttgcatccagctgatctaggtcacacctggctcttggctgccatgtggcttattaacagcttccagtggaagtcgcaataaacagtttttggtaaatctcaaaaaaaa

SEQ ID NO: 46037 - DNA, 1269 bp, Homo sapiens
tttgattttgcagcacttttaatacacaaagcaaaaggtaataggctggatgggtgaccaaccttcattcacatacagagcccaagtatagatacagactaattgggaaataagttagagtttgcagggccttagggctgagagccagaaacactgtccttttggcagccatggaagcgaggatttccttttctggtttcagtgcatgtacgccttcggctgctccatagcctggtgtgcctgcagcacggccactgcctcgtctatcttggcatggagggattctggagactccagcatgagcaacagctctgagttgtcaatctccagcagcatgcccgtgatcttgccagccagctgggtgtggacatcatggataagggggtagagacgctcccctgtgtggaacaccttcaatcatctgcttttgctcatgcaggggcgccgcagccagcatggacgcggtcaggggctcctgtcctgggatgtgcacagccggctcctggacccgataggtgctatgtgctgctgaggaacatttgcacggcaggagcggccggcctggtgtacagcatcctaccccactgggtcctgtggtctgagtaccaatgttggctactctctgggtatgaggcaccgtgcgtggcacctgggtggaggcctgcctgacactgctgatgtgggccggggggcgccgaggcacaactggtggccggaccattgaggcacctggagggtaggcagcttgtggtgcagacacccacagagagagaaaagttggatggagtggtgggaataatcagcggtggcacactgtgcctagaagcttccagggccaccaagggaatgggaagggaaactacaacattcacaacagaaataggagtcaattcacttagacccagaactccagaaagggggagtgtaggaatctacaatttcaaagccagctcgtgtctacctagagccccaaactgcataagcaccaggattgtacaccttagtccctcaagatagtttcaagtgagcccgagatagcttcctgaaaccgtgtgaaggaaaatgatcagaaaaagaaagaagccaaagagaaaggtacctgggttcaactaaagcgccagcctgctccacccagagaagcacactttgtgagaaccaatgggaaggagcctgagctgctggaacctattccctatgaattcatggcataataggtgttaaaaaaaaaaaataaaggacctctgggctacaaaaaaaaaaaagtcgacg

SEQ ID NO: 46038 - DNA, 406 bp, Homo sapiens
  misc_feature (1)...(406): n = a,t,c or g
gcggcacgagaactggaagaccctagaaaccctgccagagaagagtgtggtgggaaccagctccctgcgaagagcagcccagctgcagagaaagttcccgcatctggagttcaggagtattgatgtaaccctattgtaagtcaaggaccatctgtcttcacttcttgaccaccccacctctaacaccgtaggctgggaagattgtgaatcagaggccagactctagctttcatggagaaaatttacnannaaaaaaaaaggnggccannntcnccntnaggcttacccgggntttttaaaaganngggaaccccnntttnntggcnggggctttaaaaaccccggnnccnccttttgancctgttcngcntccnaaanntgcccctggggaanctttttctggggc

SEQ ID NO: 46039 - DNA, 1684 bp, Homo sapiens
  misc_feature (1)...(1684): n = a,t,c or g
cagtgttctacaccttgcttttttacttagtagattaaaaattataggaatatcaatataatgtttttaatattttttcttttccattatgctgtactcttacctaaactctggtgatccaaacaaaatggcttcagtggtgcagatgtcacctacatgttattctagtactagaaactgaagaccatgtggagacttcatcaaacatgggtttagttttcaccagaatggaaagacctgtacccctttttggtggtcttactgagctgggtgggtgtctgttttgagcttatttagagtcctagntttcctacttataaagtanaaatggtgagattgttttctttttctaccttaaagggagatggtaagaaacaatgaatgtcttttttcaaactttattgacaagtgattttcaagtctgtgttcaaaaatatattcatgtacctgtgatccagcaagaagggagttccagtcaagagtcactacaactgattagttgtttagagaatgagaaatggaacagtgaggaatggaggccatatttccatgacttcccttgtaaacagaagcaacagaagggacaagaggctggcctctacatcactctcaccttccaaatcttgtggaagtgcatctacttgccagaaccaaattaacttacttccaagttctggctgcttgcaggtggaactccagctgcaagggagttagggaaatgaaggtctttttttaaaagcttctcagccttcctagggaacagacattgggtgagccaatctgcaatttctactacaggcattgagaccagttagattattgaaatattatagagagttatgaacacttaaattatgatagtggtatgacattggatagaacatgggatactttagaagtagaattgacagggcatattagttgatgaaatggagtcatttgagtctcttaatagccatgtatcataattaccaagtgaagctggtggaacatatggtctccattttacagttaaggaatataatggacagattaatattgttctctgtcatgcccacaatccctttctaaggaagactgccctactatagcagtttttatatttgtcaatttatgaatataatgaatgaggagttctggtacctcctgtctttacaaatattgggtgttgtccagtatttttccctttttaacccttcccaattcgggtgtgtaggtggatgtttcattttggttttaatttgtatatccctgatagctataattgggtcatagaaattctttatacattctagatgcaagtctcttgtcggatatacgtattgagatattacacctagtctgtggcttgactgttttctttatgtcttttgatgaatagaagttttaaattttgacaaggtcaaatttatttttttcttttgtttgatattttttctctccaatttaaccccaagatttcagatattctgctctattatataaactttatatttttatatttgtgatctaccttgaattgatatgtatgttgtgaattatggatcagggttctttttttcccccatacaagtatccagtcattgtaacactgtttattgaaagaattatcctttcctcattaaattaccttgccaattagtaaaaaatcaattaaccataaaaaaaaaaaaagtcgacgcgg

SEQ ID NO: 46040 - DNA, 1590 bp, Homo sapiens
ccgtcttctgtgacatgaccaccgagggcgggaagtggacggttttccagaagagattcaatggctcagtaagtttcttccgcggctggaatgactacaagctgggcttcggccgtgctgatggagagtactggctggggctgcagaacatgcacctcctgacactgaagcagaagtatgagctgcgagtggacttggaggactttgagaacaacacggcctatgccaagtacgctgacttctccatctccccgaacgcggtcagcgcagaggaggatggctacaccctctttgtggcaggctttgaggatggcggggcaggtgactccctgtcctaccacagtggccagaagttctctaccttcgaccgggaccaggacctctttgtgcagaactgcgcagctctctcctcaggagccttctggttccgcagctgccactttgccaacctcaatggcttctacctaggtggctcccacctctcttatgccaatggcatcaactgggcccagtggaagggcttctactactccctcaaacgcactgagatgaaaatccgccgggcctgaagggctggccccctcaggcacctttcctcccctgggacacccatggtctccatgagtgctccctctgctgcccctgatgcatgcttctgctgattcccgagcaccaactccttacaagggggccttgtggctctcagccatgccacatccctgtcacacacccagggcatccattcctaagccagacccggctcccctacacctgaagttacactgccagcagttccccaggcctcttccgagaggcacatggttctagcctggacctggctgggctccatgagaatgagttgcctccaacctgtcccaacagctgacagccaggagccactctcccagctgcaggcctttgtggtccatcttgtcctgcttcctcactgtggacccctgtctgggccaccctagtgtgctaagctgagcagtgcagtgtgaacagggcccatggtgtattctaggccacagcccagcactcctctgggctgctctcaaaccatgtcccatcttcagcatccctcccaccaacttactcccctgtggtgagtaccgtggaaccccagcccacctcactatcatactcagcttcccctgatggcccatcccagcccctgaagctctatgccaagaacacagctaccgcacaccaccctgaaacagccacagccaaggtaggcatgcatatgaggtcttccccataccctctgggtgttgagaggtttagccacatgagggagcagaggacaatctctgcagggctgggagtgggtagggactgaaggtctcaataaaccttcagaacctgaatgaactggcttcatacacacaaacatatttgtttatcccccaaatgtaggcacctggctcctccttgctcccctgctgatggtgtcctaccccgaactccaaaaattacacctggagtcaggtgcagaagggaaccttgtatttcacaggcctcattttgatggcaaaaagacagtgtaataataacataataataataaaaatataatactgaaaaaaa

SEQ ID NO: 46041 - DNA, 2154 bp, Homo sapiens
gcacgaggaaacattgtctggcttgcactgtaaaactagttagctgaagacgacttctcaggtttcttcaggatgcctgcagcacttgtggagaatagccaggttatctgtgaagtgtgggccagtaatctagaagaagagatgaggaagatccgagaaatcgtgctcagttacagttatattgccatggacacagaatttccaggtgttgtggtgcgaccaattggtgaatttcgtagttccatagattaccaatatcagcttctgcggtgcaatgttgaccttttaaaaattatccagctgggccttacattcacaaatgagaagggagagtatccttctggaatcaatacttggcagttcaatttcaaatttaaccttactggctatgattttggctatatggtaaagttgcttacagattctcgtttgccagaagaggaacatgaattctttcatattctgaaccttttcttcccatccatttatgatgtgaaatacctgatgaagagctgcaaaaatcttaagggaggtcttcaggaagttgctgatcagttggatttgcagaggattggaaggcagcaccaggcaggctcagactcactgctgacaggaatggctttctttaggatgaaagagttgttttttgaggacagcattgatgatgccaagtactgtgggcggctctatggcttaggcacaggagtggcccagaagcagaatgaggatgtggactctgcccaggagaagatgagcatcctggcgattatcaacaacatgcagcagtgatggcgccaggctctgcagggtgggcctgatcccagagtggtgcttactgtgctgactgtgtacttatcttccccaagagaaaatgcttcttttgagcacactgtacctaccatctgcattgagcagaaagacttttgttttactgaagacaaaagatgtttttattttagacccagaagagaggagtttgctctgaatttgtaaataagtcttccccattcctcatactcgagcctctcctctctggttgcctcctgccaccagcatccatggctcatttgacacctttttaaatatcaggacaagtctgaaacaaagtagtaaaatgtatataactcttacctgttgtcattctttttcttttaaatttgttgctaatctctgataatgaagattcttactctgattctcagctgagctgtgagggcttccagggaaaatggaacaaaatggtgttcttaggtaatgggttgtagatactgagtcttcctttccttttctgacccttctcgaggacatttgctttcctcacacttttgtagtctctctttacatattactatatggaaatgaattgctctgtgctgaaatttgaagaccagataatgaaactgaaaagcaaacaattttactgaatctgtctacccttcattcatgagaactccagaatgagtgttgaccactgaagcatcttttaagtctgtgttccattgtgccattcaggtttgctgtcacatatgcatcatctgaaatcatttgaaatttttgtacaataaaatatcctggatttgatcctgaaggaaactagtaagatcagatttttgggtcatgtctgttgtattttcagtaatgtgatttcagatggtcatctggattctcccacttctctactccattatttctctacttttccttccagcaaacctgaaacgtgagggagatggattaatgtgagtaacaggaatgtgtctttaaaaagctagagtggttacatttaatcaggcagtaagataatttgggttcttgagttgttttggagtaatatcccacaactggggtaggaagctcaggacttttttctttaaagctagtcatttcaaaagcatattgtatttttttgaatgactacagtatggacaatttcaaaaaccaaaacccactttggattggtggaaataaaaactggtaactcactcaagtgaatgaatggtcttgcattttaaaagcttatgggaaactcaatttgaaatgattagaaaatgtcaagtattataagctggtatttaagatgcttgtaaatactatttatgtttttaattttgtaaaataaagatttctttttaaccactggcaaaaaaaaaaaaa

SEQ ID NO: 46042 - DNA, 2799 bp, Homo sapiens
cgccatggagaccaacacccttcccaccgccactcccccttcctctcagggtccctgtcccctccagtgaatcccagaagactctggagagttctgagcagggggcggcactctggcctctgattggtccaaggaaggctggggggcaggacgggaggcgaaacccctggaatattcccgacctggcagcctcatcgagctcggtgattggctcagaagggaaaaggcgggtctccgtgacgacttataaaagcccaggggcaagcggtccggataacggctagcctgaggagctgctgcgacagtccactacctttttcgagagtgactcccgttgtcccaaggcttcccagagcgaacctgtgcggctgcaggcaccggcgcgtcgagtttccggcgtccggaaggaccgagctcttctcgcggatccagtgttccgtttccagcccccaatctcagagccgagccgacagagagcagggaaccggcatggccaaagccgcggcgatcggcatcgacctgggcaccacctactcctgcgtgggggtgttccaacacggcaaggtggagatcatcgccaacgaccagggcaaccgcaccacccccagctacgtggccttcacggacaccgagcggctcatcggggatgcggccaagaaccaggtggcgctgaacccgcagaacaccgtgtttgacgcgaagcggctgatcggccgcaagttcggcgacccggtggtgcagtcggacatgaagcactggcctttccaggtgatcaacgacggagacaagcccaaggtgcaggtgagctacaagggggagaccaaggcattctaccccgaggagatctcgtccatggtgctgaccaagatgaaggagatcgccgaggcgtacctgggctacccggtgaccaacgcggtgatcaccgtgccggcctacttcaacgactcgcagcgccaggccaccaaggatgcgggtgtgatcgcggggctcaacgtgctgcggatcatcaacgagcccacggccgccgccatcgcctacggcctggacagaacgggcaagggggagcgcaacgtcctgatctttgacctgggcgggggcaccttcgacgtgtccatcctgacgatcgacgacggcatcttcgaggtgaaggccacggccggggacacccacctgggtggggaggactttgacaacaggctggtgaaccacttcgtggaggagttcaagagaaaacacaagaaggacatcagccagaacaagcgagccgtgaggcggctgcgcaccgcctgcgagagggccaagaggaccctgtcgtccagcacccaggccagcctggagatcgactccctgtttgagggcatcgacttctacacgtccatcaccagggcgaggttcgaggagctgtgctccgacctgttccgaagcaccctggagcccgtggagaaggctctgcgcgacgccaagctggacaaggcccagattcacgacctggtcctggtcgggggctccacccgcatccccaaggtgcagaagctgctgcaggacttcttcaacgggcgcgacctgaacaagagcatcaaccccgacgaggctgtggcctacggggcggcggtgcaggcggccatcctgatgggggacaagtccgagaacgtgcaggacctgctgctgctggacgtggctcccctgtcgctggggctggagacggccggaggcgtgatgactgccctgatcaagcgcaactccaccatccccaccaagcagacgcagatcttcaccacctactccgacaaccaacccggggttgctgatccaggtgtacgagggcgagagggccatgacgaaagacaacaatctgttggggcgcttcgagctgagcggcatccctccggcccccaggggccgtgccccagatcgaggtgaccttcgacatcgatgccaacggcatcctgaacgtcacggccacggacaagagcaccggcaaggccaacaagatcaccatcaccaacgacaagggccgcctgagcaaggaggagatcgagcgcatggtgcaggaggcggagaagtacaaagcggaggacgaggtgcagcgcgagagggtgtcagccaagaacgccctggagtcctacgccttcaacatgaagagcgccgtggaggatgaggggctcaagggcaagatcagcgaggcggacaagaagaaggttctggacaagtgtcaagaggtcatctcgtggctggacgccaacaccttggccgagaaggacgagtttgagcacaagaggaaggagctggagcaggtgtgtaaccccatcatcagcggactgtaccagggtgccggtggtcccgggcctggcggcttcggggctcagggtcccaagggagggtctgggtcaggccctaccattgaggaggtggattaggggcctttgttctttagtatgtttgtctttgaggtggactgttgggactcaaggactttgctgctgttttcctatgtcatttctgcttcagctctttgctgcttcacttctttgtaaagttaagttgtaacctgatggtaattagctggcttcattatttttgtagtacaaccgatatgttcattagaattctttgcatttaatgttgatactgtaagggtgtttcgttccctttaaatgaatcaacactgccaccttctgtacgagtttgtttgttttttttttttttttttttttgcttggcgaaaacactacaaaggctgggaatgtatgtttttataatttgtttatttaaatatgaaaaataaaatgttaaacttta

SEQ ID NO: 46043 - DNA, 2697 bp, Homo sapiens
tttttaacttcaaaaattttattttagtctcatccatcaagggcataggatacctgcatcagctgcaacttctgcttttctcctttgcctctgctcctttacccttaccgagggatatcccatacaggaagccgcctacaaccaaaagctatcttcgccttctgggttgagtgctcaagccaagtgtggaaatgcaagtcactgcttcggcagattgcaagctgcccaatataatctaagagccttctatgccagcctgcagactggagaaggttcactagtgtcacccacttgggttgtcacaggtagtaagcagaagctaactcatcaccgtagccaggtttctgtactttgtttccagacacgctacagcatagcacgttccaacatctgatcttaatctgattctgaagcacagtgaggaatcaagtgtgcttgttccagagctgattatgaactttctagaaaagcgggtcattatattgcattctttcataggagctcattatcacgacctgaaagatacctactttaccttccctccaaaatatcacatttgaaactaacccaaacttttgagaaagcaattttaatagggcataactttaagcagttgctaacttcaaacgtggaacgctttgatgactgctggctctcatgctgtctcactgacatccacgtactatgctttagtggccatcatcgcacaaggaaactggtttcatactgaagtttaagactgagttctacacctgtgggcttctacactacggaacgggagtgggggggctgaaaagcttattaatatactttgtcttagcccacactgcaaatacagcactattatggcatcttaatcaagcagagagctgttcacatgctttctacagtatctttataaataaaaggttcctttatccaccaaacaacacctgaaatgatctaagttcaaaacattagtatacaaggacctagataatgggacatgtgaaaacttagtacattcaatttaggttttggacacttagttggataaacaagtttatttgtaaatttagtcaacatacataattgacctaaaaacttcagtaaattttaaaaccacttggaaggccatctctataaaaatgattttcccaggacagtaaccagatgtaacctaacccaacaccatcttaattggcagaggttcagtgggctggagttttgtgctcctcccccacaccaagtttttataatacaaatgccacaagaaaaagaacttcggtactgtttcctcagcagaggagaaaaactcaacctagttatgagaccaaccacacaacacaatgaaaagctgcactaactagttcagaatgttagttaagatgatgctggtgtgaataactcgttttttctagagcccttataaataaaatccccccagttagtgtttgcattatcagctagagggttaacatgtggtagaatgaggacttatgcaaggtataaatgcgcatagcattttactactatgagaacaagtgcagtcagaagaaaaccaactggactctaaattacacacaccttaatgacaagactccccaccacttgtgaatgtaaaacatttaatttaaaaatgttgatactacaatatataaaatagctattataaatgcacatagtgtattctatagctgccaggtttactttttttttttttaaaggaaactgtaagttacactgtggttaagacttgtatcttcacccttgaaaaagcccacattctatcacagtgatgtatggtcagacttaacagccccaattgttaaacacttggatcaagtcataaccagttttattgcaaaaggaccctgtacacatttatcaactctagtaccttaatagctacccaacaagtcattaacatacagaaacatgcatcatgagaagcaagaagtatcacccatcccttctgcatattagcaacttgtcactcctgagcaacagtgctcacatcactgaggtctgtgaacagtcacttttcgcattcatcctgagtgaaagatggaatgacttaagtacaaatgcaacatattataaacaatttcttacaaaaaaagtcacaaattaaaccaaagtattttacagaatttactacaaaacgccataaaaactgccttcacttaagctctctctccccgtatccggcgagccaactggatgtctttgggcatgatggtgactctcttagcgtggatggcacacaggttggtatcttcgaacagacccaccaggtacgcttcgctagcctcctgcagcgcaccgatggctgcgctctgaaacctcaggtcggttttgaaatcctgcgcgatctccctcaccaacctctggaagggcagcttccggatgagcagctcggtcgacttctgataacgacgaatctctcgaagcgccacggtcccgggcctgtagcgatgaggcttcttcaccccgccggtagagggagcgcttttcctggcggctttcgtggccagctgtttgcggggggctttcccaccggtggacttacgagcagtctgcttggttcgggccattttctttcacccaacgccgaagttttaggccacttctccgaccgtcgctgcttccgctgcccgaggaagagccgcagtcgacgagcgaaaaaccagcaccgcccaacgaacgaccaaaccg

SEQ ID NO: 46044 - DNA, 4544 bp, Homo sapiens
  misc_feature (1)...(4544): n = a,t,c or g
ggtaccgtcagatgcaaagtgcctgggacagaagtggggctccgctggcgcccagctccaaaacccaggcagcgtggaaaagactagacagggaaggggttagccctcagaattacacgcgggtttgccttaccagactaccaccactggcacaacctcagacccacacccaaccgactttacctcccaggccctgattaatctcgcccggaagtaccgcccacccatgctcacttccgctatcccgtacttctgctcatctcgcgagaactgaaagcgcctatgtgacctgcgctaagcggaagttggccctcttttccgtggcgcctcggaggcgttcagctgcttcaagatgaaggtaggtgatggtggcgagtgttagactgggtttggggaacgtgaatcgagtcccagaacgcggcattgcctcagttccagcactccaggatcctggctttaggtggagaagggtctcaagtaggagaaggctcgcctttctggggcatggagctttttggccgaacggatggcaggcgattgcggctggagcggcgggccgggagcgccatggtggcgtccccgcgcccagccgggacggatgcggcgtgttgcccagtttgcggcaggcctgtggtgcggctcttgaccccggctttcttgcttcgggagggtgaacggctgcggagtgccctcgcccccagagtcattccgcggggcttgaggggaaaacgtcctgctgagtgcggcgcttcttgactgctactctgctttcacgtgcttttagtgagtacagtcggcatcttatatttcctgcttgtgtggaggcaacatgaaaggctttttgcagtggaattaactttgtagatggctctacaattacctgtatagatagtttcgtaaactatttccccccttttaatccttagctgaacatctccttcccagccactggctgccagaaactcattgaagtggacgatgaacgcaaacttcgtactttctatgagaagcgtatggccacagaagttgctgctgacgctctgggtgaagaatggaaggtaaaagttgacaaattgttgcaggtatttaagtcagagacggtaaacgccattggtaactggtatttggaatggggttcagactccgggttctggcttctgacctttggtaagttgcttccgaatgccactttataaagttagaggtattaccttggagggggggacgtagagtaagccataaaatatacgtaaagtttacatcaacataattcttgccctgcatcatgcatttggcaatatgtcacatagctgtcctcataatccccaaagtgccaaaaagggttgtatctgatttgtttgttgctgtttgatattttatcttcttagtgctgttatctctaataaaacatcggttagaaatgcgacttgaaagacatttgataattgaacttgacaagttgggaatatagacaaaactcactgaacagagaaaacgtgcttaagttcaaattggttttcataattatactttctcatataggtgtgttcacagaggtcacaatcctgtactgtataattttggaatagaaatagtaaatgtgtcattcattgtatgctcttgcagggttatgtggtccgaatcagtggtgggaacgacaaacaaggtttccccatgaagcagggtgtcttgacccatggccgtgtccgcctgctactgagtaaggggcattcctgttacagaccaaggagaactggagaaagaaagagaaaatcagttcgtggttgcattgtggatgcaaatctgagcgttctcaacttggttattgtaaaaaaaggtgagggttacttgtgttcaattttcgttgaaattgatttaaagccagttgtccaaatgcttattcatttgcagtatccagacttacagaccaatggatttgtttctctaccatcaattcaacattaaacattctgatttaggattcttaaggaagttgttgaattaaaatctcttcaactgtttcttctaaggagagaaggatattcctggactgactgatactacagtgcctcgccgcctgggccccaaaagagctagcagaatccgcaaacttttcaatctctctaaagaagatgatgtccgccagtatgttgtaagaaagcccttaaataaagaaggtaggagggattatgcaattagggcttgcttaattttggtaatttgtctatcattttgtgtgcatatcagaagataaatatgtgcctttggaaggccttagcactattcacttggagtttttacagaaaatatttgggggtggccagcatacccagttggtattaatccttgcttattatatccagtgccttgtagagtgcagtaatttcgttgaaaatctgcttgtgaatctttgatgtatacattatccaaaaataacctgactttaaggtcattgctatctggtttaggagtcacatgtttgagaattctgggactattagcaccacacactttgtaattttatatcagatgttctaaattattaatannnnnnnnnnnnnnnnnnnnnnnnnnnnnnnnnnnnnnnnnnnnnnnnnnnnnnnnnnnnnnnnnnnnnnnnnnnnnnnnnnnnnnnnnnnnnnnnnnnnnnnnnnnaccacacccagcccaaaattattttttggcttacaaaagaagttgctttaaacttctgtttcatctgtaggatatggataacaatagttaagagttgtgagaattagaagttagagaccttactcagaatactagggagcaggtgttagggattttggagctttaccttttaagaacttttgtccatatagtagacaacatactcaccagtgaggacctcaaatagcaatatttctgtggtgaaatttggggatatttatgttaaataaacagcatgtcagtcaaggttgggttttcctgacaaaatttgaaagaatttctctggattttagcttttcaggactggtgtgacttaacatacatggcatagatagtatacgtctgttaagtcagtaattacacttacttgagcacaggtactgttcaaggtgctgagaatacagtatagacaaatttcctacccttatgaagctgatgttgcaaaaaaaaaaaaaaaagcaattgacaaataggtggcagttgcccataaccatagccctggaaataatccgtataatacaagcgtggtctggttgatgggtatttttagatggttcttatgtctatagtaggaggcttaacattttagcagaatctgaacatctgagcatttagcctaaggcagttaactccctacaaagtgtccatgaaacaaatacatctgaaaaggcctatgctccaatgcagatctgtaatccatgagcagttttggagtacagatcagattaatgaagatactttaacaacatgccacctaatctgatgttaatagttaacgttacccctgaattggcaggaattgtcaaaggaaatagagatgcaagcttacatcaaatttaaaagtatggcaggatgattatgtagataatgtgttaagtggttttcacagacaaattaactatgcacagttatatattaacataatgccactgtattttagtaaaactggaaggtagtaaaagttagcctggttatttttcaggacttggtttcccttatatttttataatatttaaccaatcttctagatttctgtggaggggcaaaaagcattttagaatagttctgatttgattttaaaggcctcattataggttttcatagatgctgttaagcttacgtttatttctgatgtttttaaagtagatgtggattctaacaaaacaaatattgaaatgattgagtcctttgaatttttaggtaagaaacctaggaccaaagcacccaagattcagcgtcttgttactccacgtgtcctgcagcacaaacggcggcgtattgctctgaagaagcagcgtaccaagaaaaataaagaagaggctgcagaatatgctaaacttttggccaagagaatgaaggttagtctaagatgatttgagggggtgggaggagttcgacctggctttggatttgcgtctttaacccagaaaggccttaactgcttgctgttttgttttgtttaggaggctaaggagaagcgccaggaacaaattgcgaagagacgcagactttcctctctgcgagcttctacttctaagtctgaatccagtcagaaataagattttttgagtaacaaataaataagatcagactctgatctctgttgacttttcattgctgatagaaaactacataaatgaagagagggaaagttaggtcatagaaaatggggatatgtatatatggtattccaatggtggataaagtcagacctattgtgtgtggtagtggaagacaaggtcagtgtacaggggttcctttcaggggatgggtggcacaggaagggattctgagcataagacacctgcctcttcagaatggcatggaacttaggggaaatgatgaggact

SEQ ID NO: 46045 - DNA, 630 bp, Homo sapiens
gtcatatgtaattcacatgtcggtcacacgtcagtgaggtggaggaacggtgtgtggaggctccagggcctgcctgttccaggtctatcactggtttctcccttcactctaaacaggccaaacgtaccaagaaagtcgggatcgtcgggtaaatacgggacccgctatggggcctccctccggaaaatggtgaagaaaattgaaatcagccagcacgccaagtacacttgctctttctgtggcaaaaccaagatgaagagacgagctgtggggatctggcactgtggttcctgcatgaagacagtggctggcggtgcctggacgtacaataccacttccgctgtcacggtaaagtccgccatcagaagactgaaggagttgaaagaccagtagacgctcctctactctttgagacatcactggcctataataaatgggttaatttatgtaacaaaattgccttggcttgttaactttattagacattctgatgtttgcattgtgtaaatactgttgtattggaaaagcatgccaagatggattattgtaattcagtgtctttttttagtagtcaaatggtaaaatgcagcataagaatataagtcttcaaagttaaaaaaaaaaaaaaaa

SEQ ID NO: 46046 - DNA, 1664 bp, Homo sapiens
tttgccagtttttttttttatttgtaaagctctgccataaacttctagcgtgtgccaatggtcacctgccacactcgcaccaggttgtccgtgtagccagcaaacagagtctgcagggaagaaatgacagtgacaggtcaggctggcataaattctgcagtctcactagattcagcccaagtggctttttttgagatccgtccaccttgctccattgtctaggctggagtgcaggggtgcgatcctggctcactacagccttaagcccctgcagttcaagagatcctcccacctcagcctccagtaggcatgtgccacaacgccgggtagactgtaagaaaccgctctcatttcaacagccagcttgtaagtggtggttatgtattccttgaggaagaaacagctggtgataaggctccagacatttgaaaactggtcagattaattaaggtattaattgaaggctgacagccactgcgttccacatcagtcttccctctgatgcagaaacacattcactggcatggcaaacgagggcatcctcatcaacctggcttgtcatttcactttatgccaaggacactgctcttgtgtctgacagactagatatactaacagaatgagagggagaaaattaactggaagcagaatcacctgagaggacagacccacttacctggccatcagcagaccaggccagggaggtgcactggggtggttctgccttgctgctggtactgataacttcttgcttcagttcatctacaatgatctttccctctaaatcccagatcttgatgctggggcctgtagcaggcacacagccagtagcggttagggctgaagcacagggcgttgatgatgtccccaccatctagcgtgtaaaggtgtttgccttcgttgagatccccataacatgggcctggccatccttgcctccagaagcacagagggatccatctggagagacagtcaccgtgttcagatagcctgtgtggccaatgtggttggtcttcagcttgcagttagccaggttccataccttgaccagcttgtcccagccacaggagacgatgatagggttgctgctgttgggcgagaagcggacacaagacacccactctgagtggctctcatcctggacagtgtatttgcacacacccagggtattccatagcttgatggttttatctcgagatccagagacaatctgccggttgtcagaggagaaggccacactcagcacatccttggtatggccccacaaatcgcctcgtggtggtgcccgtgtgagatcccagaggcgcagggttccatcccaggagcctgagagggcaaactggccatctgaggagataaccacatcactaacaaagtgggagtgaccccgccaggagcacgctgtggaattccatagttggtctcatccctggtcagtttccacatgatgatggtcttatcttagtccgtacctcgagaggcggagaggatcatgtccgggaactgcggggtagtagcgatctgggttacccagccgttgtggcccttgagggtgccacgaagggtcatctgctcagtcatggcggcggcgagagcgtgtgtcgctgcagcgacgaggatggcactggatggcttagagaaactagcaccacaacctctcctgc

SEQ ID NO: 46047 - DNA, 2779 bp, Homo sapiens
  misc_feature (1)...(2779): n = a,t,c or g
gaattcctgtaaataaaattaatgaggcatttattgaaatggcaaccacagaggatgctcaggccgcagtggattattacacaaccacaccagcgttagtatttggcaagccagtgagagttcatttatcccagaagtataaaagaataaagaaacctgaaggaaagccagatcagaagtttgatcaaaagcaagagcttggacgtgtgatacatctcagcaatttgccgcattctggctattctgatagtgctgttctcaagcttgctgagccttatgggaaaataaagaattacatattgatgaggatgaaaagtcaggcttttattgagatggagacaagagaagatgcaatggcaatggttgaccattgtttgaaaaaagccctttggtttcaggggagatgtgtgaaggttgacctgtctgagaaatataaaaaactggttctgaggattccaaacagaggcattgatttactgaaaaaagataaatcccgaaaaagatcttactctccagatggcaaagaatctccaagtgataagaaatccaaaactgatggttcccagaagactgagagttcaaccgaaggtaaagaacaagaagagaagtccggtgaagatggtgagaaagacacaaaggatgaccagacagagcaggaacctaatatgcttcttgaatctgaagatgagctacttgtagatgaagaagaagcagcagcactgctagaaagtggcagttcagtgggagacgagaccgatcttgctaatttaggtgatgtggcttctgatgggaaaaaggaaccatcagataaagctgtgaaaaaagatggaagtgcttcagcagcagcaaagaaaaagcttaaaaaggtggacaagatcgaggaacttgatcaagaaaacgaagcagcgttggaaaatggaattaaaaatgaggaaaacacagaaccaggtgctgaatcttctgagaacgctgatgcatcccaacaaagatacaagtgaaaacgcagatggtcaaagtgatgagaacaaggacgactatacaatcccagatgagtatagaattggaccatatcagcccaatgttcctgttggtatagactatgtgatacctaaaacagggttttactgtaagctgtgttcactcttttatacaaatgaagaagttgcaaagaatactcattgcagcagccttcctcattatcagaaattaaagaaatttctgaataaattggcagaagaacgcagacagaagaaggaaacttaagatgtgcaaggagatttaatgatttcaaagaaaataatggttctttgtttttaatgttaaccttttttaaatacaatactgatagttagaagaaaactattgtactcttttgttttagtggagaaataatagatgtctgttcatgtgttaagtgttatagcaaaaaaaatacacatatggttaagttaatgaatagtttttgttttatcagaatggcaacagacagaagtactttgtagagattgacttcctaagctacttaagacaacttgcaccactaagaaaaaaatgtagaaccatttggaaaaatgaaatttagtagttccaagtttcaaagaaatgtcaacattttattccattcaataaagaacaaaaccaatagtgtttttattactttcatctgaaacattccatgttttaatctgaggccttggcagactttcatttggagtttgaacccgttttggttgcatttcatttttggagaacttaattaacgtgagattggcaattgaaatgcaggtgcagttttctgttaatgtcatgctgttgtttaggtaataagaaatattaagtaattggctttagattttgtaatttttttccctgagttcctgctagatttcgtattctagtagtcaatgtattttcagtgaaatgcaaaaatattcccgttatctttgaccagtattaatttttgagatcttactgcttgtcacttgaatcccgtgattgtcatacatctctggtataagcaacatttgatttttgaagtgtgtagaccatctcttcatattttcaagatgtaattttacatttctgcatttttaaaacagtttggccataatcctagatgcacgcttctaattcatgtacctgcacatgtgacctttgtgaacagaaatttgcatgtataatttgtgtttacttgtaactttctggttatatactgcttatatctgtggattcaagttactgaagtgaataccaataaaaagaaaaccctaggccatgttaattggttatacatgtttggaatgttaaccaacgtatttgtcagttgtggtttttattcgctcttaaactttgtgcatggctttaacaatttattacttttaaatctagagtgaattctaaagactgccgctaaagatctgagttttaaaaatgttgttgctggtggatttcttgttcctgttacataactaaaagtgaggccatttgtggtttttaaaaaccttatgaattaaaaatgctacaggtgaacaaacagaagcttatgtttagagatattgatgacttaacagtacaattggaagtaatacggatgagcaagaattagttctgcagcttttcaaaataattacgtagagactcttggtatattggattatctgttgtaaacaatttttttttcttccctgacacaggggtctcactctgtcacccagactgggagtgcagtggccncagttctctgcaacctcagcctttgggctcaatgaccctnctacct

SEQ ID NO: 46048 - DNA, 321 bp, Homo sapiens
gcgtgccgccacccgatggaagattcgatggacatggacatgagccccctgaggccccagaactatcttttcggttgtgaactaaaggccgacaaagattatcactttaaggtggataatgatgaaaatgagcaccagttatctttaagaacggtcagtttaggggctggtgcaaaggatgagttgcacattgttgaagcagaggcaatgaattacgaaggcagtccaattaaagtaacactggcaactttgaaaatgtctgtacagccaaattcatcaattatgtgaagaattgcttccggatgactgaccaagaggcta

SEQ ID NO: 46049 - DNA, 1195 bp, Homo sapiens
  misc_feature (1)...(1195): n = a,t,c or g
tttctcctggcagtggtgagccagtggtacgagctgtggtgtttacagcaagcatggagatctatggctctgtgtggcagataaactggacaatagcagaagcattcttaagaggagatattacagacagcactgcactttggagttgggcagctacatcaaggacctctctgtggtccacagtgacctctccagcattgtgatcctggataactccccaggggcttacaggagccatccagacaatgccatccccatcaaatcctggttcagtgaccccagcgacacagcccttctcaacctgctcccaatgctggatgccctcaggttcaccgctgatgttcgttccgtgctgagccgaaaccttcaccaacatcggctctggtgacagctgctccccctccacctgagtnnangnnnnnggnagnnnnagnganagntactatgtttttgaaatcagtgagacttacaacaggctggccttgggaacacattcaacagcaccctgaggagccccttgaaggaaccacatggacacactccttgaaagctcaattactctccttgcctttttgggtgtggacagttatttttctggtaccttacttacagatgtttttgttcctatactcttgtacaagagctgatcccaaaacagtggggctactgtatcatccctatatggcttggcagttatttggcaatcgccaccaggcatttgtcaaggcttctaatcagatcagcagactacaactgattgacacgtaaaatcagtcaccgttttttccctacgattacaaaactgccagtcctatatggagtctgatcacaagactgcagtttcttcacagatctcaggaagttgtcgtggggcagaggctttttaaaaacatgtgattagggagctatctttatctgaataataacgaatttttaggtaaaacctgagatagagtactacaaaatcatgttgatgacttcagattttggaagttaaatcatgtctgttatttgcattctttagaaacttgactaagtacctgaattcatatttctattctactgtgcaacatagtgatgattcagaaatttttcctttggggaaaaaaatgaatatgaacatttccattgtgttaagtgtaaaaaggtccagacatgatcataaaatttaaattttatacaaaaaaaaaaaaaa

SEQ ID NO: 46050 - DNA, 522 bp, Homo sapiens
tgggctccaaccccttagctctgtctgagaattatggttttactgctacgtctctaacagactcttctctcctggtctccttgagcagtgctacttaaacagttttcacagtttcattgattgactctacctccttgccccacaccacttttgcaatctttaaactttcagtggctgtgcagagtcgagggaggaaccagctctctggtttactggaacatagtcttccatctataccactagggttttgtcttatgtttacttttggtaactctcttccttctttttctccctaccccccaacccctagcccaaccaatgctagaatttcttgctctgaaggaggagcaggtgaaacaggtggtaattttccttctcggccctattctggttcattcagcactttttggtgggaactgttggaaattccagggtaaggaggaagatgcctgttctccctgctgaagagggagatgagacagctctctggacaggaattaacaaacgctggagcagcccaga

SEQ ID NO: 46051 - DNA, 588 bp, Homo sapiens
aatttgccctcgaggccaagaattcggcacgaggggaagatggcggacattcagactgagcgtgcctaccaaaagcagccgaccatctttcaaaacaagaagagggtcctgctgggagaaactggcaaggagaagctcccgcggtactacaagaacatcggtctgggcttcaagacaccccaaggaggctattgagggcacctacattgacaagaaatgccccttcactggtaatgtgtccattcgagggcggatcctctctggcgtggtgaccaagatgaagatgcagaggaccattgtcatccgccgagactatctgcacttacatccgcaagtacaaccgcttcgagaagcgccacaagaacatgtctgtacacctgtccccctgcttcagggacgtccagatcggtgacatcgtcacagttgggcgagtgccggcctctgagcaagacagtgcgcttcaacgtgctcaaggtcaccaaggctgccggcaccaagaagcagttccagaagttctgaggctggacatcggcccgctccccacaatgaaataaagttattttctcattcccagaaaaaaaaaaaaaa

SEQ ID NO: 46052 - DNA, 1234 bp, Homo sapiens
  misc_feature (1)...(1234): n = a,t,c or g
ggcaaaggatttcattttggggcacagcagggtgttttaagggctgtgacttcagctaatgatcttttcttcagccccaccccctccccactagcttcgatcttagtatattgggggaatgcaggtgggggggtgttcaccatattttttctgagctgggcctttttttctcatcagattgtccaggctatattccacctgcctcttttgccctcttgagtagagttgcacacagcacatgggcaactgaagcagggttgaggggctctatctctctctctcctctgctgatgggacccttttcccctcaccctctgcccttctaagtcatagactaggtaggaaggccctatattggtccccagcatctactgaggcagacctgcaacagaagtggcattcagtccccagcagacatgggtgagctcaccccagcactgctgttgggaaggtgactgcaggaaaccaattcttacaagatccaggcccagcctttttgacctgcttgagagggaagaaggggtgtttagcatttaatagtttgcttgtcttccactcctgccaggaagtgtttatttgcctctaattgggcctgagagaccatagggaggttggggctcactgagggattggctgaggatgtataaagcaaaggctgtgagaagcagttgggagtttggttgtcattggattgaatttacttttttgtttctcacccgcaacttgagccaggacagctggtccaagtggccacagtgatgggtttaagtaccttggtagggctggcaccagtggaaacacatactgaagctgccaccacaatagcttgtgaggttttatccagctttggttagaccctgcatgaccaaatttgacctgcccttgtttatggcaagaagggcatttttctcttcaatttccagggtttcctaggacccagttcctcatgtaagggaggaagaccaaggtctttgtgttttcttcctcatggaattgaacctgacattttctggatctcctgcatgtcaggagcatcagtgaggcttcagctccttcgtctccactccagagaggaggtggctatgtcttcttaagcctctggcccttcagagggttcctccctatcttcctgggcttagttaaccactagggttaccagggtcttttaggggggcctgagagagggcctcttaggagaatccaggggaaactntgagcccaggattgcccatct

SEQ ID NO: 46053 - DNA, 2006 bp, Homo sapiens
tcagcagacatgggatgttcgtttatttgggcaaatgtgtctcgttagggtcattctgaaaagaagcccagtgtgcagtcattagcccctggggtagcgttgctactaagtggttggggagaagtcagggaagaggaagaggtggcgttccccagcctcacccgtggagaccccagcgaagggtcatggcaggcactgctggaggagcgaaggccaggtggacacgaggacagattccagaggcttggttttattgtgcagttttctttgtcctcaatgagatgccataagctgtggtggcactatacacagtcacagaacaggaagaaccaccgggtgggggctgggggttgggaaaagccatttcctgagaagtgtccggctcctgggtctcactccatggcttgcctcaggccccgcagaagtccctgagaaggcaggcctgcggggcagggggctgtctgaggggctcaggcaccagccagcaggggctggcactgatgggcgaaggggaggaagtgcctcccttagaaacttgggccaaaccctgtgcagctctgggactccaccccacctgacttggaggctgtgggtcagagctctggaagctcttgggagcttgggacagcctgagagggtcttgtcctcctttgtagccctctccactgtgggtggaggcagggaggggcagcagggccatgcttttagcttccttaggcagggagggatgatgaaccctcatcctttacctccttctccaaccctccactagcgctgctttcctggtcaaacctgcatcttcactgggtcatgccccaaggcctctgagggacttccacagtggtaaggagggctgccctttttatttttttttggttgtggctgagaatgctggagatgctcagttctctccctcacaaggtaggccacaaattcttggtggtgccctcacatctggggtcttcaggcaccagccatgcctgccgaggagtgctgtcaggacagaccatgtccgtgctaggcccaggcacagcccaaccactcctcatccaagtctctcccaggtttctggtcccgatgggcaaggatgacccctccagtggctggtaccccaccatcccactacccctcacatgctctcactctccatcaggtccccaatcctggcttccctcttcacgaactctcaaagaaaaggaaggataaaacctaaataaaccagacagaagcagctctggaacaaaaagtacaaaaagacagccagaggtgtgcggagagggtgaggtggccgcgtggacgtgggtagataatcgcatgcagcactggaactcctgatgaggggtggggtccccacttctcctcaaggtttgagggattgcggggagggggtcagctgactcagagaagtaggatctctgcactggaacttgaggcttcctgtctcctccatgggccccaccagtcacagggacatgaaatccgtggcctggaggagggagagggagagcaggagcagcagcagccacgaggtgttctgagccagcagctgatgccctcacacttgaccagtttgtctctgagcactgtgacgttctgggaggagatgggtggggaatggccagagtggtggagtgcaacacgtgtaggtgccctcgtccttgctagtgaaaggcggataagtagaggaccttcatgttgtatttgctggtgaaagttggttcgggagcggtatgtgtgctcaggcacccccacagtgccaaagagcacgtgcttctttgtctcacgggtcaggctgaactcgtactggatgggtgaactgctggtattctcatggcggcagtccagacgaaggctctggtccactaggcaggccgttaggctggtcaccttctgccctcgggagacctgcaagactgttagcaggagagcgatgctgatggccaggttcatggttctgggatctcagtcctggatctggactggggtcttccgctgctgcagcctcc

SEQ ID NO: 46054 - DNA, 900 bp, Homo sapiens; identical to SEQ ID NO: 14234
  misc_feature (1)...(900): n = a,t,c or g

SEQ ID NO: 46055 - DNA, 2744 bp, Homo sapiens
ggcacgagggtggatcctgagctgccgaagccgccgtcctgctctcccgcgtgggcttctctaattccattgttttttttagattctctcgggcctagccgtccttggaacccgatattcgggctgggcggttccgcggcctgggcctaggggcttaacagtagcaacagaagcggcggcggcggcagcagcagcagcagcagcagcaatctcttcccgaacacgagcaccacaggcgcccgaaggccggaacaggcgtttagagaaaatggcagacgatattgatattgaagcaatgcttgaggctccttacaagaaggatgagaacaagttgagcagtgccaacggccatgaagaacgtagcaaaaagaggaaaaaaagcaagagcagaagtcgtagtcatgaacgaaagagaagcaaaagtaaggaacggaagcgaagtagagacagagaaaggaaaaagagcaaaagccgtgaaagaaagcgaagtagaagcaaagagaggcgacggagccgctcaagaagtcgagatcgaagatttagaggccgctacagaagtccttactccggaccaaaatttaacagtgccatccgaggaaagattgggttgcctcatagcatcaaattaagcagacgacgttcccgaagcaaaagtccattcagaaaagacaagagccctgtgagagaacctattgataatttaactcctgaggaaagagatgcaaggacagtcttctgtatgcagctggcggcaagaattcgaccaagggatttggaagagtttttctctacagtaggaaaggttcgagatgtgaggatgatttctgacagaaattcaagacgttccaaaggaattgcttatgtggagttcgtcgatgttagctcagtgcctctagcaataggattaactggccaacgagttttaggcgtgccaatcatagtacaggcatcacaggcagaaaaaaacagagctgcagcaatggcaaacaatttacaaaagggaagtgctggacctatgaggctttatgtgggctcattacacttcaacataactgaagatatgcttcgtgggatctttgagccttttggaagaattgaaagtatccagctgatgatggacagtgaaactggtcgatccaagggatatggatttattacattttctgactcagaatgtgccaaaaaggctttggaacaacttaatggatttgaactagcaggaagaccaatgaaagttggtcatgttactgaacgtactgatgcttcgagtgctagttcatttttggacagtgatgaactggaaaggactggaattgatttgggaacaactggtcgtcttcagttaatggcaagacttgcagagggtacaggtttgcagattccgccagcagcacagcaagctctacagatgagtggctctttggcatttggtgctgtggcagaattctcttttgttatagatttgcaaacaagactttcccagcagactgaagcttcagctttagctgcagctgcctctgttcagccacttgcaacacaatgtttccaactctctaacatgtttaaccctcaaacagaagaagaagttggatgggataccgagattaaggatgatgtgattgaagaatgtaataaacatggaggagttattcatatttatgttgacaaaaattcagctcagggcaatgtgtatgtgaagtgcccatcaattgctgcagctattgctgctgtcaatgcattgcatggcaggtggtttgctggtaaaatgataacagcagcatatgtacctcttccaacttaccacaacctgtttcctgattctatgacagcaacacagctactggttccaagtagacgatgaaggaagatatagtcccttatgtatatagctttttttctttcttgagaattcatcttgagttatcttttatttagataaaaataaagaggcaaggatctactgtcatttgtatgcaatttcctgttaccttgaaaaaataaaaatgttaacaggaatgcagtgtgctcattctccctaaatagtaaatcccactgtatacaaaactgttctcttgttctgccttttaaaatgttcatgtagaaaattaatgaactataggaatagctctaggagaacaaatgtgctttctgtaaaaaggcagaccagggatgtaatgtttttaatgtttcagaagcctaactttttacacagtggttacatttcacatttcactaatgttgatatttggctgatggttgagcagtttctgaaatacacatttagtgtatggaaatacaagacagctaaagggctgtttggttagcatctcatcttgcattctgatcaattggcaagaaagggagatttcaaaattatatttcttgatggtatcttttcaattaatgtatctgtaaaagtttctttgtaaatactatgtgttctggtgtgtcttaaaattccaaacaaaatgatccctgcatttcctgaagatgtttaaacgtgagagtctggtaggcaaagcagtctgagaaagaaataggaaatgcagaaataggttttgtctggttgcatataatctttgctctttttaagctctgtgagctctgaaatatatttttgggttacttcagtgtgtttgacaagacagcttgatatttctatcaaacaaatgactttcatattgcaacaatctttgtaagaaccactcaaataaaagtctcttaaaaaggcaaaaaaaaaaaaa

SEQ ID NO: 46056 - DNA, 459 bp, Homo sapiens
  misc_feature (1)...(459): n = a,t,c or g
gatnttgacangattacgaatttaatacgactcactatagggaatttggccctcgaggccaagaattcggcacgagtcttggccaagatcctgagagcatttccttcctctctgtgcctctgtgtcagcgttgagggtactgaggctcaaggctgtcctgctccacgtcatgcggtttgtcccagggctgttggctgagccccagtgctctgaccaggctttgagcagcaggattagataggaggcaggggacattgcctcttcggggttcaggacagaaagtcgaagtcgccgtcttcccaggctgtgcctggagcctgggactttcctttggagtgcaaacaggaggctgcttggccttcccagcatgaagggagaggacatggggcttctcttcctctgctctgagtgggaaaggagctctgagggctggccccgcacagaggagggggcaatgga

SEQ ID NO: 46057 - DNA, 483 bp, Homo sapiens
  misc_feature (1)...(483): n = a,t,c or g
aannccnattgaantcanagctatgacatgattacgaatttaatacgactcactatagggaatttggccctcgaggccaagaattcggcacgagctgaggctcaaggctgaactgctccacatcacccagttggtcatgggcctgctggctgggccccagtgctctgtccaggctctgagcaatcagtgtggttgggggtgctggaaacattgactcttcagagttcaggacagaaggttctggctcgcagtctcaatattcctgggttgtatgtgcacgtgggaccttcctggtgcggtaaaacaggagggtccttgcccttcccagcgttagtggagaggacatggggcttctgttcctctgtcctgagtgggaaaggagctctgagggctggccctgcacagaggagggggcactggagactcactgacccactgctgtaccttctgcatctnctcctgccactgcgtttcctctttctt

SEQ ID NO: 46058 - DNA, 1936 bp, Homo sapiens
tctagacagtggcgcaagagactggggttgcactgggactccaggaaaggcttagctgttgacgaaggaccggggcggggccggggggcggggcgaaggccaggatctccaggtacccggaaccccaaggggcgggtgtagcaggcaatcttggcgaaactgggaagggcgggcaggagggcagggaagccgctcacccaggcacaaagcgcctcccgcttgagcggactccaaagggacggtccgcggtgtgcagcgagctgcgctcaggggaccttgcgcccggcccttctgctgcacacagcccacccaggacctcccgcagcgctgacaggcggggcgggtgcaaagacggggcggggtctctgcgcccggccccctcccctgactatcaaagcagcggccggctgtttgggtccaccacgccttccacctgccccactgcttcttcgcttctctcttggaaagtccagtctctcctcggcttgcaatggaccccaactgctcctgcgccgctggtaaggaacgccgggttccgtgcctggggatgctcgattcccagacaccatagagagtgttcctgggtttgagaaggtcgtattttgagatctcaactgtaggggactccttgacttagtccagtgctttcctcttggccaagatcctgagagcatttccttcctctctgtgcctctgtgtcagcgttgagggtactgaggctcaaggctgtcctgctccacgtcatgcggtttgtcccaggggctgttggctgagccccagtgctctgaccaggctttgagcagcaggattagataggaggcaggggacattgcctcttcggggttcaggacagaaagtcgaagtcgccgtcttcccaggctgtgcctggagcctgggactttcctttggagtgcaaacaggaggctgcttggccttcccagcatgaagggagaggacatggggcttctcttcctctgctctgagtgggaaaggagctctgagggctggccccgcacagaggagggggcaatggagactcattaactcactgctgtacctcctgcaggtcactcgccgctcactggcttttttttctctttctcgcaggtgtctcctgcacctgcgctggttcctgcaagtgcaaagagtgcaaatgcacctcctgcaagaagagtgagtgtgaggccatctccatggtctggggctgtggctaaggttgggatggaacccaaggctggccctgagtgcatgcttctggggaactggccttcctttgtccccgtaggttgtcactgcctttctagtcttctgccctgtgcagggcgcctgggcagctttctcataggaagacccaccccagatatttcccagttgtctcctgacaaagccataccctcctgaactgagggtcctttgtggctggaggctctgttgggggcctctgttggggagggaggtccctgggcaagttggctgtgacctctcatgctcctcttcttccccaggctgctgctcctgctgccccgtgggctgtagcaagtgtgcccagggctgtgtttgcaaaggggcgtcagagaagtgcagctgctgcgactgatgccaggacaacctttctcccagatgtaaacagagagacatgtacaaacctggattttttttttataccaccttgacccatttgctacattccttttcctgtgaaatatgtgagtgataattaaacactttagacctgattctgacttcagtttcccttatgtgcttcagaaatcagagactggggtgggggatcgaactagggttgcagactcctgggctctaaatggaaatctgagtccctaacaatcagagtgcattaaggcaagccaggctgcctcactgtgcttcctcttctgtagaatggaataacacttcatcaggtcattggtggggatcc

SEQ ID NO: 46059 - DNA, 1616 bp, Homo sapiens
ggacactgcagccggagcccgggaggggccgcgccgccaccgtctgaactaggatgtcccgacatgaaggtgtcagctgtgatgcatgtttaaaaggaaattttcgaggtcgcagatataagtgtttaatttgctacgattacgatctttgtgcatcttgttatgaaagtggtgcaacaacaacaaggcatacaactgaccacccaatgcagtgcatattaacaagggtagattttgatttatactatggtggggaagctttctctgtagagcagccacagtcttttacttgtccctattgtggaaaaatgggctatacggagacatctcttcaagaacatgttacttctgaacatgcagaaacatcaacagaagtgatttgtccaatatgtgcagcgttacctggaggcgatcctaatcatgtcacggatgactttgcagctcatcttacacttgaacacagagcccctagagatttagatgaatcgagtggtgttcgacatgtacgtagaatgtttcaccctgggccggggattagggaggtcctcgtgctcgtagatcaaacatgcactttactagcagttgctactggtggactttcttcttctcagagttcatattctccaagcaatagggaagccatggatcctatagctgagcttttatctcagttatcaggagtgagacgttctgcaggaggacagcttaattcctctggcccttccgcttctcagttacaacaactgcagatgcagctgcagctagaacggcagcatgcccaggccagcacggcaacaactggagaccgcacgcaacgcaacccggcgtactaacacaagcagtgtcaccactacaatcacacaatccacagcaacaaccaacatagctaatacagaaagcagtcagcagactctacagaattcccagtttcttttaacaaggttgaatgatcctaaaatgtctgaaacggagcgccagtccatggaaagcgagcgtgcagaccgcagcctgtttgtccaagagctccttctgtccactttagtgcgtgaagagagctcatcctcagatgaggatgatcggggggagatggcagattttggtgctatgggctgtgtagatattatgcctttagatgttgctttagaaaacctaaatttaaaagagagtaataaaggaaatgagcctccaccacctcctctttgatgacatcccaattcgcagacaatgtcctctgtgctgtatttgccaatgaaagtggacaacaactatcttgggtttgtttggtgattgtaatttcaggtctgtcactcttgttacattgtgtacattcaaaaggaagagagaaaatatatatgataatcatttccacttaactaatttttacttctagcaggtaaatgtaggtagcagtgcaggggtgatctctgcttcctgtaccttgacatgcaaaaggctctcctaatactccacattcaaactgaagaggaaaattgaaatctctaatgaagctgctgtgtgtatttatgaatattaatgaataaaaactgcttggatggtttaccttaactactgcatgaggttttttgcagcgtgcatgagttttagtgaccttgtta

SEQ ID NO: 46060 - DNA, 718 bp, Homo sapiens
  misc_feature (1)...(718): n = a,t,c or g
gcggcacgaggaggcagggaacccgtaacaagaagcttaagaagaaggataaagggaagctggaagagaagaaacctcctgaggctgacatgaatatttttgaagacattggggattacgtaccctccacaaccaagacacctcgggacaaggagcgggagagatatcgggaacgggagcgtgatcgggaaagagacagagaccgtgaccgagagcgagagcgagaacgagatcgggaacgagagcgagagcgggaccgagagagagaagaggaaaagaagagacacagctactttgagaagccaaaagtagatgatgagcccatggacgttgacaaaggacctgggtctaccaaggagttgatcaagtccatcaatgaaaagtttgctgggtctgctggctgggaaggcacagaatcgctgaagaagccagaagacaaaaagcagctgggagatttctttggcatgtccaacagttatgcagagtgctacccagccacgatggatgacatggctgtggatagtgatgaggaggtggattatagcanaatggaccagggtaacaagaaggggcccttaggccgttgggactttgatacccaggaagaatacagcgagtatatgaacaacaaagaagcttttgcccaaggctgcattccagtatggtatcaaaatgtctgaagggcggaaaaccaggcgcttcaaggaaaccaatgaca

SEQ ID NO: 46061 - DNA, 2839 bp, Homo sapiens
cccgccgcccatggagcgcgccgcgccgtcgcgccgggtcccgcttccgctgctgctgctcggcggccttgcgctgctggcggccggagtggacgcggatgtcctcctggaggcctgctgtgcggacggacaccggatggccactcatcagaaggactgctcgctgccatatgctacggaatccaaagaatgcaggatggtgcaggagcagtgctgccacagccagctggaggagctgcactgtgccacgggcatcagcctggccaacgagcaggaccgctgtgccacgccccacggtgacaacgccagcctggaggccacatttgtgaagaggtgctgccattgctgtctgctggggagggcggcccaggcccagggccagagctgcgagtacagcctcatggttggctaccagtgtggacaggtcttccgggcatgctgtgtcaagagccaggagaccggagatttggatgtcgggggcctccaagaaacggataagatcattgaggttgaggaggaacaagaggacccatatctgaatgaccgctgccgaggaggcgggccctgcaagcagcagtgccgagacacgggtgacgaggtggtctgctcctgcttcgtgggctaccagctgctgtctgatggtgtctcctgtgaagatgtcaatgaatgcatcacgggcagccacagctgccggcttggagaatcctgcatcaacacagtgggctctttccgctgccagcgggacagcagctgcgggactggctatgagctcacagaggacaatagctgcaaagatattgacgagtgtgagagtggtattcataactgcctccccgattttatctgtcagaatactctgggatccttccgctgccgacccaagctacagtgcaagagtggctttatacaagatgctctaggcaactgtattgatatcaatgagtgtttgagtatcagtgccccgtgccctattgggcatacatgcatcaacacagagggctcctacacgtgccagaagaacgtgcccaactgtgggccgtggctaccatcttcaacgagggagggaacgcgctgtgtttgatgtgggacgagtgcgcgccacctgctgagccctgtgggaagggacatcgctgcgtgaactctcccggcagtttccgctgcgaatgcaagacgggttactattttgacggcatcagcaggatgtgtgtcgatgtcaacgagtgccagcgctaccccgggcgcctgtgtggccacaagtgcgagaacacgctgggctcctacctctgcagctgttccgtgggcttccggctctctgtggatggcaggtcatgtgaagacatcaatgagtgcagcagcagcccctgtagccaggagtgtgccaacgtctacggctcctaccagtgttactgccggcgaggctaccagctcagcgatgtggatggagtcacctgtgaagacatcgacgagttgcgccctgcccaccgggggccacatctgctcctaccgctgcatcaacatccctgggaagctttccagttgcagctgcccctcgtctggctacaggctgggcccccaatggccgcaactgccaagacattgatgagtgtgtgactggcatccacaactgctccatcaacgagacctgcttcaacatccagggcggcttccgctgcctggccttcgagtgccctgagaactaccgccgctccgcagccacgctccagcaggagaagacagacacggtccgctgcatcaagtcctgccgccccaacgatgtcacatgcgtgttcgaccccgtgcacaccatctcccacaccgtcatctcgctgcctaccttccgcgagttcacccgccctgaagagatcatcttcctccgggccatcacgccaccgcatcctgccagccaggctaacatcatcttcgacatcacggaagggaacctgcgggactcttttgacatcatcaagcgttacatggacggcatgaccgtgggtgtcgtgcgccaggtgcggcccatcgtgggcccatttcatgccgtcctgaagctggagatgaactatgtggtcgggggcgtggtctcccaccgaaatgttgtcaacgtccacatcttcgtctctgagtactggttctgagggctggtctgccgcacagccgcaggtgcacctccaggccaaatcattgctgccagtgactgtggtctgtacttgtttataccctcagacttttttaatgttaggtatttgtagcattaggccaacatgtattaagctgagccagatgaataagtccatctgatgtattttcggtgtttaaaaaatgagcccagttgctcaactgtttggttgaaaaccttgctcattttttaatgcgaaggctaagtgtcaccccctttctctgcctctggctgggccttgctaagggccaaggaaagaaagacattttttagggggcagccagtccaaatgccaaaagaagaccagttcttgccctgattgtatgaaatttgacattttggcacttttttttttttttttggccaatcagattttctatgttcctaaggacatggctgctgtagaatagcacagacgtggatgataaattatccccagaagcagcatgacagaatgcctcggggagcacttggaagggaaattgcagttctgttgaaatagaggaaaatcccttggtaaagacacagcctgttaggctcgtgtgggcctccagtatgttcaccaggggaatggctgggatttctcggcactctgcatcatccatcttttcttataggtgggaaaataaacaactttgtgatcctcctgaaaaaaaaaagtcgacg

SEQ ID NO: 46062 - DNA, 1947 bp, Homo sapiens
gggaagccgaggcagcgggcagacgagcagggggcgggcggacatcttgggatccggagagtggcccgggcccggcaggagcagggggccgaggacaccaggtctgttctcagagcgatgggccgcggagactgatctgccgccatgattggaggcttattcatctataatcacaagggggaggtgctcatctcccgagtctaccgagatgacatcgggaggaacgcagtggaatgcctttcgggtcaatgttatccatgcccggcagcaggtgcgcagccccgtcaccaacattgctcgcaccagcttcttccacgttaagcggtccaacatttggctggcagcagtcaccaagcagaatgtcaacgctgccatggtcttcgaattcctctataagatgtgtgacgtgatggctgcctactttggcaagatcagcgaggaaaacatcaagaacaattttgtgctcatatatgagctgctggatgagattctagactttggctacccacagaattccgagacaggcgcgctgaaaaccttcatcacgcaggcagggcatcaagagtcagcatcagacaaaagaagagcagtcacagatcaccagccaggtaactgggcagattggctggcggcgagagggtatcaagtatcgtcggaatgagctcttcctggatgtgctggagagtgtgaacctgctcatgtccccacaagggcaggtgctgagtgcccatgtgtcgggccgggtggtgatgaagagctacctgagtggcatgcctgaatgcaagtttgggatgaatgacaagattgttattgaaaagcagggcaaaggcacagctgatgaaacaagcaagagcgggaagcaatcaattgccattgatgactgcaccttccaccagtgtgtgcgactcagcaagtttgactctgaacgcagcatcagctttatcccgccagatggagagtttgagcttatgaggtatcgcacaaccaaggacatcatccttcccttcccgggtgatcccgctagtgcgagaagtgggacgcaccaaactggaggtcaaggtggtcatcaagtccaactttaaaccctcactgctggctcagaagattgaggtgaggatcccaaccccactgaacacaagcggggtgcaggtgatctgcatgaaggggaaggccaagtacaaggccagcgagaatgccatcgtgtggaagatcaagcgcatggcaggcatgaaggaatcgcagatcagcgcagagattgagcttctgcctaccaacgacaagaagaaatgggctcgaccccccatttccatgaactttgaggtgccattcgcaccctctggcctcaaggtgcgctacttgaaggtgtttgaaccgaagctgaactacagcgaccatgatgtcatcaaatgggtgcgctacattggccgcagtggcatttatgaaactcgctgctagctgccactaggcagctagcccacctccccagccaccctcctccacaggtccaggtgccgctccctcccccaccacacatcagtgtctcctccctcctgctttgctgccttccctttgcaccagcccgagtctaggtctgggccaagcacattacaagtgggaccggtggagcagcccctgggctccctggggcaggggagttctgaggctcctgctctcccatccacctgtctgtcctggcctaatgccaggctctgagttctgtgaccaaagccaggtgggttccctttccttcccacccctgtggccacagctctggagtgggagggttggttgcccctcacctcagagctcccccaaaggccagtaatggatccccggcctcagtccctactctgctttgggatagtgtgagcttcattttgtacacgtgtgacttcgtccagttacaaacccaataaactctgtagagtggaaaaaaaaaaaaaaaaa

SEQ ID NO: 46063 - DNA, 600 bp, Homo sapiens
ttgagaaagcagacatgacctcaccaagaggcgggagaactcactgaggatgagtggaacgtgtgatcaccattatgcagactccacgccagtacaagatcccagactgttcttgaacagacagaaggatgtaaaggatggaaaatacagccaggtgtgtactgaaatgagggcaggattagaggaagggtggagggtcctaacagaattgggcataggaggtcaggggataaaacatcccttgccccctcctctgaatccaggtcctagccaatggtctggacaacaagctccgtgaagacctggagcgactgaagaagattcgggcccatagagggctgcgtcacttctgggggtgagtggggggtctcatctccctgcctacctcgactcagcattcctcctactcgctcttctttttccccaaccttttgtttctgctgtgcatgacctgtgactcttctctttttacctgcagccttcgtgtccgaggccagcacaccaagaccactggccgccgtggccgcaccgtgggtgtgtccaagaagaaataagtctgtaggccttgtctgttaataaatagtttatatacctatggca

SEQ ID NO: 46064 - DNA, 458 bp, Homo sapiens; identical to SEQ ID NO: 23922
  misc_feature (1)...(458): n = a,t,c or g

SEQ ID NO: 46065 - DNA, 407 bp, Homo sapiens
ggtgactcatagctggctgttcatctctcctgtgacccttcataaggaattcttcctaagccctgtgatcaactatctctaacccttcctcaacttgctcaccctgccatgtgtatccctgcctttagccagtttatcttccttatctcctaccctcatggtcctgtctcttctgcaggattgcacaacatgggcggggacccaattactgtcattgatgagatccgggacttgctatacattggcaaggatcgcaaaaacccaagggaggattatctgggtgagtaacctgcctaggacccagcaccccacttcctcagggcttgggacccttcatccttcctttttatccctcagatgtctatgtgtttggggtcggcctttggtgaaccaagtgaacatcaatg

SEQ ID NO: 46066 - DNA, 1983 bp, Homo sapiens
  misc_feature (1)...(1983): n = a,t,c or g
tcaaaagctaacaatacccaactactgcttgctttccttattatagacaaggcatgtgaggaacacctagacgtttttaaagccccaaaactaggatattgtgacacagaatgttttttattcagtgctgagatgggagtttatcccaagcgactgtcctggcccctcatacaattatagtggtgaccagtcaggggctgtgggtgaggagacctgccagaggtggctggaggcactttattgccagcctggcgggctggcgagcgcccaatgaagtaaaatctggtgacacacttgagtttgcatgcggcattttattttattggttttttttaaaggaagagattataaaaagacatttcacattaaagatttgcagtcctgggacacagtttggaaaacactatttataaggttgcacatattacaaacagctcccaaatggtgaaactggtattctaagatgaaagcttaatgaacataatgaagtgaataaacgcatgtgaactaatgtttaaaaagttagagcttgtctcaagtcagtacagctcttaagataataaatacagtaacactactttttatttctttgctcttttatccctttcaggttcgatttgctgctttgattactgtgttagcactggctgaaaaactaaaggagaattatattgtcttgctaccagaatccattcctttcttagcagagttgatggaaggtaattcccaaactattcccaaccattaaacaattaaggaataattcagtaaaattctgtgaaaatgtgcccaatgataatgcagatttggatataacgtgactagcagttgatccagtcctcatacaggcagctccagtctcaaatacaggcaggctcgagctcctgttttgagttgggtggagggagcaagttgcgaagtgaccacctcctgatcatttgagagtccgtttacagtgtaatcttcacgatcttttcttttgtggtggtttgtgatcatacaagcagattacagtagtgtttttaattaacctcatacatttatatgattgaagttttggtccccagattgtatggaaatgcctagtggcattaaggatgcggtaggatgtccacttttagtagcaaccgatgttcattcactactccatgttaggtgctttacttggattatctcacttaaaaaccacaacattttatctctgttttacaaaggaagaaactagaggcttaaaagatttcagttatttgacaaagatcacaagctagtgggtgtgacatggggagctgtgacagttctggaacatagagtcttaggcccaggaaataacagtaaatgttattattaagggaggggtggtggagcaagtagatcagtcctttactgattcattgcttatctaagctacaaaagtacattctcctttgtttcttagctcttggaggggggaggtgtgagctactaaaggggtggcatccctaggaagtttgagttttggggattcttattcagcttccagtgcaagcctgtgggcaaggaatgaaggcggaaggagcggtgtggagggaggcggtccgtggcgcctcctgctttgttaatgtgcttcatttcactcttttgattgaatgattgctggaaagtgcaaggcattaagaattaaactaatgagaaccgaggcaggcagactgactcagattttaattttgatttttttttttttttttttttagatgaatgtgaagaagtagaacatcagtgccaaaagactattcagcaactggaaactgtcctgggagagccactccagagctatttctaagactttctgtggtgtttcatactctactcagagttcacactcatatttcatatttttatttttgggtgttgggtgccatgttacttttggtgccttaatacacctacttggnttacttacaaatgttttatcacttctttacaaaatccccaccctggcttgtg

SEQ ID NO: 46067 - DNA, 3166 bp, Homo sapiens
  misc_feature (1)...(3166): n = a,t,c or g
gtcctggcaaccgctccggcaacgcaagccgctccgctgcgcgcaggcttgggctgcaggctctcggctgcangctgggtggatctaggatccggcttccaacatgtggcagctctgggcctccctctgctgcctgctggtgttggccaatgccccggagcaggccctctttccatcccctgtcggactgagctggtcaactatgtcaacaaacgggaataccacgtggcagggccgggcacaacttctacaacgtggacatgagctacttgaagaggctatgtggtaccttcctgggtggggcccaagccaccccagagagttatgtttaccgaggacctgaagctgccctgcaagctttcgatgcacgggaacaatgggccacagtgttcccaccatcaaagagatcagagaccagggctcctgtggctcctgctgggccttcggggctgtggaagccatctctgaccggatctgcatccacaccaatgcgcacgtcagcgtggaggtgtcggcggaggacctgctcacatgctgtggcagcatgtgtggggacggctgtaatggtggctatcctgctgaagcttggaacttctggacaagaaaaggcctggtttctggtggcctctatgaatcccatgtagggtgcagaccgtactccatccctccctgtgagcaccacgtcaacggctcccggcccccatgcacgggggagggagatacccccaagtgtagcaagatctgtgagcctggctacagcccgacctacaaacaggacaagcactacggatacaattcctacagcgtctccaatagcgagaaggacatcatggccgagatctacaaaaacggccccgtggagggagctttctctgtgtattcggacttcctgctctacaagtcaggagtgtaccaacacgtcaccggagagatgatgggtggccatgccatccgcatcctgggctggggagtggagaatggcacaccctactggctggttgccaactcctggaacactgactggggtgacaatggcttctttaaaatactcagaggacaggatcactgtggaatcgaatcagaagtggtggctggaattccacgcaccgatcagtactgggaaaagatctaatctgccgtgggcctgtcgtgccagtcctgggggcgagatcggggtagaaatgcattttattctttaagtttcacgtaagatacaagtttcagacagggtctgaaggactggattggccaaacatcagacctgtcttccaaggagaccaagtcctgggctacatcccagcctgtggttacagtgcagacaggccatgtgagccaccgctgccagcacagagcgtccttccccctgtagactagtgccgtagggagtacctgctgccccagctgactgtgggccccctccgtgatccatccatctccagggagcaagacagagacgcaggaatggaaagcggagttccttaacaggatgaaagttcccccatcagttcccccagtacctccaagcaagtagctttccacatttgttcacagaaatcagaggagagatggtgttggggagcccttttggagaacgccagtctcccaggccccctgcatctatcgagtttgcaatgtcacaacctctctgatcttgtgctcagcatgattctttaatagaagttttattttttcgtgcactctgctaatcatgtgggtgagccagtggaacagcgggagacctgtgctagttttacagattgcctcctaatgacgcggctcaaaagggaaaccaagtggtcaggagttgtttctgacccactgatctctactaccacaaggaaaatagtttagggagaaaccagcttttactgtttttgaaaaattacagcttcaccctgtcaagttaacaaggaatgcctgtgccaataaaaggtttcggaattccgtcccctttcaagttttagggaaatttaactgaagtgtatacaaattagacattgctaatatgtacaaaagtattttatacagtttttgaacgatactagctatttgcaataaacaggatgttacaaaaacagtccaataatgcatttcctattaagaagcacaatacacaacataattcaattttattaaaaaataacttcaaaatgtagaacaatcccctttaggaagaaaagctatttctgtagttcactctgtcagtaaacacacaagttgaacgctgcagcagagggctgtccttttccatggagaaaagaaatgaggcttctagggcctatcttttctgggtaaaaattccacctacagctgagatgggcagttattgcctgtggtaggcagaatttgaaaatgcccctccccctttcaatgagctaatctccagaacccgtgaatatgatgagatgagacagtactcctgcaattatgttctatcgcacaatcaaccttaaaatatatctgtgggcttgagctaatcatatgcccctaaaacaggaggacgggagagagatatgaagcatgagaaagagcaggaaggctggtttgaagctggaggggaccacataagaaggaatgcaggcagccttgaggtgagagaggggcctccagctgagagccagcaaagaactgaattccgccaacaacctgaatgaacttagaagcagattcttccccagagcctccatgaaggaatgttgtcctgccaacccttatttcagcctttaagaccctgagcagagaatccagccacactgtgccagactcatgagctacagaactgctatgggtattgttttttaaactgctaaatttggggtaattttgtcacacagcaatagaaaactaatacactgcccaagggtaacttttcttaacctaattacatttggcagtttctgcttgggttctgaatgcatttttttcctgctgactagtagtaatattctcctttgcaggcaacctttggaaacctttaatataaatcatactgttttgtattcagtatccagtattgtttgtttggcctaagtcctgttttctaatgtactttctgtctattgacctggcaaacaactgaccaccttaccctgttttcataccttctttgggtgatagttttaatacattcaagggcaccctccctccaccaagggttgtcagctcc

SEQ ID NO: 46068 - DNA, 897 bp, Homo sapiens
tttttttttttttttttaaaatatatttgctttattatgtacacactatatttacatcacccaccctgaaaacagcaggttctggcttttccgtgaacccccagatgaatataaattggagcctctgagaacagttccttccccagagcggggagtgtgcacgtgtgtgtgtaaccttctgattccatgggacctggccagctcctctggagccacacagcacctccttgccttacaccctggctccagcttcactggtccgggggacgcctcagcctggggcagctgtgatgtaaaccagtcactccacctccatcttcctcttctgcaaagaatcgaggaagtcttgccactctgctgggtaaaagcgtttatagacgttgatcttactccgaatctgttttggggtatcttgatagtaattcttctcatcacgggccatggccttatagtcctccccgtggttctctaccatgtagcgtacatagtcaatgaggtcccgagacagagtatttcctttcttttctggaaggctggcttctgcctccaggtcattcagcacatagggcttccgtacaagctctttaggcctctcctctatgtccacctccatggccttcacctttctcttacggaggggcaccgccctgttggggtccacagccaaccccatctcggccaggttctgccgtaccgatttagcgtggtcccaggcatgtcggatgtgggagcattcgatccgcggcgctgccttccgtcgagcattccggttcagacgctttcggttgacactgtaaccaaacttctgcctccgggttttgcccttggccttgggcatcgcgctgaccaccgcaccagcagctcaaacacgctgcctctgtctctcagacctcgtgt

SEQ ID NO: 46069 - DNA, 486 bp, Homo sapiens
accgcttgacatgattacgaatttaatacgactcactatagggaatttggccctcgaggccaagaattcggcacgaggcactcctgtgacccccccatcatccatgggaacctgacctgtgacaccatcttcatccagcacaacggactcatcaagattggctctgtggctcctgacactatcaacaatcatgtgaagacttgtcgagaagagcagaagaatctacacttctttgcaccagagtatggagaagtcactaatgtgacaacagcagtggacatctactcctttggcatgtgtgcactggagatggcagtgctggagattcagggcaatggagagtcctcatatgtgccacaggaagccatcagcagtgccatccagcttctagaagacccattacagagggagttcattcaaaagtgcctgcagtctgagcctgctcgcagaccaacagccagagaacttctgttccacccagcattg

SEQ ID NO: 46070 - DNA, 722 bp, Homo sapiens
taccagctatgacatgattacgaatttaatacgactcactatagggaatttggccctcgaggccaagaattcggcacgagggccgagcaggaggcgccatcatgggagtggacatccgccataacaaggaccgaaaggttcggcgcaaggagcccaagagccaggatatctacctgaggctgttggtcaagttatacaggtttctggccagaagaaccaactccacattcaaccaggttgtgttgaagaggttgtttatgagtcgcaccaaccggccgcctctgtccctttcccggatgatccggaagatgaagcttcctggccgggaaaacaagacggccgtggttgtggggaccataactgatgatgtgcgggttcaggaggtacccaaactgaaggtatgtgcactgcgcgtgaccagccgggcccgcagccgcatcctcagggcagggggcaagatcctcactttcgaccagctggccctggactcccctaagggctgtggcactgtcctgctctccggtcctcgcaagggccgagaggtgtaccggcatttcggcaaggccccaggaaccccgcacagccacaccaaaccctacgtccgctccaagggccggaagttcgagcgtgccagaggccgacgggccagccgaggctacaaaaactaaccctggatcctactctcttattaaaaagatttttgctgacaaaaaaaaaaaaaa

SEQ ID NO: 46071 - DNA, 2580 bp, Homo sapiens
ggggaaaatggcggacgggaaggcgggagacgagaagcctgaaaagtcgcagcgagctggagccgccggagttaattcatgggagcctcttctactgccacacaatctcagttcctgctgtatactctaacaaacagtggaagagactgttgggtcagtaggtgacaactgcagaggtatcttccttataacgatgctttttgaggttgctgctcccatcaatctgctcagtaaaaatagctcatcttggtaagttgtttcgactttcaccaggacctgaagaagaagcagaaaaacctgtgaaaactaagactgtttcttccagtaatggaggggaaagttccagtcgcagcgctgagaagcgatcagctgaagaagaagctgccgacctcccaacaaagcctacaaagatctccaagtttggatttgccataggtagtcagacgacaaagaaagcatcagccatatccatcaaacttggatcaagtaagcctaaagaaactgttccaactcttgctccaaaaactctttcagtagcagcagcttttaatgaagatgaagatagtgaaccagaggaaatgcctccagaagcaaagatgaggatgaagaatattggaagggatacaccaacatcagctggaccaaactccttcaataaaggaaagcatgggttttctgataaccagaagctgtgggagcgaaatataaaatctcatcttggaaatgtccatgaccaagacaattaaatgatgttttgaaattggggtgtggggtgggtgtaaagttaaaaggaacagtttccttttttaaagaatggtataagactatctttggagccgctttttttttctttttcatttttttaaaagattgagtggtacactaataaatgagagtttgaaattagaggtaatttatgttttatatacagatttcaagacatttgctaattttgtagtttcatgtgattagtttccaaaggttacagataataaagaaatcagaaatggtacctttttaagaattgcatatttttttagacacaactattagcacattaagagggaagcaaagttactgtctatttaaaactgcaagcagttaactctcttaactcccttattacctaaacttgtctggctcccaggaacagccttatagagagagggagtattgtattgggaagaaaatgttactgaactattgactgaaagtaaatttagataaaatacagcttttttccttatgggcatttgttttgtttcaagtcatcataaactaggtattgcattgctatccgtggatacagacgcttagctcttaaaagattttttttttatgtaaactgttgaatatttgaaatagtccacttcaccttaatgggtcttgtctatcttcattagtcttcaaagaaaaaccatttgctaccaaagtaaatcagtattttgaatgtgcttctcttgttttttgtttattagctagttcctgtaagcatttccaccagaacttgaggcaaatcgtaaggaagctgtttcttttaaaacacaaaccaccaccaaaaatttaaatgtacatattgcttaagtatttggctgtttttattttttaaaaggtataaacaccaaaaaaaaaattaacattgtatgaagatggaaaataagaagatgcactttctgtaactttgtctaaggatttaaattactaacttatgaactccaatttgaattgaacttaactatcggctttcttactggtaaaattatatggtttattttaaatgcgtacatattgaccaatggcctctgaaaaagcacattttagatactgaaattgaaggaaagaaaatgcatcttcaaacattttttggaatctcaccacatatactttgttagatttgtgtattgtagggtgtttgttttgtatttttgtattgtatatgaactttttttaaatgtgacagttaaacacatctttaaaagcatagtcacagacaaaagcatacagtataaaaatttccttgaaaactcctacaatattatatttggaggcagcttcagactgttttattggtggtagctgcttgctgaggtcttttagttggtaataactccagagaagcagcctgtgtatattcctaacactttgttcactagcatttaagtttagaataagcccaagtaagacaatggaaatgtatatagaactcttagttcttacatgatttaattatatcgatacatgaatttaacttactttaatgtaggcaaactatcaattttttgtccattttcctgtttgttaaaataacatacctctcctacgtattattttcttgacccaaatgaaatattaacctaaggtcaagctgggagagagaaatgactgagatgaatgtctttactaaagtaccaataaatttgtcaaactcaaaaaaaaaaaaaaagtcgacgcggccgggatttagtggtagtagtcgtcccgtgaattctgaccggttccgttggtgtaccgtcttcccttgatgaggcgtttggtgctgtgcgtatcttgtcagatcgtgtcctgggtttttgttttcct

SEQ ID NO: 46072 - DNA, 537 bp, Homo sapiens
aacgggggatccactccgccatcgatgcatcccagacccccgatgtcgtgttcgcaagcatcctagcagccttctccaaagccacatcagctgattagaagtccaggatcatgtgaagtcaggcagggtcacagttcctgatggcacattatggacagagaattccattttgttttctaacccatgatgaaaacccacgtgagtcagtgtgtgaacagggatcattaattttttccccctaggtggaaggaaaaaggcacttactttgcaggttacagaaattactgggagaggatatcgtcataaaaagagccaggccaaattggaatatttttgtgatctgcatcatgatgctgaaaatagcaattatttgggaattgggtttgaaaactgaattgttgccagagaattaaaccaggtgaaaggtccttttgaattcagattgtcttctgaacatccagggctgatcatctgaggagcagtcaaatctacttccccaaaaagagaccagggtagggtaattgctttaatttttaa

SEQ ID NO: 46073 - DNA, 4085 bp, Homo sapiens
  misc_feature (1)...(4085): n = a,t,c or g
ttcatttaagacagggaatactttattcaaaacccatcacagaaatggacagcttgggtctgtaacaaaggcattcatgttttagagcataggtcagtaattgtatatgagagcatacactgctacatacaaattaactgatcagaccacaacattttcaatgtttaaaacagaataagcttccctgtaaaagcagcacctttgtgacgttttaactttagtattcctctccttcttcctcaccctctccttcaacagaatccacaccaacctcctcataatccttctcaagggcagccatgtcctcacgggcctctgaaaactcaccttcctccatcccctccccaacgtaccagtgaacaaaggcacgtttggcatacatcaggtcaaacttgtggtccaggcgagcccaggcctcagcaatggctgtggtgttgctcagcatgcacacagctctctgtaccttggccaggtctccaccaggcaccacagtgggaggctggtagttgatgccaaccttgaagccagtggggcaccaatccacaaactggatggtacgcttggtcttgatggtggcaatggcagcattgacatctttgggaaccacgtcaccacggtacaacaggcagcaagccatgtatttaccatggcgagggtcacatttcaccatctggttggctggctcaaagcaagcattggtgatctctgctacagaaagctgttcatggtaggctttctcagcagagatgacaggggcatatgtggccagagggaagtggatgcggggatagggcaccaggttggtctggaattctgtcaggtcaacattcagggctccatcaaatctcagggaagcagtgatggaggacacaatttgacctattaacctattcaggttagtataggttggacgctcaatatcgaggtttctacgacagatgtcatagatggcctcattgtctaccatgaaggcacaatcagagtgctccagggtggtgtgggtggtgaggatggagttgtagggctcaactacagctgtggaaacctggggcgccgggtaaatagagaactccagcttggacttcttgccataatcaactgagagacgttccatgagcagcgaggtgaacccagaaccagttcccccaccaaagctgtggaaaaccaagaagccctggagacccgtgcactggtcggcctatacaaaagagaggacagaggaaaggttagtttatcttgtagtacatcatagtaatatatttcactttcatacatctccaggacttagatcttatttgacaaatgcttttaaaaaattctcattaacatttacaaaatgacatcaaatagttcattttaactgaattttaaaaaccccaaagaatgactcattccactctttattaaaataacagttcaattctgtgtttgaaaaaaaaagcattatttcaaaagtgttctttaggctcattaatttactttattcttgaaaagaaacataccagcttgcgaattcggtccaacacgaggtcaatgatctccttgccaatggtgtagtgccctcgggcatagttattggcagcatcttctttgcctgtgatgagttgctcagggtggaagagctggcggtaggtgccagtgcgaacttcatctggagacatgatgggggaggagcagggggaggaggaggaggggacgaggagcgggaggagagtgggtgagtgaccagcggagccccccaggacagacctcctgtccagcaccctgggatctcacttgggttactgaggtcaactcaccaatgactgtgggttccaagtctacaaacactgcccggggcacatgcttgccagcccccgtctcactgaagaaggtgttgaaggaatcatctcctcccccaatggtcttgtcacttggcatctggccatcgggctggatgccgtgttccaggcagtagagctcccagcaggcattgccaatctggacaccagcctggccaacgtggatggagatgcactcacgctgtggggaggaaaagtgaaaaatgtaaaattaaggtgtattagcatttaaattataggaaatttcaaaatatttctaataatatacagatatttttctaaattatttgaggtcatatccccagcacgatacaaagatttaaggaaaatcacctgctacaaatgctgcatatgggtgtggtctgaataatgattgtcgccttggccctgtcagcacgggtatccagccattggcctactaccagtcttgaatagaagattttcatatttaaaagctattcagtattcaaagcacaaatttgtaaaatgaagtaaatccaattatgacttaattgggattaattttactgctttcttcccttttaaataaagatgaaagtttcctctgaataggacttgatattataatccggacatctgtactgcagaatccatcaatactaggagtttagacaaggtctgccttctgcattgctgcattgctgtatttgctgtgtgcctggtgctagcctgtactgtctgctacattatttaacagagcaagctctatttccagcagctgcctacatgatctcattgtgctgttttgccagttttcctcctctgaccgcccgggaccatgtgcctgaattgaaatgaattaattaagatgcactggaacgggggacaacgggaagcggagtataattcttctttgtctgtagcaatttcattacttttttttttaaaaaaaaacctttttccagatcttctccactgtaaaagctgaaaaattatccgtatcttacacacacacacacaaaagttcctaagttagaaacaagcatcacatgaaaaggtaccaaagaataaaagcccagtggaaggataatgaaatatttatttaaaacaacaaaatagtattttcatcctgagattctctacccatcacataatattcatattctttgcatccaatagaggttttcttctctgtggtctttagggctaccactttcaattgtctattcgctgaatgtggtgggggcggggcgggggggcggcggggaagggcgtttccctgggtcctgaccatcggtaccctcacaaagtgggcctttctccctcgctgaactgtgcagtccagacgagacagacagacacacacacacacacacacacacttcagtcggtcagggcaggcnnnnnnnnnnnnnnnnnnnnnnnnnnnnnnnnnnnnnnnnnnnnnntcagtcggtcagggcagggcgtccccagaccagacattaaagagcttgtgaagtgaattatgattttgctcaagaaaaaaaaaagtcatctaacttataatagtgaagaaaacccttttggagcctacagttccgcaatgatgaaaggtttttttgtttttttttcagtcagctcctgacagaagaggttcagtgaggcgaaccgcgcccagtggctccaacgccatagaagccagaaacaaacaaccccgcccctcgccgccctgacacccgctccgggggctccgggcagaaactcaccatgttttcccgggaatgtgtgggtatctttccaaaacgccaaagaccgcggagggtcttcccacgctaaccctaggctgcgctttgttcccgttccccctcccacgtcccccgagctcgcccaacgcccccgctctttttgggtgcctcctcctctcccggtccccagagaacaacgcgagacagaaagtggcccctcagcatcagcgaaaccgtgcgcacagacacggggcccagccgggacgcccagaccctcggtcgcggcaggacgggctgcccgcggcccccgaaagatctctcggataacacagcctagcgccgcctttgttcctccccagcgctctgtccctgggcgcagtactggcccggttcctgcaccgcactagcggcggcggcggggcttgaggatttggggctaagctaaacctcacaaaacataccaccaccctcgcccagagagcttacgaaagaaaagagcttaaaggttttccaagtagagcctgggggcgctgactccacccaacggcatgaattc

SEQ ID NO: 46074 - DNA, 792 bp, Homo sapiens; identical to SEQ ID NO: 14460

SEQ ID NO: 46075 - DNA, 450 bp, Homo sapiens; identical to SEQ ID NO: 24096
  misc_feature (1)...(450): n = a,t,c or g

SEQ ID NO: 46076 - DNA, 537 bp, Homo sapiens
gtggaaggtctttgagagctggatgcaccattggctcctgtttgaaatgagcaggcactccttggagcaaaagcccactgacgctccaccgaaagtactgaccaagtgccaggaagaggtcagccacatccctgctgtccacccgggttcattcaggcccaagtgcgacgagaacggcaactatctgccactccagtgctatgggagcatcggctactgctggtgtgtcttccccaacggcacggaggtccccaacaccagaagccgcgggcaccataactgcagtgagtcactggaactggaggacccgtcttctgggctgggtgtgaccaagcaggatctgggcccagtccccatgtgagagcagcagaggcggtcttcaacatcctgccagccccacacagctacagctttcttgctcccttcagcccccagcccctcccccatctcccaccctgtacctcatcccatgagaccctggtgcctggctctttcgtcacccttggacaagacaaaccaagtcggaacagcagataa

SEQ ID NO: 46077 - DNA, 1804 bp, Homo sapiens
gcgcccgcgccccttcagctagctcgctcgctcgctctgcttccctgctgccggctgcgcatggctttgggcgttggcggcgctgcgcggcggatcgagccggcctgcggagccggctaccagcagttgcagaatgaagaagagtctggagaacctgaacaggctgcaggtgatgctcctccaccttacagcagcatttctgcagagagcgcagcataattttgactacaaggatgagtctgggtttccaaagcccccatcttacaatgtagctacaacactgcccagttatgatgaagcggagaggaccaagggttgaagctactatccctttggttcctggggagagatgaaggattttgtgggtcgggatgatttttgatgatgctgaccagctgaggataggaaatgatgggattttcatgttaacttttttcatggcattcctctttaactggattgggtttttcctgtctttttgcctgaccacttcagctgcaggaaggtatggggccatttcaggatttggtctctctctaattaaatggatcctgattgtcaggttttccacctatttccctggatattttgatggtcagtactggctctggtgggtgttccttgttttaggctttctcctgtttctcagaggatttatcaattatgcaaaagttcggaagatgccagaaactttctcaaatctccccaggaccagagttctctttatttattaaagatgttttctggcaaaggccttcctgcatttatgaattctctctcaagaagcaagagaacacctgcaggaagtgaatcaagatgcagaacacagaggaataatcacctgctttaaaaaaataaagtactgttgaaaagatcatttctctctatttgttcctaggtgtaaaattttaatagttaatgcagaattctgtaatcattgaatcattagtggttaatgtttgaaaaagctcttgcaatcaagtctgtgatgtattaataatgccttatatattgtttgtagtcattttaagtagcatgagccatgtccctgtagtcggtagggggcagtcttgctttattcatcctccatctcaaaatgaacttggaattaaatattgtaagatatgtataatgctggccattttaaaggggttttctcaaaagttaaacttttgttatgactgtgtttttgcacataatccatatttgctgttcaagttaatctagaaatttattcaattctgtatgaacacctggaagcaaaatcatagtgcaaaaatacatttaaggtgtggtcaaaaataagtctttaattggtaaataataagcattaattttttatagcctgtattcacaattctgcggtaccttattgtacctaagggattctaaaggtgttgtcactgtataaaacagaaagcactaggatacaaatgaagcttaattactaaaatgtaattcttgacactctttctataattagcgttcttcacccccacccccacccccaccccccttattttccttttgtctcctggtgattaggccaaagtctgggagtaaggagaggattaggtacttaggagcaaagaaagaagtagcttggaacttttgagatgatccctaacatactgtactacttgcttttacaatgtgttagcagaaaccagtgggttataatgtagaatgatgtgctttctgcccaagtggtaattcatcttggtttgctatgttaaaactgtaaatacaacagaacattaataaatatctcttgtgtagcaccttttactgtaaaaaaaaaaaa

SEQ ID NO: 46078 - DNA, 468 bp, Homo sapiens
  misc_feature (1)...(468): n = a,t,c or g
ttgaattcgttatcctttgactgatnacgaatntaatacgactcactatagggaatttggccctcgaggccaagaattcggcacgaggaactataatgattttggaaattatagtggacaacagcaatcaaattatggacccatgaaagggggcagttttggtggaagaagctcgggcagtccctatggtggtggttatggatctggtggtggaagtggtggatatggtagcagaaggttctaaaaacagcagaaaagggttgaatgagaaccctacttgcctaaatgaggaatgtctttcctaccatctaaaatacgaaggtttctggctgggtaaggtttgtagttgncagtaaaacctgatgacaccatttgtttccctgcaaagtctacattacatatttcacanctttgtccctctctnntangcacattggaaaaantcttcactgnaaactncnttggaac

SEQ ID NO: 46079 - DNA, 1028 bp, Homo sapiens
ctgccgggttccgggaaaaggagctcctgctgccactgctcttccggagcctgcagcatggggcccctgccgcgcaccgtggagctcttctatgacgtgctgtccccctactcctggctgggcttcgagatcctgtgccggtatcagaatatctggaacatcaacctgcagttgcggcccagcctcataacagggatcatgaaagacagtggaaacaagcctccaggtctgcttccccgcaaaggactatacatggcaaatgacttaaagctcctgagacaccatctccagattcccatccacttccccaaggatttcttgtctgtgatgcttgaaaaaggaagtttgtctgccatgcgtttcctcaccgccgtgaacttggagcatccagagatgctggagaaagcgtcccgggagctgtggatgcgcgtctggtcaaggaatgaagacatcaccgagccgcagagcatcctgggcggctgcagagaaggctggtatgtctgcagaacaagcccagggacttctggaaaagatcgcaacgccaaaggtgaagaaccagctcaaggagaccactgaggcagcctgcagatacggagcctttgggctgcccatcaccgtggcccatgtggatggccaaacccacatgttatttggctctgaccggatggaaggctgctggcgcacctgctgggagagaagtggatgggccctatacctccagccgtgaatgccagactttaagattgcccggaggaagcaaactcttcgtataaaaaaagcaggccatctgcttaacccttggctccaccataaggcactgggactcggatttctctatctgatagaggtattttctgtggccctgggagctgtctgtctttcccctacccccaaggatgccaggaagacgtccaccattagccatgtggcaacctttacttctatgcctcacaagtgcctttcagagagccccaattctgctttcccacaaaataaacctaatgccatcaggcaaaaaaaaaaaaaaa

SEQ ID NO: 46080 - DNA, 807 bp, Homo sapiens
aggcgaaagggtccatgccagcaacacaatcactcaaagtccagatgagggatcagtaaatacaacgtgcctgaaaggtggcccttgagcacattcctccggtagacattaacttattaaattgattctgattacaaatataaactttgcccccatctcacccagtaacaatgcaagagttgatgtcagtctataaaaggaagtagggaactgtccctgggctttcaggctccaacatcctccccctgttcaagatgtgggcaccttcaaactttgtggcagtcctcatgatcttcctgttgctgttgggccagatagatggctccccaataccagaagtgagttcggcaaagagaaggccacggagaatgaccccattttggagaggggtttccctcaggcctattggagcctcctgccgggatgattctgagtgtatcacaaggctatgcagaaaaagacgctgttccttaagtgtggcccaggaatgatgtacataccagggaaagaaaggacagcagtcacctccgacaatgctccgttctatggaatattgattaactgcattttggctggagacacccaagtgaagcaatcttgtatttttaatatttaaaggcagatgtacgctttaaattggtctccatttcttcttagaatgttgatatatggataagcataactaaacttgtcaatttagagtttatttttctatggatactattaaatgtctcaaattggaaattttagcagtctgggatttcaagcttttgaggggaaaggagggttcacttttgtatactaaag

SEQ ID NO: 46081 - DNA, 2545 bp, Homo sapiens
gccgtcgctaccgccaccgccaccgccaccgccgccgagtgctgtctctatggcgaggaggaggaggaggagcgcgagctcagcgacacaagtacataaataaaggataaaatattttatgaaacaaatcttcaatcaagtataacattttgatgcttggcatctagactcccttgtgccctcactatgccagcggaaccttgtagatcatagccaaagaatttgtgaagtttgggcttgcaacttggatgaagagatgaagaaaattcgtcaagttatccgaaaatataattacgttgctatggacaccgagtttccaggtgtggttgcaagacccattggagaattcaggagcaatgctgactatcaataccaactattgcggtgtaatgtagacttgttaaagataattcagctaggactgacatttatgaatgagcaaggagaataccctccaggaacttcaacttggcagtttaattttaaatttaatttgacggaggacatgtatgcccaggactctatagagctactaacaacatctggtatccagtttaaaaaacatgaggaggaaggaattgaaacccagtactttgcagaacttcttatgacttctggagtggtcctctgtgaaggggtcaaatggttgtcatttcatagcggttacgactttggctacttaatcaaaatcctaaccaactctaacttgcctgaagaagaacttgacttctttgagatccttcgattgttttttcctgtcatttatgatgtgaagtacctcatgaagagctgcaaaaatctcaaaggtggattacaggaggtggcagaacagttagagctggaacggataggaccacaacatcaggcaggatctgattcattgctcacaggaatggcctttttcaaaatgagagaaatgttctttgaagatcatattgatgatgccaaatattgtggtcatttgtatggccttggttctggttcatcctatgtacagaatggcacagggaatgcatatgaagaggaagccaacaagcagtcatgacatgaaatagtccttttatttttatttcgagctacacacatgcttgtatataggttttatctctggttgaatccctcgaacaatagacagtacctttcccccccctttcatggcccattttattgtctgcctttcagtactaagtatgaccgttcctatctcagatcttaataaaaagaaaaaaaaaaacgcattcaggttaaatttggccttaatttaatatacttgttagcaagcgtgtgtgacagagagtggggaaagctacatcattgaatattttgataaactttaccgacttgagtttggtttatttttcccttttcctaaattaactagcactgactgtaatttatttccctgtttcacgtctctcccttccattctgcaggagttttagctatttgagatcgtggaccatcagttttgcactttagagagtgtttctgactctaaacctgttttatcagaaaatttgttttttcttgatcttagctggaaaaatctgccaactttacacagtatttacttggttttgacccacagaatataggcacgttgtgcaaactgtcgattcagcgaaacttaaaaaagacaagaaactactgaggagcttagtaactgctgtttctgtacgtagtgtttaatcttccaagcacatctagtgtctgtcagtttctaattggcatgtgtaggctgctctgtgactgaagaattttcaaaccagctttacacccttcaggaaaaatcccttgtgattggatgtttactatctgccaggaaactggtactcaagatgttgaagctacagttattttatgatagcacacttcccttgatctgcttatttttattccatcaccatttaccctttttttttttttaaattttgtagccattcttatgatgctcttgatttgttggttacacaaatcaattttattaaaaatccaaagataagtctttaggtatattttgtaccaaattaaattagaagacaaaaattgtgctttcatagttgctacaaaggtaaataatggagagatttggtacaaaacaacaaaatatatatatattctcatatatatatatatagctgataaaattacctgaggagtgtaatgcttatttttttgtgtatatctttgcaatctattttatatatattgacaaaagagactgtgaaatacttagccatgcagaatatgtgaccagaccagagcatgtgtaggaagactttacagtaatcattaactctaccccgaaatgatggactacaagttataatgtgtgttacctacacttcaatcagtaatattagcaaatctccaaatgttagtcacattggtttgtctcccttgtacattctttattcatgatattacagtgctgtaactgggtggtcctttttaaacaaaacattatttgcaaaacagagggtattatttgtttttaaagcttttgtaaataaaggcttcaaaatgttttcttataaaaaaaaaa

SEQ ID NO: 46082 - DNA, 1708 bp, Homo sapiens
gaaacttttagggaattatactttggtggctcaatagtagattctacaaattatttttaaattgatttcctttccttagagctgcaggagaatatctggcaaggtgcatttaatatttggaaaaaagatatgaccagtaacctactttaggaagaaaataagcatcacctggcatcaggtaggcatcgtaaggttgagctgtcctatctgaaaaaatatgcgatataatttattacagaagttactttatactaatgcttaacatttatgtttttagttacacaccccttccattttaatctgctgatagggtaggacatctaaagagagttttaggaatgacatctatttgatgaggtcagattttcaacagcaaaatgacttaaaactgagtacaactctccagaaatgaacacaggctgaagtattctgaagccagtgatattgtcactgatgatttgctgctttttgtgtatgtgtgagctcatcaaatcctatatgattgaactgatcattgttaagagataacatgagcagtgatttgggtattattcactgttgcatctttgggtacaaacttgcctttccaatgggataggttaatttctgctgaaagagacagtaactggagatagaaacaacactcatgtcatttttggctgctatggtgttttgttcttcggtcacttgtgccaaaatcactcttcatgaagatgatttctagtcgatcttctatacaagctctgcatcacttgatgactgaatactgcttcatgaaatctcgtgtttcctgcagcctgatagattcttctcatttgccttatggtccctgcctggttcgagagactggtctgcctccgctttgagattttgtagacccatgtaactgaggacctgcagatcccctgccaggtcgggcctgatgaggatactcaactgcacatgagcgacgatactgtgtatccagcaaaaatgattgagttgtgttgggcctggggaaaaagtcgggcaaaaggagcctttcttgtggctgctgatagttaggttcatccaccaccgcactttgagctcgactagagtcgccatggggtttcatctgtctttgtggccccacagtgctcacatgttccacttcagctgtgccaataggtggtagcagattatttcgactcaggggcgtcggtgagggagaggagagcgagtcgggtgccactgggcacggtttccagaagttctgcttttgaaacctacactcgggctcctctgaggatttcttccacagatcttggtgtttcagcacatgaatggctcgtgctgatcggatgaagagttcgtggtggtggattgcgtctcctggtggactgcactgtgtatgacagagatgatgtactaaactccacagctcgatttggccaatttcgagttgaaaggatggtactggacccaggcctcataagtagcttgtcatcaagatctaggagcttgtccattagggagagatttcttggctgtagaggcattccatgaaccaagagatcattcacatttggctgatgtctgcttgcttgacagagactcatcggatttgaggtaatgtacagcaccttagactgtggcactcgcggtaacaccaaaggatgtagttcactcagcacacaggaactttctgaatcgggtctggtaactgcaacattactctcatcatcag

SEQ ID NO: 46083 - DNA, 1203 bp, Homo sapiens
aaccctttgacatgattacgaatttaatacgactcactatagggaatttggccctcgaggccaagaattcggcacgagggcgggtgggtcaaggtaactctgggctacagagtccttgctgggggttcggggagcgcttggaccccggcttctgggacgcgtcaggagaagggagcactggctttgctttcatcaggccaaagatgcctttctttgggaatacgttcagtccgaagaagacacctcctcggaagtcggcatctctctccaacctgcattctttggatcgatcaacccgggaggtggagctgggcttggaatacggatccccgactatgaacctgggcagggcaaagcctgaagtttgaaaatggccagtggatagcagagacaggggttagtggcggtgtggaccggagggaggttcagcgccttcgcaggcggaaccagcagttggaggaagagaacaatctcttgcggctgaaagtggacatcttattagacatgctttcagagtccactgctgaatcccacttaatggagaaggaactggatgaactgaggatcagccggaagagaaaatgaagaccccagagacatttattggggagtaggatgtggctgagtgctttttttttggccagactagcggattcagtcctggaagagagtatcatataatgagacccacaggcactggcacccttgggtttggcaatagaaggtgacatggaatggagaaaaccaagattccagatggggatagtaactagaaggtgcttcagatgcactgcctgcgggtgccagtctgaaaaccagaccgcacagaggcctggggctgctgatgagctttttggtgctctccacacacaagctcgcaaacacacatgtcccagaatagctctgttgggttgtgttgggagaagcggctggagttcattctctcacccccttatgttggtgtttggcgtgtgacagcagttctacagagctctgtgttggggtcatggatgagcggctctcttggctcttaaaggcaggcctctctcttcttgcctttaaagaatcctccttcctcacacctggcctcctctggcttcagcttctcagcagcaagcaccagccttccacaacaacactatatttttatgctactttcctgtttgcactactacttttttattaaacgatgttaaataatca

SEQ ID NO: 46084 - DNA, 813 bp, Homo sapiens
ggaaggcgcagcgttaccgcctcatccgggaattccactctcggcccgcgctggccccgccctttatcgtcatctcccacttgcgcctcctgctcaggcaattgtgcaggcgaccccggagcccccagccgtcctccccggccctcgagcatttccgggtttacctttctaaggaagccgagcggaagctgctaacgtgggaatcggtgcataaggagaactttctgctggcacgcgctagggacaagcggtagagcgactccgagcgtctgaagcgcacgtcccagaaggtggacttggcactgaaacagctgggacacatccgcgagtacgaacagcgcctgaaagtgctggagcgggaggtccagcagtgtagccgcgtcctggggtgggtggccgaggccctgagccgctctgccttgctgcccccaggtgggccgccaccccctgacctgcctgggtccaaagactgagccctgctggcggacttcaaggagaagcccccacaggggattttgctcctagagtaaggctcatctgggcctcggcccccgcacctggtggccttgtccttgaggtgagccccatgtccatctgggccactgtcaggaccacctttgggagtgtcatccttacaaaccacagcatgcccggctcctcccagaaccagtcccagcctgggaggatcaaggcctggatcccgggccgttatccatctggaggctgcagggtccttggggtaacagggaccacagacccctcaccactcacagattcctcacactggggaaataaagccatttcagaggaaaa

SEQ ID NO: 46085 - DNA, 2237 bp, Homo sapiens
  misc_feature (1)...(2237): n = a,t,c or g
ttttttttttttttaaaatttcagatgttttttattcaaaggttctcaaaagaaataaaacagaaaagctaacaatctgatcaaatgtacagttcaaaaatgtcttttggcgtttaacaacaagtcctaggaaagaaaactacagagttatcttgaaccggacaaataagttaccactggcaagtctgtggcactagtaaaacaaaaataaaaaattaactctcttgatcatatagatatctctatgaaaatctttttttttcaatctgtacaaaaggtctttcttcataaattaatttttttataatttaatggctgtctactatgtgatgtttaactgatttttttttttttatgtacagaggttatgtttcccaaatcttacccagacgagtatggcacttagttcagacatttctagcagcagatttcccctcccctctaaccgagctatcaaatttctgtcttaactaatgcaaaaatatcaagtagtgagagacccaggtttataactgtactaggtacacagagggtgctgcgttcagtctggactttcacaaagcagtaatattccagggagcatagaaccaataataccacaactttaaaaaaatgaaacaaaaacaaaaacaaaaacacatttctcttatgactatgtaattttcactagaatctacacttctcagagcagcaaggacttttgaaactatgaaatgtcactgacatctatcatcaaatacaagcataaaatttaagaactaaaaaatacttgaaagaaataactgcttagccctagctcctgagctaggaggatttggtctgtggaaacagggagggccagcaacctgtcccagcacaaaagaaaatagactctgaggtagataactgatcatacacagctgaccagacaagtacacagttttggaagacaacttaatttaccattgcttttaaaacatatgcaattgccttaataaaagagctttaataacagtgaattatcttatatgtactaaagtagaaataactgtgtatttatgaatcaggaatttcatagtttcaaaattggttttctttacacttgaacacttgtagtgatgatgtaaagtgtggcactgccttggatccaaatcttccttcatgcttttttgtttgtgtgtgtccatacatcaattaaaattataaaacctaaatgcaaaggtacaaaaaaggcacattctcctaaccgcaaactggtccggcaaaaataaagagcacagaagatgtgatgctgagacaagttggagctactggttactggctcttcggtctttggtgaagttacctttaaaagtgccaagtcatttttatttttcaaatttacctaatagagagagagagagagagctagtagccaatcgttttgcttctattcgttatctcagcttatgtttgaagataaatccttacttttagcttttgccactttgttgcaatagcaacatttttcggtttgccagatttcaggcataattctcattctaaagcactatcattagtataaaggaaggacaaaacattcagtgactcccctccccaaccaacatccccaaccccaacactacctacactaaatctagtacatcaagttagcttttttttttttcctgaaaaaaggcaaaaaagactttacattgcatcatacagcagatatcctaaatcagtcaaactatcagaggaaactgttggcgtacagccttacaaacaatttaccctaataaaagttccccagtcagaaaatgtcgtttcacacaaaacatttttcccttcttgcatttcactaccttacacattatgtgaaaaatcattaaaaacacctactacatatttaaaaaagccaaaatttcagcaacttttattgactaccttttaaaagccctatgctgctgttttacaaggcataatagaccagctcatttggtcaaagcattctacatcattagtttgaactaacttttactgaaacagctacagcatcaaaagagttaaggcaaattggaattcatagaaaaggataagacacttcacactacgttgaaagaaagacagaaagctaagaaaagagacactgacggcaacactgaattacagcaacactcgcactgcaagcacangaacaccatgggtgaagtcggactatttaaacttcagaaagcccatttcatacagctggaaaaaaaaaacacaaattaaacaca

SEQ ID NO: 46086 - DNA, 1144 bp, Homo sapiens
tttttttttttttttttttctgtaacacgcttaattcactttatttttcttgtataaaaaccctatgttgtagccacagctggagcctgagtccgctgcacggagactctggtgtgggtcttgacgaggtggtcagtgaactcctgatagggagacttggtgaatacagtctccttccagaggtcgggggtcaggtagctgtaggtcttagaaatggcatcaaaggtggccttggcgaagttgccccagggtggcagtgcagccccgggctgaggtgtagcagtcatcgataccagccatcatgagcagcttcttaggcacaggtgcggagacgatgccagtgcccctgggtgcagggatgaggcgtaccagcacagagccgcagcgggcctgtcaccttgcaagggacagtgtggggcttgccgaatcttgttccccccagtagcctctgcgcacggggacgatggagagcttggccaggatgatggccccacggaatggcggtggccacctccttgggagcacttaacacccagaccgacgtggccattgtagtccccgatagcaacaaatgccttgaacctggtgcgctggccggcacgggtctgcttctgcactggcataatcttcaaaacctcatccttgagagaggccccccaggaagaaatcaatgatctctgattccttaatgggcagggagaagagatagatctcctccagggacttgatcttcatgtccttgaccaagcggcccaacttggtgacgggcatccactccttatcctcggccttgccctccgcgagctccgcggcctcggccccggccccgtccacggccgcgaccccggccccggatgccactgccgaaacctccgcggaagccaccgcggttccccatcccagggccaccagggcccccgggcccccccgctgcaccggcgaaaagatggccacatcactgacagcttgacacatgcctcctaagagaggagtgcattgctttagtacccgggccagttgagactgaaacaggaacttggattttctttatttggcttgagttcaatgtggagattttctttgtgaaagcttgaagatattatcttctccctgctaaattccagtaaaataatgttgtcaattt

SEQ ID NO: 46087 - DNA, 1362 bp, Homo sapiens
cggacgcgtggggtagtttccaggcgctgccgggcggctggcactaagcggtcctgaggctgtggctacggctgctccggagctggtggcgccgcgataggagagccgatggccaagtggggtgagggagacccacgctggatcgtggaggagcgggcggacgccaccaacgtcaacaactggcactggacggagagagatgcttcaaattggtccacggataagctgaaaacactgttcctggcagtgcaggttcaaaatgaagaaggcaagtgtgaggtgacggaagtgagtaagcttgatggagaggcatccattaacaatcgcaaagggaaacttatcttcttttatgaatggagcgtcaaactaaactggacaggtacttctaagtcaggagtacaatacaaaggacatgtggagatccccaatttgtctgatgaaaacagcgtggatgaagtggagattagtgtgagccttgccaaagatgagcctgacacaaatctcgtggccttaatgaaggaagaaggggtgaaaccttctaagagaagcaatgggaatttacatcagcaccctcaaaacagagttcacccagggcatgatcttacctacaatgaatggagagtcagtagaccccagtggggcagcccagcactgaaaactgaggagcgcaaggctaagcctgctccttcaaaaacccaggccagacctgttggagtcaaaatccccacttgtaagatcactcttaaggaaaccttcctgacgtcaccagaggagctctatagagtgtttaccacccaagagctggtgcaggcctttacccatgctcctgcaacattagaagcagacagaggtggaaagttccacatggtagatggcaacgtctctggggaatttactgatctggtccctgagaaacatattgtgatgaagtggaggtttaaatcttggccagagggacactttgccaccatcaccttgaccttcatcgacaagaacggagagactgagctgtgcatggaaggtcgaggcatccctgctcctgaggaagagcggacgcgacagggctggcagcggtactactttgagggcattaaacagacctttggctatggcgcacgcttattttagggccagcggcaggggactccagcctgctggacacttcagtccagctctctcctgactggggcttgcgactcacaggattgcatcgtcccagctgctaacttggggccggggcccctcccttccacatataccttgggtttgtgcatgttttctgctgggtgggttcagagggcaatttctcttttatgtgtacatatgctaaataaacataatttaaaaaacaaaaaaaaaaaa

SEQ ID NO: 46088 - DNA, 697 bp, Homo sapiens
gctatgacatgattacgaatttaatacgactcactatagggaatttggccctcgaggccaagaattcggcacgagccagacgcaagatggctgtcctctctaaggaatatggttttgtgcttctaactggtgctgccagctttataatggtggcccacctagccatcaatgtttccaaggcccgcaagaagtacaaagtggagtatccctatcatgtacagcacggaccctgaaaatgggcacatcttcaactgcattcagcgagcccaccagaacacgttggaagtgtatcctcccttcttattttttctaagctgttgggagggtgtttaccaccccgcgtatagcttctgggcctgggcttggcctggattgttgggacgagttctttatgcttatggctattacacggggagaaccccagcaagcgtagtcgagggagccctggggtccatcgccctcctgggcttggtgggcacaactgtgtgctctgctttcccagcatcttggttgggttaaaagtggcttgggcagtggacccaaatgctgccattaaagaattataggggtttaaaaactctcattcattttaaatgacttacctttatttccatttacattttttttctaaatataataaaaacttacctggcatcagcctcatacctaaaaaaaaaaaaaaaaaaatcgcggccgc

SEQ ID NO: 46089 - DNA, 359 bp, Homo sapiens
cgagaacatgcctctcgcaaaggatctccttcatccctctccagaagaggagaagaggaaacacaagaagaaacgcctggtgcagagccccaattcctacttcatggatgtgaaatgcccaggatgctataaaatcaccacggtctttagccatgcacaaacggtagttttgtgtgttggctgctccactgtcctctgccagcctacaggaggaaaagcaaggcttacagaaggatgttccttcaggaggaagcagcactaaaagcactctgagtcaagatgagtgggaaaccatctcaataaacagtcgacgcggccgcgaattccagatctatgaatcgtagatactgaaaaacccc

SEQ ID NO: 46090 - DNA, 1705 bp, Homo sapiens
cgcggaccgggcgtacgtggcttgcggctcccggggccggctactcccgggagtacatggcccggggcgcggcccgcataggcaggcctcgccccgatacggtcgccatgcccaagagaggaaagcgactcaagttccgggcccacgacgcctgctccggccgagtgaccgtggcggattacgccaactcggatccggcggtcgtgaggtctggacgagtcaagaaagccgtagccaacgctgttcagcaggaagtaaaatctctttgtggcttggaagcctctcaggttcctgcagaggaagctctttctggggctggtgagccctgtgacatcatcgacagcagtgatgagatggatgcccaggaggaaagcatccatgagagaactgtctccagaaaaaagaaaagcaagagacacaaagaagaactggacggggctggaggagaagagtatcccatggatatttggctattgctggcctcctatatccgtcctgaggacattgtgaatttttccctgatttgtaagaatgcctggactgtcacttgcactgctgccttttggaccaggttgtaccgaaggcactacacgctgggatgcttccctgcctttgcgtctgcgaccagagtcaatggagaagctgcgctgtctccgggcttgtgtgatccgatctctgtaccatatgtatgagccatttgctgctcgaatctccaagaatccagccattccagaaagcacccccagcacattaaagaattccaaatgcttacttttctggtgcagaaagattgttgggaacagacaggaaccaatgtgggaattcaacttcaagttcaaaaaacagtcccctaggttaaagagcaagtgtacaggaggattgcagcctcccgttcagtacgaagatgttcataccaatccagaccaggactgctgcctactgcaggtcaccaccctcaatttcatctttattccgattgtcatgggaatgatatttactctgtttactatcaatgtgagcacggacatgcggcatcatcgagtgagactggtgttccaagattcccctgtccatggtggtcggaaactgcgcagtgaacagggtgtgcaagtcatcctggacccagtgcacagcgttcggctctttgactggtggcatcctcagtacccattctccctgagagcgtagttactgcttcccatcccttgggggcagcctcgagtgtagtccattagtaatcagattccagtttggacagggtggctggattgtatatctcgttagtaatgtacatgctcttcaggttctagggctcctgttaggggagggagaaatgttgaatcaagagggaaaacaactactatgatttataaacatattttaatgtaaaaatttgcatttaaaaggagtggccctgttttctgtgttaaaaccccatttggtgctattgagtttgttctttattcttttatcccagtgaaaattgttgatcttgctgtagggaaaaattaaactctttgaatctccaaacaaggaagtttcagcattcccttatggatcagaggaaccttagaggcctgaaattgttgcttccagtttagctgcccctcaaattcaagtgaatattttcccttctccctttacccttctccagaaataaagcaggtgacagggttttcagaatcttaccatattgacttgtgta

SEQ ID NO: 46091 - DNA, 3120 bp, Homo sapiens
cagctatgacatgattacgaatttaatacgactcactatagggaatttggccctcgaggccaagaattcggcacgagctatctgtctttctctttcattcttttccatttggccctgttctgtcccaacatgaaggcaataatttgttacctcattaatggatctctccttttactttttcaaccacttccttatgctacccatgaaacctagttggggctctgttgtgtctgatttcccctggcttattctttactttttcctccttttccaggctcagcagggagctgctggaggcagtagagcctgaagtcttgcaggactcactggatagatgttattcaactccttccagttgtcttgaacagcctgactcctgcctgccctatggaagttccttttatgcattggaggaaaaacatgttggcttttctcttgacgtgggagaaattgaaaagaaggggaaggggaagaaaagaaggggaagaagatcaaagaaggaaagaagaaggggaagaaaagaaggggaagaagatcaaaacccaccatgccccaggctcagcagggagctgctggatgagaaagggcctgaagtcttgcaggactcactggatagatgttattcaactccttcaggttgtcttgaactgactgactcatgccagccctacagaagtgccttttacgtattggagcaacagcgtgttggcttggctgttgacatggatgaaattgaaaagtaccaagaagtggaagaagaccaagacccatcatgccccaggctcagcagggagctgctggatgagaaagagcctgaagtcttgcaggactcactggatagatgttattcgactccttcaggttatcttgaactgcctgacttaggccagccctacagcagtgctgtttactcattggaggaacagtaccttggcttggctcttgacgtggacagaattaaaaaggaccaagaagaggaagaagaccaaaacccaccatgccccaggctcagcagggagctgctggatgagaaagggcctgaagtcttgcaggactcactggatagatgttattcaactccttcaggttgtcttgaacagcctgactcctgccagccctatggaagttccttttatgcattggaggaaaaacatgttggcttttctcttgacgtgggagaaattgaaaagaaggggaaggggaagaaaagaaggggaagaagatcaaagaaggaaagaagaaggggaagaaaagaaggggaagaagatcaaaacccaccatgccccaggctcagcagggagctgctggatgagaaagggcctgaagtcttgcaggactcactggatagatgttattcgactccgtcaatgtactttgaactacctgactcattccagcactacagaagtgtgttttactcatttgaggaacagcacatcagcttcgccctttacgtggacaataggttttttactttgacggtgacaagtctccacctggtgttccagatgggagtcatattcccacaataagcagcccttagtaatccgagagatgtcattcctgcaggcaggacctataggcaagtgaagatttgaatgaaagtacagttccatttggaagcccagacataggatgggtcagtggggcatggctctattcctattctcagaccatgccagtggcaacctgtgctcagtctgaagacaatggacccaagttaggtgtgacacgttcacataactgtgcagcacatgccgggagtgatcagtcagacattttaatttgaaccacgtatctctgggtagctacaaagttcctcagggatttcattttgcaggcatgtctctgagcttctatacctgctcaaggtcagtgtcatctttgtgtttagctcatccaaaggtgttaccctggtttcaatgaacctaacctcattctttgtatcttcagtgttgaattgttttagctgatccatctttaacacaggagggatccttggctgaggattgtatttcagaaccaccaactgctcttgacaattgttaacccgctaggcctcctttggttagagaagccacagtccttcagcctccaattggtgtcagtacttagggaagaccacagctagatggacaaacagcattgggaggccttagcccctgctcctctcaattccatcctgtagagaacaggagtcaggagccgctggcaggagacagcatgtcacccaggactctgccggtgcagaatatgaacaatgccatgttcttgcagaaaacgcttagcctgagtttcataggaggtaatcaccagacaactgcagaatgtagaacactgagcaggacaactgacctgtctccttcacatagtccatatcaccacaaatcacacaacaaaaaggagaagagatattttgggttcaaaaaaagtaaaaagataatgtagctgcatttctttagttattttgagccccaaatatttcctcatctttttgttgttgtcatggatggtggtgacatggacttgtttatagaggacaggtcagctgtctggctcaatgatctacattctgaagttgtctgaaaatgtcttcatgattaaattcagcctaaacgttttgccgggaacactgcagagacaatgctgtgagtttccaaccttagcccatctgcgggcagagaaggtctagtttgtccatcagcattatcatgatatcaggactggttacttggttaaggaggggtctaggagatctgtcccttttagagacaccttacttataatgaagtatttgggagggtggttttcaaaagtagaaatgtcctgtattccgatgatcatcctgtaaacattttatcatttattaatcatccctgcctgtgtctattattatattcatatctctacgctggaaactttctgcctcaatgtttactgtgcctttgtttttactagtgtctgctgttgcaaaaagaagaaaacattctctgcctgagttttactagtgtctgctgttgcaaaaagaagaaaacattctttgcctgagttttaatttttgtccaaagttaattttaatctatacaattaaaaccttttgcctatcaaaaaaaaaaaaaa

SEQ ID NO: 46092 - DNA, 2407 bp, Homo sapiens
tcgagttttttttttttttttttttaagattttcaaaatatttttatatagaaattttttacaaagattttacaacatagcaaatcattatgtcatactgtagaaagatgaagcaaaggattaaactccaaggataaagaaagtgctcatagcaacgtattgcagtctccatgaaagtgcatataaacggttaaggcaaagtaccatcttggtacagacatgttgcaaactgacttttaaaacaattttttaaaatatatacaaactttttttcttctattcttctcaaaggcatttgaaagggatacttttatgaatattcttgctgtaggaacaatgtagaaataacttctgggtataaaacagtaaaaataaaaatattctacctgagtgtgttaaatcaagtgatttgtaaaacaaaaccttcacaagtgtgggctttctacatgtaacttgcccaggctgaaggcttacaccctcatgttctacaacacagatcactaatgatgataacatgagttaaattgggattcttgcccttctgtgtggcttttggcttctaggttctatgaccaaactattgacatatttgaagtctgtatgcagtcattgtgtgataaatctactttacagctttgcttctacctgcagcttacatgataaccatgctgtgaagtgctacatatgcttcatacaatatgttgccccatctgataataaaaatacaaaggtgctctttaagctaaaccataaaccttattagagaattctagttaagtgttttgtttttccacatacatgtaaataccttaagatcaataggatcaataaggataatattagttatcaaaatttagtcttcatacttgaagaatttgtttttaaaaataactaagatgcaaaaaaataaattagctagtcttgaacaagagtgagttttgcagaaaactgacatatctgaattctagtacagataagaatctgtcaaatgataactgaattcacgtgactaaccactcttttacgtaagattgtatctactcatgagaaataggggaattcagtgttatcattatagtctccgtatttaaactgagtttttcttttccaattttttttccatgcctcaacataagggaaattaatcagttaatttctgctgacttaggtttcctaaacagcttttagttctcaaggcacagctgtggtaaaaacagagcaaaacacccagccatttattggaattctgcagtacaaaataagcacatgtgctctatataatctagtaacaggatagcaacagttaaactgtctcaaacaacagatgtatttgcttgattttccttcctaacttcttttgcatcaggaccgcaagcaaagagcttgtttcccagagtattttgggcaaatccggaaatacataatgtggcccattgccacaaaggagactgaaatcaatacgagcaagccaaaagcttcaggatttggagccaggatgaccatgatgaaatgcagaagatcaagaagatagttcatggagttctgtacaccatttataatgcctctttcagattcaattacattttcttgcagcaactgtgtcacagttaaatcaaaggaccaaagaccgattctagcagcaatgacgcctgcaaacagcagactgacagagattatgggcacagattcaggacttgtctccgggacaatattagcagaattagacccattagacatgtatatttcagttgtaatttcaggtatcttggtaggtgtaattgactctccttgaatgaaccttgatcggatatcttcaaaaggagaaacggacaagtccagggggcttccaggcatgaatacagagatcacacacaagatcaaacaggaaagctgtgcccaatcctgagatcagacctgtccgaaccaaaccacattttcgacgtagccaagtaaaagctacagttcccattattccagttatagctgatgctcccatcaaaatactgaggatggaaccactcagtccctgagtgtaggcgtaccctgtggtgatgcagtcaaagcccaggacagtcatataaaggaaagcaagacccatgccagccagaaacacaggctggttgtagtaggagacccatccatctcggaaggtacggaagggctcagccatctgggaggcacaagtaggctcttgctcatgttcaagctcatggatgttagagtctttcacacccattagatgagttccctccaggggttttggctcagtatctttgtgtaaattcagctgtttcaattcagtttcctcttctttaagaccagctttcacagctagagctggggttttctggtaaaccttccagagcagaacgtactccacgcacatggataccaagttccatcccga

SEQ ID NO: 46093 - DNA, 1398 bp, Homo sapiens
tttagtttgttagctgcctggagtgttattttaagaaagcagaagcaccatcatttgcacactccttatagatcacacaccttaaccctgactttttttgctccagtttttcagaagaagtgaagtcaagatgaagaaccatttgcttttctggggagtccctggcggtttttattaaggctgttcatgtgaaagcccaagaagatgaaaggattgttcttgttgacaacaaatgtaagtgtgcccggattacttccaggatcatccgttcttccgaagatcctaatgaggacattgtggagagaaacatccgaattattgttcctctgaacaacagggagaatatctctgatcccacctcaccattgagaaccagatttgtgtaccatttgtctgacctctgtaaaaaatgtgatcctacagaagtggagctggataatcagatagttactgctacccagagcaatatctgtgatgaagacagtgctacagagacctgctacacttatgacagaaacaagtgctacacagctgtggtcccactcgtatatggtggtgagaccaaaatggtggaaacagccttaaccccagatgcctgctatcctgactaatttaagtcattgctgactgcatagctctttttcttgagaggctctccattttgattcagaaagttagcatatttattaccaatgaatttgaaaccagggctttttttttttttttgggtgatgtaaaaccaactccctgccaccaaaataattaaaatagtcacattgttatctttattaggtaatcacttcttaattatatgttcatactaagtatcaaaatcttccaattatcatgctcacctgaaagaggtatgctctcttaggaatacagtttctagcattaaacaaataaacaaggggagaaaataaaactcaaggagtgaaaatcaggaggtgtaataaaatgttcctcgcattcccccccgcttttttttttttttttgactttgccttggagagccagagcttccgcattttctttactattctttttaaaaaaagtttcactgtgtagagaacatatatgcataaacataggtcaattatatgtctccattagaaaaataataattggaaaacatgttctagaactagttacaaaaataatttaaggtgaaatctctaatatttataaaagtagcaaaataaatgcataattaaaatatatttggacataacagacttggaagcagatgatacagacttctttttttcataatcaggttagtgtaagaaattgccatttgaaacaatccattttgtaactgaaccttatgaaatatatgtatttcatggtacgtattctctagcacagtctgagcaattaaatagattcataagcata

SEQ ID NO: 46094 - DNA, 1456 bp, Homo sapiens
acttttttttttttttttttttagtagcacgattattttattatatgctttataaaaaaacaaacacccaaagacatacaacacaccgccctcaccccccagcggccattagggagggggcttatacttttcctaatgtagatctggccatcttataaagcagaccacattatttgtttccatatatacctgtagatatttctctcccctcaaatatttatatctcgactaaaaaaaaggaggtgcaaagagtatataaagataaatgagattttcttgctgttgttatagtacaaacaccagatgactaccagtggagtaacagggcaaaacaaaaacacaaaccccaccttcagtgaggaatggaaggtctgttaccgacctcaagtagctgaatcacctgctgtaactggcacctccctgacaatcatgggtttgtagggacatgggccaggtgatggcttctacttgtttccagaaggctaatgtgtcctacaccctttcttagtaactaaagacgaactacgggagaacccagtatttggattctgcccagaggtattaaatgcacaaggaaaaattagttatgtccaagtagcaagcaataatatttttaaaccaacatggttaaatgttaagatttgtagaaatcaaaatatttattcacataattttaaactaaagttgaagctaatatatcttccgtggtaatgatttaagtgcaagtgatgcttggctttctttcacattcatttcttttcttctgagtgaaggcatatcagttattcttgaacaagtcaatacagctctgcaaaagggagacattgttcctggcatgttttatttccagttcagacatttcaattagattctttctaaatgctgccactctcttccgtttgaaatttatcagttctacaggaagaaaaaatgtttatgaaaccaagaaaaactaaacaattttcatgttcactttaactaccaaatggcattcttacaaatggtctccaatgctttcaggcaccagcattatttcctcacatttgtattatctctgtgactgggacacatcagacatctattaactgtggtgatacagctatcactgtctttaagtggaaaacatcactgaatcaccaagcatcgtgagtgggagagcagcagcttatgacttggagaacacgttgatgagcagcctcactctcaccctctaggtaccagtgactgggaacagggctggagtatgggtggtggtgagccacatacttcaccaatggcttgtgaaaatgcttctcaaaagaagacataccaggttcatgcaaacaacgttccagcagcacctagcccattagggaaatgcaaattaaaacccacaatgagattacctcacacctgctagaatgcattttctcaaatagatgaaagatcagtgttagcaacaatgcagagaaaagtg

SEQ ID NO: 46095 - DNA, 961 bp, Homo sapiens
  misc_feature (1)...(961): n = a,t,c or g
ccagaaaaaaaaaataaaactctcattattngtgtggctaattataattcagcgttatttaagcacataaagaccaaaaaaaaaaaaaagaaatccaaaagatccaaactttttttaaacttaaaaaatctctttgtagtatgtcagttgcactttttttctgccataatgtaacgtagcttgccccgtcaaaaattcaattaaaattcatggccagcaatcctgttccccctcagcatcctggatttaattttcctgttgcttttgcttgcttctccatttaatagttactgaactttatgcatgttgatctatattgattttcactgcagttgaatgaacaaattatttcagtgtgacagccatgactcaagttccaattagtctgaaaagggtactttggaattgtcccatattaatcagagatggcaaaagaaaaagttctcatattaccaggttgattttgtgtctcatttcaaattttaatttaaaattatggttttcatttttgtttaccttaaagtgatgcttaaaagtggcatgtaattaggacacttaggtttgttgaaagcattttcggacatttgtataaaagaatttgtgataaatatatccaggtgctcaccaaagaaacatgtattaacaacttaaattagatttttctaactgatagttttcactcatttataatcagtaggagagactgtctagatgttgggggcagctctatgatttaagtctgtaacatgttataactgaatttagtaccctagttttgttaagctattaggattttctaatagaacttactccccctgcctccccagccttatgtttcttttaatgacttctggatcctgagctccctttgcagtctgaaaaaggtattgcagtcagaactgtgtactgatgataaaagcctctggtagcaataaaaagttgtccttaaaaaaaaaaaaaa

SEQ ID NO: 46096 - DNA, 370 bp, Homo sapiens; identical to SEQ ID NO: 24578
  misc_feature (1)...(370): n = a,t,c or g

SEQ ID NO: 46097 - DNA, 1876 bp, Homo sapiens
cgctagcctgcggagcccgtccgtgctgttctgcggcaaggcctttcccagtgtccccacgcggaaggcaactgcctgagaggcgcggcgtcgcaccgcccagagctgaggaagccggcgccagttcgcggggctccgggccgccactcagagctatgagctacggccgcccccctcccgatgtggagggtatgacctccctcaaggtggacaacctgacctaccgcacctcgcccgacacgctgaggcgcgtcttcgagaagtacgggcgcgtcggcgacgtgtacatcccgcgggatcgctacaccaaggagtcccgcggcttcgccttcgttcgctttcacgacaagcgcgacgctgaggacgctatggatgccatggacggggccgtgctggacggccgcgagctgcgggtgcaaatggcgcgctacggccgccccccggactcacaccacagccgccggggaccgccaccccgcaggtacgggggcggtggctacggacgccggagccgcagccctaggcggcgtcgccgcagccgatcccggagtcggagccgttccaggtctcgcagccgatctcgctacagccgctcgaagtctcggtcccgcactcgttctcgatctcggtcgacctccaagtccagatccgcacgaaggtccaagtccaagtcctcgtcggtctccagatctcgttcgcggtccaggtcccggtctcggtccaggagtcctcccccagtgtccaagagggaatccaaatccaggtcgcgatcgaagagtccccccaagtctcctgaagaggaaggagcggtgtcctcttaagaaaatgatgtatcggcaagcagtgtaaacggaggacttggggaaaaaggaccacatagtccatcgaagaagagtccttggaacaagcaactggctattgaaaaggttattttgtaacatttgtctaactttttacttgtttaagctttgcctcagttggcaaacttcattttatgtgccattttgttgctgttattcaaatttcttgtaatttagtgaggtgaacgacttcagatttcattattggatttggatatttgaggtaaaatttcattttgttatatagtgctgactttttttgtttgaaattaaacagattggtaacctaatttgtggcctcctgacttttaaggaaaacgtgtgcagccattacacacagcctaaagctgtcaagagattgactcggcattgccttcattccttaaaattaaaaacctacaaaagttggtgtaaatttgtatatgttatttaccttcagatctaaatggtaatctgaacccaaatttgtataaagacttttcaggtgaaaagacttgattttttgaaaggattgtttatcaaacacaattctaatctcttctcttatgtatttttgtgcactaggcgcagttgtgtagcagttgagtaatgctggttagctgttaaggtggcgtgttgcagtgcagagtgcttggctgtttcctgttttctcccgattgctcctgtgtaaagatgccttgtcgtgcagaaacaaatggctgtccagtttattaaaatgcctgacaactgcacttccagtcacccgggccttgcatataaataacggagcatacagtgagcacatctagctgatgataaatacacctttttttccctcttccccctaaaaatggtaaatctgatcatatctacatgtatgaacttaacatggaaaatgttaaggaagcaaatggttgtaactttgtaagtacttataacatggtgtatctttttgcttatgaatattctgtattataaccattgtttctgtagtttaattaaaacattttcttggtgttagcttttctcagaaaaaa

SEQ ID NO: 46098 - DNA, 3734 bp, Homo sapiens
gcgaccgcgtcggagaggaggtggcagcggcccgggaggccggagccaaggccagcgacccaccatggagacccgctacaacctgaagagtccggctgttaaacgtttaatgaaagaagcggcagaattgaaagatccaacagatcattaccatgcgcagcttttagaggataacctttttgaatggcacttcacggttagagggcccccagactccgattttgatggaggagtttatcacgggcggatagtactgccaccagagtatcccatgaaaccaccaagcattattctcctaacggctaatggtcgatttgaagtgggcaagaaaatctgtttgagcatctcaggccatcatcctgaaacttggcagccttcgtggagtataaggacagcattattagccatcattgggtttatgccaacaaaaggagagggagccataggttctctagattacactcctgaggaaagaagagcacttgccaaaaaatcacaagatttctgttgtgaaggatgtggctctgccatgaaggatgtcctgttgcctttaaaatctggaagcgattcaagccaagctgaccaagaagccaaagaactggctaggcaaataagctttaaggcagaagtcaattcatctggaaagactatctctgagtcagacttaaaccactctttttcactaactgatttacaagatgatatacctacaacattccagggtgctacggccagtacatcgtacggactccagaattcctcagcagcatcctttcatcaacctacccaacctgtagctaagaatacctccatgagccctcgacagcgccgggcccagcagcagagtcagagaaggttgtctacttcaccagatgtaatccagggccaccagccaagagacaaccacactgatcatggtgggtcagctgtactgattgtcatcctgactttggcattggcagctcttatattccgacgaatatatctggcaaacgaatacatatttgactttgagttataatatggttttgtgacttatgagctgtgactcaactgcttcattaaacattctgcattgggtataatctaagaattgtttacaaaaagattattttgtatttacccttcattcctttttttgatccttgtaagtttagtataaatatatctagacattcagactgtgtctagcagttacgtcctgcttaaagggactagaagtcaaagttccttgtctcactatttgatctgctttgcagggaaataacttgttttttctcatgtttcatcttctttttatgtaaatttgtaatactttcctatattgccctttgaaatttttggataaaagatgatgttttaagttccaatgagtattactagttactcaataccacttattgagtactctgtttctacgtatgtagaatgtatagggatagaagagttgaaaagggaaagcaaaactcctcaagtagcttccttaaaatgtcattcataggagatgtactggaattgctcattctgtgactttatttgtgtcctaaacattcttcagtgaaaataattttatttcagtcaaacatttatgaggaaatgagatcacatctttgtcactggatgctacttgaagagggagtactttgtaaccactttgatatgctgttatcaccaccccctgccctctgctgccataatcacacaaatttaaaaagaaagaaaacagtcttccatagatttttaaggaagaaagggcccaagccaggagatcgcttggttttcttccagaagttaaatggggggatctgaagatttgaatgtttggtctgctttgaaatgtatgtcttttgggatgtattatatgcctagctttataatcagtataaattttaattattccaggaatatgcataatattgaaatatttcatgtcctattttaatagaaaacctcagggcccaagtaacagtgatagaagttagaaaaacctttacttagaattgtccacctagtcagagcccaagaaagaattttcagtggaaaaatcaatatataacttagtgctagctagcgccacagactctagtagataatattatcatcataatggctggtgaaaccatataatcacagaaaaacattgccttcagcatgttcagttcgcagcactgagggcactcttgagggtgttgttaatgaagatttaatttttaaatacaggtggttccaagctttcaaataggttatgctccaaaagtgttatttgtaagttaatttttttacaagtcaaacaatgttggaagtggtatttaggttctagatcggtccacgaaagttagcccatatgtatatcttgaatagtataggggagggtattcataaagtccttatgtggttttaactaagtgaaattatggacaagagaaataattgtaaaatcgtcttaaaggcaaatttaatttttactcctgtttatgggacattcgttctattaactgtcagacacaatttctgttttcatctgagagccagttttcctttatttctacatctaaaataagaacatattgtacactattatataatacagaattgtcttaaactttaataaattcgcattttaaaggtgtttacagattattttttatatctgtagctgaatttgttaaagtctaaaaagctcaaggactttatgaagatctcattatatgaggaaaatcataggttaccattttataactctattgccataagaaaatacactctaaaatcttgatttgaaacatattagaaaccttgattcagtgctcagtggtctcctagtaagaagtcaccgacggtagcgtcatatgagaagaaagaaatccccaccacctcaacctctgctgagattgtgtgctaggaacagccttccctccgtttcccctcagtcaaacttgagccagcctctggatcgatgtgatcttattgcatgtttccatggggtgtacctatactttaagccaatcctgctgcattcactgctaagttaaataaaaagccaagaagattttgcactgtgcagatcctttgctatctgacttgcatctcttcccccacctgtcagctagccacctgcttgtttgtgttgggatattttttagcacctgaagcaccatctgaaaggggcaccattttcttcttccctttgatctcacatatgctccctaaaaatccttaagttgtcaatctgatccccagtgtgaggttaatgagcaaaattggtctttggggccctttttgtccaagccccactgaaaggcctcttcagaaaactattatctttaaagccctactttaactccttaattccagcatacagctaaaactggatgtatattctggcaagtaaaggctgaggactcctctttaatcctcagatctagataactcatgacattttatttgaccaacatagcacatgatgagatatcaaggtaattaaaatagcatgcttgaaaaaaaaatacgtaatctgtttcacctgtaactgtttaagccaataaacttttcaaaatttatgtaatgtggggcttttatgtagcactttacgttttcatgctgcttattgttttattctactgaaaaaaatgaatttcaagattctcaacttttttaatttcaaaaattgtttattgttttgactataggaatacaaaatttcctattttgggagaataagaactctttttgtc

SEQ ID NO: 46099 - DNA, 1149 bp, Homo sapiens
cttcctctcttctctcttcctctcctctctctcttcctcttctctctcttcccctcctggctctcctcccctcctctctctcttcctctcctctctcttcctctcctctctctacccctcctgtctctcctcccctcctctctcttcctctcctctctctcttcctctcctctctcttcccttcctgtctctcttcccctcctctctctcttcctgtcctctatctcttcccctcctctatctcttcctctcctctctctcttcctctcctctctctctcttcctttcttctctctctcctgtctcggctgttgtgggttgcaggttgggtgctgctgttgtggtccttcccagaaactgccagtagagggcagcctgggcatcctaatgcttactctggttgttacacaaagaaaatattggggtcactggcgagcccacccacactcaccagaatctccactgtagtccccctaacaaacagcccttcacttcctctcccacttcagcaatttgtattttgatgccattggcctcagatcagagtgttttaaatcatcacgccctggcttatccctggtcgagccaggacacggggtgcttcagtgggtctgtcaccctctctccttgaagcatgttgcttttatttatttacttttactctcaccctgctcctgtaccagcaggggccacttcaaagccaaggtacagggtgataacttgtggtccagcatcagttttctccacttctttctcccactcacccccagcaaggtgcctggggagacttgagcagatgtttcattttggcctggccagtggctgaaagccaggcctccaatgcactgtgacctctggcttccccagcagctttcccagagaggcagaggggccttccacagcccgggttctcctgctgcctcctgcctgctgcagctgcaggcattctgaggggcaacgtggaggaagggccagggatgcatgggattttaattgtttcatcacaccttccccgtggcaaagaaacagtcagtcctcttcaggtgtcttctggatttctggtgatggacagagaaatctttttacagtttcaaattatgttcaacaaataaaaattgcattttttattttgaaaaaaaaaaaaaaaaa

SEQ ID NO: 46100 - DNA, 1084 bp, Homo sapiens
gctcaagtctgccttgtgtggaaattatgtcagctttggcgtcttcaagttgtatggggacaaccattttgacaatgtactccaggcttttgtcaaaatgctgctgtcagtgtcccacagtgacttgctacaataccggaaactgagccagtcttattatccactcctggaatgtctcactcaggaccatatgagcttcatcatcaacttagagcctcctgtactcatgtatgttctcacatctatctcagagggactcactactcttgatacagttgtctcctccagctgctgtaccagtttagactacatcgtcacctacctcttcaagcacatagcaaaagagggcaagaagccacttcgatgcagagaggctacccaggctggtcagagactattacattttatgcagcaaaacccagatgtcctgcagcagatgatgtctgtcctcatgaacaccattgtctttgaagactgtcggaaccagtggtcagtatccaggcctctcctggggctcatcctgctcaatgagaagtatttcagtgaactgagagcaagtttgataaacagccagcccctccccaagcaggaggtccttgcccagtgcttcagaaacctaatggaaggagtggagcagaacctgtccgtcaagaacagagacaggttcacccaaaatctgtctgtattcagaagagatgtggcagaggcgttgcgcagtgatggcaacactgaaccatgcagtctcgacatgatgagctgaccagacttttctgaccatgtgcggagcagcctttatcaagagactcctgaaggtctgggtctcaggacagtgatgttggctagcccaggggaatgtatttttcaaaacatacaagcaacagcaaaaaccctaacttcttatacgtctagcctaattataagaatttctaacagtaccagtgtaaattcagtcttttctctgaaaagcaaaggatgtgttttcagtctttctatcaaatattatctttgttctcctaatgctctgaaaggatgtagaaacaatatttaaccaaagaacgtaataaaccaggtttgcacctaaaaa

SEQ ID NO: 46101 - DNA, 504 bp, Homo sapiens; identical to SEQ ID NO: 24633
  misc_feature (1)...(504): n = a,t,c or g

SEQ ID NO: 46102 - DNA, 1631 bp, Homo sapiens
gccgcgggcggcggcggcagcggttggaggttgtaggaccggcgaggaataggaatcatggcggctgcgctgttcgtgctgctgggattcgcgctgctgggcacccacggagcctccggggctgccggcacagtcttcactaccgtagaagaccttggctccaagatactcctcacctgctccttgaatgacagcgccacagaggtcacagggcaccgctggctgaaggggggcgtggtgctgaaggaggacgcgctgcccggccagaaaacggagttcaaggtggactccgacgaccagtggggagagtactcctgcgtcttcctccccgagcccatgggcacggccaacatccagctccacgggcctcccagagttgaaggctgtgaagtcgtcagaacacatcaacgagggggagacggccatgctggtctgcaagtcagagtccgtgccacctgtcactgactgggcctggtacaagatcactgactctgaggacaaggccctcatgaacggctccgagagcaggttcttcgtgagttcctcgcagggccggtcagagctacacattgagaacctgaacatggaggccgaccccggccagtaccggtgcaacggcaccagctccaagggctccgaccaggccatcatcacgctccgcgtgcgcagccacctggccgccctctggcccttcctgggcatcgtggctgaggtgctggtgctggtcaccatcatcttcatctacgagaagcgccggaagcccgaggacgtcctggatgatgacgacgccggctctgcacccctgaagagcagcgggcagcaccagaatgacaaaggcaagaacgtccgccagaggaactcttcctgaggcaggtggcccgaggacgctccctgctccacgtctgcgccgccgccggagtccactcccagtgcttgcaagattccaagttctcacctcttaaagaaaacccaccccgtagattcccatcatacacttccttcttttttaaaaaagttgggttttctccattcaggattctgttccttaggtttttttccttctgaagtgtttcacgagagcccgggagctgctgccctgcggccccgtctgtgggctttcagcctctgggtctgagtcatggccgggtgggcggcacagccttctccactggccggagtcagtgccaggtccttgccctttgtggaaagtcacaggtcacacgaggggccccgtgtcctgcctgtctgaagccaatgctgtctggttgcgccatttttgtgcttttatgtttaattttatgagggccacgggtctgtgttcgactcagcctcagggacgactctgacctcttggccacagaggactcacttgcccacaccgagggcgaccccgtcacagcctcaagtcactcccaagccccctccttgtctgtgcatccgggggcagctctggagggggtttgctggggaactggcgccatcgccgggactccagaaccgcagaagcctccccagctcacccctggaggacggccggctctctatagcaccagggctcacgtgggaacccccctcccacccaccgccacaataaagatcgcccccacctccaccctcaaaaaaaaaaaaaa

SEQ ID NO: 46103 - DNA, 1615 bp, Homo sapiens
actcattcgccctcccggtcatcatcttcaccacgttctggggcctcgtcggcatcgccgggccctggttcgtgccgaagggacccaaccgcggagtgatcatcaccatgctggtcgccaccgccgtctgctgttacctcttctggctcatcgccatcctggcgcagctgaaccccctgttcgggccccagctgaagaatgagaccatctggtacgtgcgcttcctgtgggagtgacccgccgcccccgacccaggtgcccagctctcggaatgactgtggctccactgtccctgacaaccccttcgtccggaccctcccccacacaactatgtctggtcaccagctccctcctgctggcacccagagacccggacccgcagggcctgcctggttcctggaagtcttcccagtcttcccagccagcccgggccctggggagccctgggcacagcagcggccgaggggatgtcctgctccaatacccgcactgctctggagtttgccctctttcccaaggagatgctgctggggagctggtatgggtggggtctttccctttacagacggggcagatgccaggactcagcccatcctgaggaggacacgtgtcctcatggagagggtgctccggcccaggcgggggagtcggtgcccagtcagcagctctgccaccatcctgctgggaactgggggggcctctattgggttataggcaaggccttttctctggcatggaattgttaattttctgacacgtctagatgtgaaatttctgaaaatgttgaagcagagaaacattcacacacaaaaagcaacatagtcatgtgggtccagatggcctcagtcctagatgttggcaccctttgctgtgtctcctcagagtatcctgttccgcctcctgccacctggacctccctcagtggatgtcttccctcccccgaccccagcctgtcagtccgagcacagtgcaggtttggctctgacttgggcctttggctgcagtgggggtggatttcagagcctctcatggcagcatctaagtgaccagagctgggatgagagaggggaaggggcaatgtgagtggcgctatgggacgggccagccctgctcctgagccagccccgccctctgccccctggccctgggctctgtgctagggatggtgaagaatgggggcgtgccagcctggcaggagtgggaagcaacacgcaggggtcccggacctctccagccttgccctcacgcttatccgagctcccagtgtggttagcacagagctcacccaccttgcctggctcccagctggggcctgtcctcactggtgctccaggggaagaaacgacagcctcacttctgtatggactgctgatgtggcctgccatcctgttcagcgggcattgtctttggagcagcaggagactaggatgcctctcactcacatcgcagttcctggctggccagctgctcagggctcaggctggggcctcccattgacatcctccccctacactccctctctgagcctccgtcgcccctcctgttgggtaagggtgttgagtgtgacttgtgctgaaaacctggttcatatataataaataatggtgatgaaaag

SEQ ID NO: 46104 - DNA, 5832 bp, Homo sapiens
gcgctcgccgggcaccggggttgaggcgaggagccgcggcagcacggtcgggcggggcggcggcgctgacagcatcctgaggttagcattacacttctcccagtggagcccatgacttctgatcaggacgctaaggttgtggctgaaccgcagacgcagagagtccaggagggcaaggacagcgctcatctgatgaatggtcctatatctcaaaccacttctcagacaagttccatcccacctttgagtcagaaaacactcctcagctaccggtgtcagaggacggtgttgtttggggatggcatgatagagacggacagttcgtaccagcaactaaggtttcagagctgaaccctaatgcagaagtgtggggggctcctgtgttacatctggaagcaagcagtgctgctgacggtgtgagtgctgcatgggaggaggtggctggccaccacgcagaccgtggcccgcagggatcggatgccaatggtgatggtgaccagggccatgagaatgccgcattgccagacccgcaggagtcggacccagcagacatgaacgctctcgctctgggtccctcagaatatgactctctgcctgaaaatagcgagacaggaggaaatgagtctcaaccagacagccaggaagacccccgagaagtacttaaaaaaacattggaattctgcttatctagggagaaccttgctagtgacatgtatcttatatcacagatggatagtgaccagtatgtgccaatcacaacggtggctaacctcgaccacatcaagaagctcagcactgatgtggacttgattgtggaagtgctaagatctttacctttagtccaagtggatgaaaagggagaaaaagtaaggccaaatcaaaatcgctgcatagtaatattgcgtgaaatatctgaatctacccccgtggaagaagtagaagcactatttaaaggagataatttaccaaaatttataaactgtgaatttgcatataatgataattggtttattacatttgaaacagaagctgatgcacaacaggcttacaaataccttcgagaagaagtcaaaacttttcaaggaaaaccaattaaggcacggataaaagcaaaggcaatagctataaacacatttttgccaaagaatggatttagacccctggacgtgagcctgtatgcccagcagcgctacgcgacgtcgttctacttccctcccatgtacagcccccagcagcagttccccctgtacagcctgatcactccccagacgtggtcagcaacgcacagctatcttgacccacccttggtaactccatttccaaatactggatttataaatgggtttacgtctccagcgttcaagcctgcggcgtctcctctgacttctctcagacagtatcctcctcgaagcaggaatcctagtaaatctcatctgcggcatgcgattcctagtgcagagaggggacctgggttattagaaagtccttcaatatttaacttcactgcagatcgattaattaatggtgtccggagtccacaaacaaggcaagcaggtcaaactagaacacggattcaaaacccttcagcatatgccaagagagaggctgggcctgggcgtgtggagccaggcagtctcgaatcctctcctggtttagggaggggaaggaagaattcctttggctaccggaagaaaagggaggagaagtttacaagcagccagacacagtctccaacgccaccaaagcctccgtcgccaagcttcgagctggggctgtccagcttccctccattacctggagctgccggcaatttgaagacagaggacttgtttgaaaacaggctatctagcttgataataggaccatccaaagaaaggaccctcagtgcagacgcaagcgtgaacacccttcctgtagtggtctccagagagccctcggtgccggcttcttgtgctgtatcagcaacgtacgagcgatccccctccccagctcatttacccgatgatcccaaggtggcggagaaacagagggaaacccacagtgtggacagacttccttccgccctcactgcgaccgcgtgtaaatcggtgcaggtgaacggagccgccacggaattgcgaaagcccagctacgcagagatttgtcagagaacgagtaaagagcctccttcttccccattgcaaccccaaaaagaacaaaagccaaacactgttggttgtgggaaggaggaaaagaagctggcagagcccgcagagagataccgggagcccccagccctcaagtccacacctggagcccccagagaccagaggcggccggcggggggccggccctcgccctcggccatggggaagcgtctcagccgagagcagagcactccccccaagtctcctcagtgaaaaccgtacgtctgggaggggtcgcagagcgctgtgttaaccacaaacgagacactctcccactcagtgcgagggcgagccgctggttaggagcttgcagtgtctgaggcctgtgggatcctcaagttggttttcttctgtgagttggattctccccctcttgaaaaaaaatcgatttttcaggatttaattaatacaaaccttattttaggttggtgcttaactggaggtgatgcataagtctgatttttttttccaagatagaaaaagcatttatcctaacaaattggtattttttattaagcctccatgtggctctgaatgcaagctatatatagtgagtttttctaaattaagggaactctgctttttttttttttttttaagtaactggtctgtaagtgcatatctctagaacgtccccgcagatgaatgagggccagtggccttggcagaggcaggtgtggcctcatagaggcagtgctggccgcgccagggcatcagtgctgatgtgggagctgtgcttccacctaagccgttggtaggggactgtggcatttaagaatgtagagagcgcatcctttttgatctcctgggcggagtgaacctgcaggggccaccccagaaaccttggttctgatgcactgcaagcaagtaaccagcttctcactccagtttcaagtggctattatgtaatataaattcaaagcacattgtgaatagaacctacatgaaaacatacactttgttgcccactgacatgttaccagaagttgtaccatgatgttgttttgacccctgtgagctgatggccccggccctgctctgtgcacatttctgtccgtgttccccagcactctggttggagagagtccacatcttcagctccgtgtggacatctccctgtacctctgcatcagcacatggatttaagagttatgtaatcgtgagagaatggtgtttgtggtttttccccctctttggctggtggaggataaagttcctgctcttttacctccaagacgagggcctcattgattcacttccagaagtgctgcacttctgaagaacaaggatgcactaaagttagcaagtttataataaagttaaatataaattattttgttttaaaatgcctcaaatttttctttattctaagcagcaaacattaaaataagaatatttcctgctaaatgtaaccatacactttattccacaaaatgttatttaacaagactgagggttttttttaagaaaaaattatttccatccaatatttaaagacttgaattttatttaaacttgaaaatgactttgccttaacttttgtataagacagcttagagtccatggagcccggccctgggttggcgtgagtgggtcagagttactcagttactgcgtggatctcctgtcgctagttttactgagtaagcatactgtagtacaagagctagtagtagtttttgtaatataccttaaagatcttcaacagttgatcttttttcagaatgttggaaaatcctgtaaatgcaaatagtcaatactgtattaaatacgtgcacttggagtgtggcttcgcttgtacagttgtaaataatcagaacatatgaaaaaggtaccctacagagaaaattctgatacagattattgatatattataaatgttgctgttgagcgggatgtagataaactaaatgttgtggtttgaatattattttgatttgttgagattttcttttttctcttacatcggtgtgttgaactgattctgcctctttgctgcaaaagggaattggaaagtcttattaaaagcctccagatgttttcatactcttttaaaatgtatgtaaatgcatactaatcatatctaatgtgaaagagttttaaagtatatagagagcaaaaactggcaggatcgtaagtgaaggtgactagtaatctaatttaaatcacctgcagctaagcatgattgaccctgccagaggaaaacatgcctatttgaccatttcctttaaagcagttgccattattcaaatacagagaaatagccacagggctagtgtttttcaaatgcattttaaagaacatggggatttttttttgtagttgtcagttcactgaccaaaaaaaaaaaaaaaatcagaaataattgatctgtgaaacccaaactctcaatactcagaaagctgggaggcaacctcgaggcctgggcctacgagctgcatcttcgctacggaagggccagggcgccatcagccattcccaaaacacaaggcctgcccgtccgccagtgagtccttggtttttaataatgagaagtcctttcccccaaggtgtgagcattgcagcgcagtgtgtgtgtgtggttagagccagcttagtccttcactttgtcgaccgaagtgggagctcaacagctgcatgaggagggcagcgcgtgcattagccagtcgccactggagggctctgctgccctccggtcaatacactgtagttactgcctagccagcagcagtcttctgcatcaagaactgaaaccttgctcggaggtgatttttatagcatcctttttaattaaaggtgaaatacagattgctatataatgtctgaaaaaacctgatactacttcaagagtttctgctcagaagaaaatgagagttatcataataggaagctgtggcggtccatgccaactgtgctgtgtcacatacagcgatgagagtggctttcatacttttttttttttaagttaacaccctcctttacccccagcagtatctcaggttatagaatcagagatgcagcagtgacaaatggcattttaacttgtaaaatcgtgtgatgatgcttatcattttgaaatagaagaataaaaacctggtcccgtttcaccagacatgaatttcaagtggagtcgtcgttctctgagagtgagtgtcttgacattttcacccaggccctcctgtcatcacatcaccggctgtcactggcgggtggccgtaaacgtcctgcgttgctatattaggatctctgcagttcaggcttcaaaaccagttcagtgtatccgggcgacgggtagtggtggtgcatgcctgtctgtgtgccccgctggcgagctgtagttgcggcttgcgtgcctcgcggcccactacagggctgcagacaatcgaggcgagggcgctggccgccagcagctcacagcgcgggggtcatgtggtcgctcctcgagggtttcgtttttgttctgcttcattaagactggaatcaagcttacatgtaaactattggtaatttaagtttccttttgtgtcattcagtgtaaaactgtctaatttgaaaaaaaatgtaggttatgaaaataaagatttaggcactgttcaatttttcttttgattttttttaaattaaaatttcttcaataaaaaaaaac

SEQ ID NO: 46105 - DNA, 4725 bp, Homo sapiens
acgggacttagctgctgacaaacaacctgctccgtggagcgcctgaaacaccagtctttggggccagtgcctcagtttcaatccaggtaacctttaaatgaaacttgcctaaaatcttaggtcatacacagaagagactccaatcgacaagaagctggaaaagaatgatgttgtccttaaacaacctacagaatatcatctataacccggtaatcccgtatgttggcaccattcccgatcagctggatcctggaactttgattgtgatatgtgggcatgttcctagtgacgcagacagattccaggtggatctgcagaatggcagcagtgtgaaacctcgagccgatgtggcctttcatttcaatcctcgtttcaaaagggccggctgcattgtttgcaatactttgataaatgaaaaatggggacgggaagagatcacctatgacacgcctttcaaaagagaaaagtcttttgagatcgtgattatggtgctgaaggacaaattccaggtggctgtaaatggaaaacatactctgctctatggccacaggatcggcccagagaaaatagacactctgggcatttatggcaaagtgaatattcactcaattggttttagcttcagctcggacttacaaagtacccaagcatctagtctggaactgacagagataagtagagaaaatgttccaaagtctggcacgccccagcttagcctgccattcgctgcaaggttgaacacccccatgggccctggacgaactgtcgtcgttaaaggagaagtgaatgcaaatgccaaaagctttaatgttgacctactagcaggaaaatcaaaggatattgctctacacttgaacccacgcctgaatattaaagcatttgtaagaaattcttttcttcaggagtcctggggagaagaagagagaaatattacctctttcccatttagtcctgggatgtactttgagatgataatttactgtgatgttagagaattcaaggttgcagtaaatggcgtacacagcctggagtacaaacacagatttaaagagctcagcagtattgacacgctggaaattaatggagacatccacttactggaagtaaggagctggtagcctacctacacagctgctacaaaaaccaaaatacagaatggcttctgtgatactggccttgctgaaacgcatctcactgtcattctattgtttatattgttaaaatgagcttgtgcaccattagatcctgctgggtgttctcagtccttgccatgaagtatggtggtgtctagcactgaatggggaaactgggggcagcaacacttatagccagttaaagccactctgccctctctcctactttggctgactcttcaagaatgccattcaacaagtatttatggagtacctactataatacagtagctaacatgtattgagcacagattttttttggtaaaactgtgaggagctaggatatatacttggtgaaacaaaccagtatgttccctgttctcttgagcttcgactcttctgtgctctattgctgcgcactgctttttctacaggcattacatcaactcctaaggggtcctctgggattagttaagcagctattaaatcacccgaaggacactaatttacagaagacacaactccttccccagtgatcactgtcataaccagtgctctaccgtatcccatcactgaggactgatgttgactgacatcattttatcgtaataaacatgtggctctattagctgcaagctttaccaagtaattggcatgacatctgagcacagaaattaaggcaaaaaaccaaagcaaaacaaatacatggtgctgaaattaacttgatgccaagcccaaggcagctgatttctgtgtatttgaacttagggcaaatcagagtctacacagacgcctacagaaagtttcaggaagaggcaagatgcattcaatttgaaagatatttatgggcaacaaagtaaggtcaggattagacttcaggcattcataaggcaggcactatcagaaagtgtacgccaactaagggacccacaaagcaggcagaggtaatgcagaaatctgttttgttcccatgaaatcaccaatcaaggcctccgttcttctaaagattagtccatcatcattagcaactgagatcaaagcactcttccactttacgtgattaaaatcaaacctgtatcagcaagttaaatggttccatttctgtgatttttctattatttgaggggagttggcagaagttccatgtatatgggatctttacaggtcagatcttgttacaggaaatttcaaaggtttgggagtggggagggaaaaaagctcagtcagtgaggatcattttatcacattagactggggcagaactctgccaggatttaggaatattttcagaacagattttagatattatttctatccatatattgaaaagaataccattgtcaatcttatttttttaaaagtactcagtgtagaaattgctagcccttaattcttttccagcttttcatattaatgtatgcagagtctcaccaagctcaaagacactggttgggggtggagggtgccacagggaaagctgtagaaggcaagaagactcgagaatcccccagagttatttttctccataaagaccatcagagtgcttaactgagctgttggagactgtgaggcatttaggaaaaaaatagcccactcacatcattccttgtaagtcttaagttcattttcattttacgtggaggaaaaaaatttaaaaagctattagtatttattaatgaattttactgagacatttcttagaaatatgcacttctatactagcaagctctgtctctaaaatgcaagttggccttttgcttgccacatttctgcattaaacttctatattagcttcaaaggcttttaaactcaatgcgaacattctacgggatgttcttagatgcctttaaaaagggggcagatctaattttatttgaaccctcactttccaacttcaccatgacccagtactagagattagggcacttcaaagcattgaaaaaaatctactgatacttactttcttaggacaagtagttcttagttaaccaccaatggaactgggttcattctgaatcctggaggagcttcctcgtgccacccagtgtttctgggccctctgtgtgagcagccaggtatgagctgttttagaagcagcgtgttgccttcatctctcccgtttcccaaaagaacaaaggataaaggtgacagtcacactcctgggttaaaaaaagcattccagaaccacttctctttatgggcacaacaaagaaacgaaggctgaagttcgcctacccaaaatgaaaagtaggctttacagtcaaaagtacttctgttgattgctaaataacttcattttcttgaaatagagcaactttgagtgaaatctgcaacatggataccatgtatataagatactgctgtacagaagagttaaggcttacagtgcaaatgaggcgtcagctttgggtgctaaaattaacaagtctaatattattaccatcaatcaggaagagaataataaatgtttaaacaaacacagcagtctgtataaaaataccgtgtatcatttactctttctgcagctctatacgataggcaggagaggcttatgtggcagcacaagccaggtggggattttgtaacgaagtgataaaacatttgtaagtaatccaagtaggtgtattaaggcaccaaaagtaacatggcacccaacacccaaaaataaaaatatgaaatatgagtgtgaactctgagtagagtatgaaacaccacagaaagtcttagaaatagctctggagtggctctcccaggacagtttccagttgctgaatagtcttttggcactgatgttctacttcttcacattcatcttccatcaactctgctaagaaaggaatggattctggtagcaagacaatataattctcctttagtttttcagccagtgctaacacagtaatcaaagcagcaaatcgaaccttaggcgaggagtctctcgtctttagcagaatctggtagttcagtggtttccaaagagagtcatccgccatggccactgaaaactgtgcgatgcatggtatcaggtgctttgtcacccgttcctggaatttctcttctcccccaagcctgttttccagctgatccaccagaggcatcatcaaggctcctgctctctctttacttataaaatgctgggtatcaaaaaggaagattttgtataaacagttcaaaataaactgcaacagcaagcagcacttttcagggtcattttcagagtcaaaaaatgcttcatctgttttggagatgttcacctggtccaaggtgtcagcaaaaggcttccactaagtggcccggcaaacagagtaaaaagccctttcagcttttcagcaatgcaatctgccaagttgtaaaatgtcaacaacctgtcctttggggcatcttctgttttagcccaatcaaacagcttgaagaacaggggcctgaatgtgacctcggaaagtttgacaaccatggctactagacagtcaatgatacaattttccgtttttccaacttcctccagatcgttctcagagtgctgggctcggaagtccagggcctccaggaaaaaggcggttagctgagactgatgggaggtgagctcttcctt

SEQ ID NO: 46106 - DNA, 740 bp, Homo sapiens
gtctaggttaggagaatagggggtggaggggattaatctggtacaggtatattttagagcaactctgcatgtgtgccagaagtccatggtacccatttacaggtataatattggcactggtgctagtgagcatcaggtgagatacaattttgaacacaacaggaaaggggtagaagtacagaaggacttgtttagacattggtcctttttgaggataccacactcccttgcccttgcttccatcccccatccctaataggctgggctttgcaggaaatggcatgaaatcagctcttctgagtgtacagaagaacctttcgagcattatttctacacccttctcccccactctttcctctttggaggcttccaagttagtgatgaatcccaacagctaatgatgctgggtttccagtttatttccttctgttagtttaatgtgcaagtcaagtgaggttttgaatgctgtgcattgaatttgcttgctctcttctgtcttttagcaggtttggatgcatctgctcagactacttctcatgaactcaccattccaaacgatttgattggctgcataatcgggcgtcaaggcgccaaaatcaatgagatccgtcagatgtctggggcgcagatcaaaattgcgaacccagtggaaggatctacccttgggcctccccccagcccctcctccccttcctgcacccgtacccccgtggtctttgaataaagtctgagtgggcggg

SEQ ID NO: 46107 - DNA, 1591 bp, Homo sapiens
ggcccgctccaacatcagaatggtaacagctttcaggagcctaccagccggcagctccggagctcgcgcgtccatgtccgcgcacaatcggggcaccgagctcgaccttagctggatctccaaaatacaagtgaatcacccggcagttctgaggcgtgcggaacaaatccaggctcgcagaaccgtgaaaaaggagtggcaggctgcttggctcctgaaagctgttacctttatagatcttactacactttcaggtgatgatacatcttccaacattcaaaggctctgttataaagccaaatacccaatccgggaagatctcttaaaagctttaaatatgcatgataaaggcattactacagccgccgtttgtgtttatcccgcccgggtgtgtgatgctgtaaaagcactcaaggctgcaggctgtaatatccctgtggcatcagtggccgctggatttccagctggacagactcatttgaagacacgattagaagagatcagattggctgtggaagatggagctacagaaatcgacgtggtaattaacagaagcttggtgcctgacaggccagtgggaagccctgtatgatgagattcgtcagtttcgcaaggcctgtggggaggctcatcttaaaactatattagcgacaggagaacttggaactcttactaatgtctataaagccagtatgatagcaatgatggcaggatcagattttattaagacctctactggaaaagaaacagtaaatgccaccttcccggtagctatagtaatgctgcgggccattagagatttcttctggaaaactggaaacaagatagggtttaaaccagcaggaggcatccgcagtgcaaaggattcccttgcttggctctctcttgtaaaggaggagcttggagatgagtggctgaagccagaactctttcgaataggtgccagtactctgctctcggacattgagaggcagatttaccatcatgtgactggaagatatgcagcttatcatgatcttccaatgtcttaaatcagtcaccagttccagaaaagttctttacgacaatgtttaaaaattatttttctacgtaattgctaaaattatttaattaaaaaattgggcagtaggtaactggcattcctctctttaaaatttctaccgaacttaatggaatggaaaaagcaaactcatccacatgtggtactcatttcaggcacatctgaaatgatcttaattactagaagatctgcactattaactttgtgaagagtttctcctaaaaactttaagtaaaatgttaatggtagctttgataacatcaaattctaagggagaaaaaaacaatattaaaccgcccaagcagtgtgccctagcagaggaaaatgcaacatctcgcaagcgctgctgtaacgacttcaggagtcactgattcagcactaatttcctgctgtgaaaactcatctttcatttttgccgtggataggcgcttttattaattgttgtcctaatgaaatttctgacattgtcatatacaacgatgaatatcattaaaatttttaaaataaaaaaaaaaaaaaaaaaagctcctg

SEQ ID NO: 46108 - DNA, 645 bp, Homo sapiens
ggcacgaggagactcggcgggcgctgttgagggagtcgggccgcgactgtggtcgtttttataccttcccgcgcggacgccggcgctgccaacggaagggcgggtagggcgagacggagtttcgtcatgttggccaggcccatttgagatctttgaagatatcctcaacgtgaggctctgctgccatgaaggtgaagattaagtgctggaacggcgtggccacttggctctgggtggccaacgatgagaactgtggcatctgcaaggatggcatttaacggatgctgccctgactgcaaggtgcccggcgacgacttgcccgctggtgtggggccagtgctcccactgcttccacatgcattgcatcctcaagtggctgcacgcacagcaggtgcagcagcactgccccatgtgccgccaggaatggaagttcaaggagtgaggcccgacctggctctcgctggaggggcatcctgagactccttcctcatgctggcgccgatggctgctggggacagcgcccctgagctgcaacaaggtggaaacaagggctggagctgcgtttgttttgccatcactatgttgacacttttatccaataagtgaaaactcattaaactactcaaatcttgaaaaaaaaaaaaa

SEQ ID NO: 46109 - DNA, 373 bp, Homo sapiens; identical to SEQ ID NO: 24700

SEQ ID NO: 46110 - DNA, 340 bp, Homo sapiens
agaaggagccgtcggagtccagcacgggaggcgtggtcttgtagttgttctccggctgcccattgctctcccactccacggcgatgtcgctgggatagaagcctttgaccaggcaggtcaggctgacctggttcttggtcatctcctcccgggatgggggcagggtaacgtcttctcatgctccgtggacaagagcaggtggcagcaggggaacgtcttctcatgctccgtgatgcatgaggctctgcacaaccactacacgcagaagaggtcgacgcggccgcgaattccagatctatgaatcgtagatactgaaaaaccccgcaagttcacttcaact

SEQ ID NO: 46111 - DNA, 4297 bp, Homo sapiens
tcaacttgggcgttggaccccgcatcttattagcaaccagggagatttctccattttcctcttgtctacagtgcggctacaaatctgggatttttttattacttctttttttttcgaactacacttgggctccttttttttgtgctcgacttttccaccctttttccctccctcctgtgctgctgctttttgatctcttcgactaaaatttttttatccggagtgtatttaatcggttctgttctgtcctctccaccacccccacccccctccctccggtgtgtgtgccgctgccgctgttgccgccgccgctgctgctgctgctcgccccgtcgttacaccaacccgaggctctttgtttcccctcttggatctgttgagtttctttgttgaagaagccagcatgggtgcccagttctccaagaccgcagcgaagggagaagccgccgcggagaggcctggggaggcggctgtggcctcgtcgccttccaaagcgaacggacaggagaatggccacgtgaaggtaaacggcgacgcttcgcccgcggccgccgagtcgggcgccaaggaggagctgcaggccaacggcagcgccccggccgccgacaaggaggagcccgcggccgccgggagcggggcggcgtcgccctcctcggccgagaaaggtgagccggccgccgccgctgcccccgaggccggggccagcccggtagagaaggaggcccccgcggaaggcgaggctgccgagcccggctcggccacggccgcggagggagaggccgcgtcggccgcctcctcgacttcttcgcccaaggccgaggacggggccacgccctcgcccagcaacgagaccccgaaaaaaaaaaagaagcgcttttccttcaagaagtctttcaagctgagcggcttctccttcaagaagaacaagaaggaggctggagaaggcggtgaggctgaggcgcccgctgccgaaggcggcaaggacgaggccgccgggggcgcagctgcggccgccgccgaggcgggcgcggcctccggggagcaggcagcggcgccgggcgaggaggcggcagcgggcgaggagggggcggcgggtggcgacccgcaggaggccaagccccaggaggccgctgtcgcgccagagaagccgcccgccagcgacgagaccaaggccgccgaggagcccagcaaggtggaggagaaaaaggccgaggaggccggggccagcgccgccgcctgcgaggccccctccgccgccgggcccggcgcgcccccggagcaaggaggcagcccccgcggaggagcccgcggccgccgcagcctcgtcagcctgcgcagccccctcacaggaggcccagcccgagtgcagtccagaagcccccccagcggaggcggcagagtaaaagagcaagcttttgtgagataatcgaagaacttttctcccccgtttgtttgttggagtggtgccaggtactggttttggagaacttgtctacaaccagggattgattttaaagatgtcttttttttattttacttttttttaagcaccaaattttgttgttttttttttctcccctccccacagatcccatctcaaatcattctgttaaccaccattccaacaggtcgaggagagcttaaacaccttcttcctctgccttgtttctcttttattttttattttttcgcatcagtattaatgtttttgcatactttgcatctttattcaaaagtgtaaactttctttgtcaatctatggacatgcccatatatgaaggagatgggtgggtcaaaaagggatatcaaatgaagtgataggggtcacaatggggaaattgaagtggtgcataacattgccaaaatagtgtgccactagaaatggtgtaaaggctgtcttttttttttttttttaaagaaaagttattaccatgtattttgtgaggcaggtttacaacactacaagtcttgagttaagaaggaaagaggaaaaaagaaaaaacaccaatacccagatttaaaaaaaaaaaaacgatcatagtcttaggagttcatttaaaccataggaacttttcacttatctcatgttagctgtaccagtcagtgattaagtagaactacaagttgtataggctttattgtttattgctggtttatgaccttaataaagtgtaattatgtattaccagcagggtgtttttaactgtgactattgtataaaaacaaatcttgatatccagaagcacatgaagtttggcaactttccaccctgcccatttttgtaaaactgcagtcatcttggaccttttaaaacacaaattttaaactcaaccaagctgtggataagtggaatggttactgtttatactgtggtatgtttttgattacagcagataatgctttcttttccagtcgtctttgagaataaaggaaaaaaaaatcttcagatgcaatggttttgtgtagcatcttgtctatcatgttttgtaaatactggagaagctttgaccaatttgacttagagatggaatgtaactttgcttacaaaaattgctattaaactcctgcttaaggtgttctaattttctgtgagcacactaaaagcgaaaaataaatgtgaataaaatgtacaaatttgttgtgtttttttatgttctaataatactgagacttctaggtcttaggttaatttttaggaagatcttgcatgccatcaggagtaaattttattgtggttcttaatctgaagttttcaagctctgaaattcataatccgcagtgtcagattacgtagaggaagatcttacaacattccatgtcaaatctgttaccatttattggcatttagttttcatttaagaattgaacataattatttttattgtagctatatagcatgtcagattaaatcatttacaacaaaaggggtgtgaacctaagactatttaaatgtcttatgagaaaatttcataaagccattctcttgtcattcaggtccagaaacaaattttaaactgagtgagagtctatagaatccatactgcagatgggtcatgaaatgtgaccaaatgtgtttcaaaaattgatggtgtattacctgctattgtaattgcttagtgcttggctaatttccaaattattgcataatatgttctaccttaagaaaacaggtttatgtaacaaagtaatggtgttgaatggatgatgtcagttcatgggcctttagcatagttttaagcatcctttttttttttttttttttgaaagtgtgttagcatcttgttactcaaaggataagacagacaataatacttcactgaatattaataatctttactagtttacctcctctgctctttgccacccgataactggatatcttttccttcaaaggaccctaaactgattgaaatttaagatatgtatcaaaaacattatttcatttaatgcacatctgttttgctgtttttgagcagtgtgcagtttagggttcatgataaatcattgaaccacatgtgtaacaactgaatgccaaatcttaaactcattagaaaaataacaaattaggttttgacacgcattcttaattggaataatggatcaaaaatagtggttcatgaccttaccaaacacccttgctactaataaaatcaaataacacttagaagggtatgtatttttagttagggtttcttgatcttggaggatgtttgaaagttaaaaattgaatttggtaaccaaaggactgatttatgggtctttcctatcttaaccaacgttttcttagttacctagatggccaagtacagtgcctggtatgtagtaagactcagtaaaaaagtggatttttaaaaataactcccaaagtgaatagtcaaaaatcctgttagcaaactgttatatattgctaagtttgttcttttaacagctggaatttattaagatgcattattttgattttattcactgcctaaaacactttgggtggtattgatggagttggtggattttcctccaagtgattaaatgaaatttgacgtatcttttcatccaaagttttgtacatcatgttttctaacggaaaaaaatgttaatatggcttttttgtattactaaaaatagctttgagattaaggaaaaataaataactcttgtacagttcagtattgtctattaaatctgtattggcagtatgtataatggcatttgctgtggttacaaaatacttcctctgggttataataatcatttgatccaattcctattgcttgtaaaataaagttttaccagttgatat

SEQ ID NO: 46112 - DNA, 1570 bp, Homo sapiens
cctttccaagggagtggttgtgtgatcgccatcttagggagtgagtgtggccgggccttctcctgtggcgggtgtggggagcggagcccagagctcctgtggggccgctgctttggcggtgggcccagccgggagcagcctctttcgaaggccgccgtgacctcttcaagggcgtggagacgggaaggaaaaggccccggttggggttccagggcgccggtaacgttaaccggcgccttgcctgtcctctaaccgtcgctccctcctcccctagaaagatgttctcgtccgtggcgcacctggcgcgggcgaaccccttcaacacgccacatctgcagctggtgcacgatggtctcggggacctccgcagcagctccccagggcccacgggccagcccccgccgccctcgcaacctggcagccgccgcccgtggaagagtacagttgtgaatttggctccgcgaagtattatgcactgtgtggctttggttggggtcttaagttgtggtctgacacacactgctgtggttcccctggatttaagtgaaatgccgtatgcaggtggacccccaaaagtacaaagggcatatttaacgggattctcaagttacacttaaaagaggatggtgttcgtggtttggctaaaggatgggctccgactttccttggctactccatgcagggactctgcaagtttggcttttatgaagtctttaaaagtcttgtatagcaatatgcttggagaggagaatacttatctctggcgcacatcactatatttggctgcctctgccagtgctgaattctttgctgacattgccctggctcctatggaagctgctaaggttcgaattcaaacccagccaggttatgccaacactttgagggatgcagctcccaaaatgtataaggaagaaggcctaaaagcattctacaagggggttgctcctctctggatgagacagataccatacaccatgatgaagttcgcctgctttgaacgtactgttgaagcactgtacaagtttgtggttcctaagccccgcagtgaatgttcaaagccagagcagctggttgtaacatttgtagcaggttacatagctggagtcttttgtgcaattgtttctcaccctgctgattctgtggtatctgtgttgaataaagaaaaaggtagcagtgcttctctggtcctcaagagacttggatttaaaggtgtatggaagggactgtttgccccgtatcatcatgattggtaccctgactgcactacagtggtttatctatgactccgtgaaggtctacttcagacttcctcgccctcctccacccgagatgccagagtctctgaagaagaagcttgggttaactcagtagttagatcaaagcaaatgtggactgaatctgcttgttgatcagtgttgaagaaagtgcaaaaggaacttttatatatttgacagtgtaggaaattgtctattcctgatataattactgtagtactcttgcttaaggcaagagtttcagatttactgttgaaataaacccaactcttcatgaaaaaaaaaagtcgacg

SEQ ID NO: 46113 - DNA, 924 bp, Homo sapiens
ggtgcacgatgcacagttgaagtgaacttgcggggtttttcagtatctacgattcatagatctggaattcgcggccgcgtcgacggcagccatctttctcttgccgcgtgctggtgttggaggaccctccctgcttcagatttaccaacagcatgaatcaagaaaagttagccaaacttcaggctcaggtccggatagggggcaagggtacagctcgcagaaagaagaaggtggtacatagaacagccacagctgatgacaaaaagcttcagagttctctaaaaaaactggctgtgaataatatagctggtattgaagaggtgaacatgattaaagatgatgggacagttattcatttcaacaatcccaaagtccaagcttccctttctgctaatacctttgcaattactggtcatgcagaagccaaaccaatcacagaaatgcttcctggaatattaagtcagcttggtgctgacagtttaacaagccttaggaagttagctgaacagttcccacggcaagtcttggacagtaaagcaccaaaaccagaagacattgatgaggaagatgatgatgttccagatcttgtagaaaattttgatgaggcatcaaagaatgaagctaactaaaagtttggtttttggaagctggcatggactagatttaacaaatcagctatgtggttccaaagttttacagacatggagaacatcacctgttactagttcagtaatataaatattttgtatattaataatgctgtttgttcagcatttttcggtcatttgattttgcattttgcacttcctcccaggatatttttttggtcaaaatatgaagtattggtgcagtttgagggtgttttggtttttgattccctggtttttttgttttttgtttggggtatttttggtgtatgtatgt

SEQ ID NO: 46114 - DNA, 826 bp, Homo sapiens
aaggagtatagttacataaaagaaggcaaaacgatgtataaatgaaagaaattgagatggtgcacgatgcacagttgaagtgaacttgcggggtttttcagtatctacgattcatagatctggaattcgcggccgcgtcgaccagacaaggcctacagacttatttcttcttggacacacccacggtgcggccacggcggccaagtggtcttggtgtgctggcctcggacacgaaggccccagaagtgacgcagccctctatgggcccgaatcttcttcagtcgctccaggtcttcacggagcttgttgtccagaccattggctaggacctggctgtattttccatcctttacatccttctgtctgttcaagaaccaagtctgggatcttgtactggcgtggattctgcataatggtgatcacacggttccacctcatcctcagtgagttctcccgccctcttggtgaggtcaatgtctgctttcctcaacaccacatgagcatatcttcggcccacacccttaatggcagtgatggcaaaggctattttccgccgcccatcgatgttggtgttgagtactcgcaaaatatgctggaacttttcagggatcactagagacatggctgcagcacaagcggcggtcgacgcggccgcgaattccagatctatgaatcgtagatactgaaaaaccccgcaagttcacttcaactgtgcatcgtgcaccatctcaatttctttcatttatacatcgttttgccttcttttatgtaactatactcctctaagtttcaatcttggccatgtaacctctgatctatagaattt

SEQ ID NO: 46115 - DNA, 2983 bp, Homo sapiens
gctggccttcgggtgtacgtgctccgggatcttcagcacccgcggccgccatcgccgtcgcttggcttcttctggactcatctgcgccacttgtccgcttcacactccgccgccatcatggtgaagctcgcgaaggcaggtaaaaatcaaggtgaccccaagaaaatggctcctcctccaaaggaggtagaagaagatagtgaagatgaggaaatgtcagaagatgaagaagatgatagcagtggagaagaggtcgtcatacctcagaagaaaggcaagaaggctgctgcaacctcagcaaagaaggtggtcgtttccccaacaaaaaaggttgcagttgccacaccagccaagaaagcagctgtcactccaggcaaaaaggcagcagcaacaccttgccaagaagacagttacaccagccaaagcagttaccacacctggcaagaagggagccacaccagggcaaagcattggtagcaactcctggtaagaagggtgctgccatcccagccaagggggcaaagaatgggcaagaatgccaagaaggaagacagtgatgaagaggaggatgatgacagtgaggaggatgaggaggatgacgaggacgaggatgaggatgaagatgaaattgaaccagcagcgatgaaagcagcagctgctgcccctgcctcagaggatgaggacgatgaggatgacgaagatgatgaggatgacgatgacgatgaggaagatgactctgaagaagaagctatggagactacaccagccaaaggaaagaaagctgcaaaagttgttcctgtgaaagccaagaacgtggctgaggatgaagatgaagaagaggatgatgaggacgaggatgacgacgacgacgaagatgatgaagatgatgatgatgaagatgatgaggaggaggaagaagaggaggaggaagagcctgtcaaagaagcacctggaaaacgaaagaaggaaatggccaaacagaaagcagctcctgaagccaagaaacagaaagtggaaggcacagaaccgactacggctttcaatctctttgttggaaacctaaactttaacaaatctgctcctgaattaaaaactggtatcagcgatgtttttgctaaaaatgatcttgctgttgtggatgtcagaattggtatgactaggaaatttggttatgtggattttgaatctgctgaagacctggagaaagcgttggaactcactggtttgaaagtctttggcaatgaaattaaactagagaaaccaaaaggaaaagacagtaagaaagagcgagatgcgagaacacttttggctaaaaatctcccttacaaagtcactcaggatgaattgaaagaagtgtttgaagatgctgcggagatcagattagtcagcaaggatgggaaaagtaaagggattgcttatattgaatttaagacagaagctgatgcagagaaaacctttgaagaaaagcagggaacagagatcgatgggcgatctatttccctgtactatactggagagaaaggtcaaaatcaagactatagaggtggaaagaatagcacttggagtggtgaatcaaaaactctggttttaagcaacctctcctacagtgcaacagaagaaactcttcaggaagtatttgagaaagcaacttttatcaaagtaccccagaaccaaaatggcaaatctaaagggtatgcatttatagagtttgcttcattcgaagacgctaaagaagctttaaattcctgtaataaaagggaaattgagggcagagcaatcaggctggagttgcaaggacccaggggatcacctaatgccagaagccagccatccaaaactctgtttgtcaaaggcctgtctgaggataccactgaagagacattaaaggagtcatttgacggctccgttcgggcaaggatagttactgaccgggaaactgggtcctccaaagggtttggttttgtagacttcaacagtgaggaggatgccaaagctgccaaggaggccatggaagacggtgaaattgatggaaataaagttaccttggactgggccaaacctaagggtgaaggtggcttcgggggtcgtggtggaggcagaggcggctttggaggacgaggtggtggtagaggaggccgaggaggatttggtggcagaggccggggaggctttggagggcgaggaggcttccgaggaggcagaggaggaggaggtgaccacaagccacaaggaaagaagacgaagtttgaatagcttctgtccctctgctttcccttttccatttgaaagaaaggactctggggtttttactgttacctgatcaatgacagagccttctgaggacattccaagacagtatacagtcctgtggtctccttggaaatccgtctagttaacatttcaagggcaataccgtgttggttttgactggatattcatataaactttttaaagagttgagtgatagagctaacccttatctgtaagttttgaatttatattgtttcatcccatgtacaaaaccattttttcctacaaatagtttgggttttgttgttgtttcttttttttgttttgtttttggtttttttttttttgcgttcgtggggttgtaaaagaaaagaaagcagaatgttttatcatggtttttgcttcagcggctttaggacaaattaaaagtcaactctggtgccagacgtgttacttcctaaagagtgtttcccctggaatctcactggagagcatggcaaagccagctctgccacttgcttcacccatcccaatggaaatggcttagtgcgtgtttccagtatcccagccctaactaacttggttgaaatgctggtgaggggacctgctcctgcagccctggtgctgacttgaaggctgctgcagcttctcctacttttagcaggtctcgaggattatgtctgaagaccactctggaaagaggtcgaggaacagattagtcaggtttcctagg

SEQ ID NO: 46116 - DNA, 1084 bp, Homo sapiens
ccgacccgggcaagattggcagcggcgctgcgcgtgcgttgttgagtgttcgggacgccggcctgcaggcgccatggtcttcctcaccgcgcagctctggctgcggaatcgcgtcaccgaccgctactttcggatccaggaggtgctgaagcacgccaggcacttccggggaaggaaaaatcgctgctacaggttggcggtcagaaccgtgattcgagcctttgtgaaatgcaccaaagcccgatacctgaagaaaaagaacatgaggaccctctggattaatcgaattacagctgctagccaggaacatggactgaagtatccagcgctcattgggaatttagttaagtgccaggtggagctcaacaggaaagtcctagcggatctggccatctacgagccaaagactttcaaatctttggctgccttggccagtaggaggcgacacgaaggatttgctgctgccttgggggatgggaaggaacctgaaggcattttttccagagtggtgcagtaccactgaggactgttgctgtattgattaggaaaagagacagagtaatttgcagtttgtttgatttatacttttgtttatctacaacccaataacagacatgagggatggccctgtctctctgggacagagcctcacagatgatgtccatgttttgtgtgaatgaaactcaaacactcttcagtttttagagtcattttctggtatcgagcgaccacaccgaggagcacaccctgcttccaaggctgctgccttctgcacacagtgggggatccccacccaccctgggctcccctcaagggctgcgtgcacagtgcccgctttccagttacctgacccaccctgagtccctattccattttgctcggggctgacctcagacatgccctgtggctcagctctgccactactcagaacaccagcctcagcttccctatgtcccccagattcagcagcccagcagggattgggggaaatgctcccacatcaggtgggtggtggcctggtccctgcagactggactggctttcagccatctccaggaagcaacacctagcagacaaatgtccc

SEQ ID NO: 46117 - DNA, 373 bp, Homo sapiens; identical to SEQ ID NO: 24790
  misc_feature (1)...(373): n = a,t,c or g

SEQ ID NO: 46118 - DNA, 2172 bp, Homo sapiens
gctctggggtcttgtactactgcagaacgtcctgttgtcccaggcccccaggtttcccataatagagtaagtctaccatttcattttgtgttatatatctctattttgagaaggggcctcgtgtgccgttgcacaccaggtcttctggaagggcagcaaggtgggatcctcttccactgggatcaggaaagaaacagtcatggaggtgacctttttgctgggtccaaatagatgggtggcaggagcagcctgacaagtatgtgggaggagttagaacaagctgctttggaaatgaaagtttactagagatttcttggaatatagtgtgtgtgaggcattgaggcagccagcgcaggggcttctgctgagggggcaggcggagcttgaggaaaccgcagataagtttttttctctttgaaagatagagattaatacaactacttaaaaaatatagtcaataggttactaagatattgcttagcgttaagtttttaacgtaattttaatagcttaagattttaagagaaaatatgaagacttagaagagtagcatgaggaaggaaaagataaaaggtttctaaaacatgacggaggttgagatgaagcttcttcatggagtaaaaaatgtatttaaaagaaaattgagagaaaggactacagagccccgaattaataccaatagaagggcaatgcttttagattaaaatgaaggtgacttaaacagcttaaagtttagtttaaaagttgtaggtgattaaaataatttgaaggcgatcttttaaaaagagattaaaccgaaggtgattaaaagaccttgaaatccatgacgcagggagaattgcgtcatttaaagcctagttaacgcatttactaaacgcagacgaaaatggaaagattaattgggagtggtaggatgaaacaatttggagaagatagaagtttgaagtggaaaactggaagacagaagtacgggaaggcgaagaaaagaatagagaagatagggaaattagaagataaaaacatacttttagaagaaaaaagataaatttaaacctgaaaagtaggaagcagaagaaaaaagacaagctaggaaacaaaaagctaagggcaaaatgtacaaacttagaagaaaattggaagatagaaacaagatagaaaatgaaaatattgtcaagagtttcagatagaaaatgaaaaacaagctaagacaagtattggagaagtatagaagatagaaaaatataaagccaaaaattggataaaatagcactgaaaaaatgaggaaattattggtaaccaatttattttaaaagcccatcaatttaatttctggtggtgcagaagttagaaggtaaagcttgagaagatgagggtgtttacgtagaccagaaccaatttagaagaatacttgaagctagaaggggaagttggttaaaaatcacatcaaaaagctactaaaaggactggtgtaatttaaaaaaaactaaggcagaaggcttttggaagagttagaagaatttggaaggccttaaatatagtagcttagtttgaaaaatgtgaaggactttcgtaacggaagtaattcaagatcaagagtaattaccaacttaatgtttttgcattggactttgagttaagattattttttaaatcctgaggactagcattaattgacagctgacccaggtgctacacagaagtggattcagtgaatctaggaagacagcagcagacaggattccaggaaccagtgtttgatgaagctaggactgaggagcaagcgagcaagcagcagttcgtggtgaagataggaaaagagtccaggagccagtgcgatttggtgaaggaagctaggaagaaggaaggagcgctaacgatttggtggtgaagctaggaaaaaggattccaggaaggagcgagtgcaatttggtgatgaaggtagcaggcggcttggcttggcaaccacacggaggaggcgagcaggcgttgtgcgtagaggatcctagaccagcatgccagtgtgccaaggccacagggaaagcgagtggttggtaaaaatccgtgaggtcggcaatatgttgtttttctggaacttacttatggtaaccttttatttattttctaatataatgggggagtttcgtactgaggtgtaaagggatttatatgggg

SEQ ID NO: 46119 - DNA, 1996 bp, Homo sapiens
  misc_feature (1)...(1996): n = a,t,c or g
attagacattgccaccctcacctctggccaaaaattcttgatttaaaaagaaaagtctattttnttaacgacaggctctgttgtatgtgttactatcccaagcctggattattttatttatttaaaagtattttaatttccatattggctttattctaatcccatccatccctgtggagctgcagagcatcttcatgtgagtagacggatggacataaatagattcatgctcatttaggaagctgggagtttcgtgaagctgagggtgagttcctgtgattcttgttcgcttcaacaaaaagtgggagacccaagtttttatagcaaaagaccaaattagctgtagagtcttgaatgcagaaaaaaattaccctagctttcttagcacttagggttttgtgaggattcagtgtttagcacagtgcttggcacattagtaagccctagtaaatgttaaatattgttattagtgtttcgtaaaacttgagaaataggagctgagctcattcccttcctgttgattcaaaaataatacctacatgaaaacatgattccaagttgattgaatgttgtaggaattactggtttagagtagcccagttctcggcctaccctgctggttgggatcttactgtattcttgaatgcactggtttgaaaatatgccagacttcagcccccaaggaaacaaggctgcaagaatttatgaactccagctggaaaaggtaaaggtgacctttggctagccacatactggaccttaccccactgacgtctttcagaacattccaagggttttcctcaaggaacatttttgagctagaaattaaaatgggttctctggcagactgcaccccttgagtcaaagttaacagtattcctttgaatgcaataatagaggcttttctgcgttaagggagaaggaatgaccaattgaacttacacattccccagggcaggtccctttgccgggcccctacaggctgggggtggcccctcctgtcctcagggatcagactcccagactggttagttctgcatgtttccatcaaattaaaggttattccctggccgcctcctggagaaaaccaaccccaccctgccagctgggggcaatggggcagggattttggcctctcagaacagctcctagaggctgctcatgactgaatgttttcccaaatcacctaaatatcggtttgctttttgttttgggggagaggatttagcctcttacttccctgatggattcaaagttttatctatctccttatctcctgccctgtcttggcacaactctggatagattgcaggtgtggaatttgctggagtttggtgacttcgtcaaattcctttggattctgttccgccaaatcagcagtctcgtcctgtggatgcagtgactggaatttcccatctgcaaagcatctctgtagcccagattttgtggagccttaagacactccctcaatgccaccctgaccccacggctggagaaccctgtgcttatgtggtgggcagggccactgttgatggaggatggcggggacggggtggtgctcaaaggatctgtggtgctggaggtctacacgcctctcaggacagcgtgtcaggaacctcagagcagcttcacatctgccaaagctgagagggagcgaacttgggaagcattttgctcattgtcctacccaagtattaatagcataatagttgatgccaaaggagatggtgacgtcccttccactgtagttgctgtcacaaccttgacgtctttaagctaatggccgtttgcatctgtgtcttcaaacagatcctggttacagccattttgtgtgattcacttcgggggttaagtaatgcaggattctgcaaacaaggtgtcgccgtccaaatgtactgtcctggcatagagagcactgctttgttttccactgttgtagagaaaactagggagaactttatttttcaataaacttttcttgtgtgacaaaaaaaaa

SEQ ID NO: 46120 - DNA, 1570 bp, Homo sapiens; identical to SEQ ID NO: 14969

SEQ ID NO: 46121 - DNA, 1960 bp, Homo sapiens
  misc_feature (1)...(1960): n = a,t,c or g
tttatacaaaaggatttattaaaaaaccagtaagacactactacatcatgacactgtcacactgggcttttaacacaagacttgctctacaatactgggggaaagggcataaaacacaaattgattctgaagcatagcaattaagaaataaaacaatgaaagcaaatttcttttaatgagaactcagaattaaacttcagagggacccaacgtcatacttccattcagggacttgatacaaaaaatttagtttgaactgctattagcaggtggcaggagccaccttcaaatgaatcttcaaattggaaaatactgcttcaccacctggagacaaagaagaaaaaatagaagtcactctgggcaggctacaacacttaacaaaaatttacataaaactgagttatccctatgttccactatatgtaaatactgtataacattaaatgtgtgatatgttttataaattaaagctgaacagtagagtccatgagctgtaaatccacatgtgcaccactggtttaagatgtgatatgcttttacaagtattctttaaaatataaaaagctttaaagtatttacccaaagaactcataaaaaggtcaatttggtaaaaggacattttgacccaagagcatctaatatttaagcttattttattggataagcatatctcttgtccatcacaagttatagaaaagttatatacgactaaaagaaaaagttatctactgtaattataggaagttgtcacaacaggaattcagctcaagaacttcttgcaattactgcttacaacgtcntataaaatgggaaaagcaagcattaaaatagattaataaaagtattaaaattaagacntggaaaatccagagacaagctgtatccttagaagaataaatagttaaaattattcagtaagctgacgtatttaaccattactgggcctgtaaaaaatgcattaaaattacattacaaatagtttttaaaaagcaaagaaataagtgaaggcaaagcttgaagtatccattttattttataatgctgatacaggatgttggaagagaccataccaaacggcagcattcgagagcgtgagcatctcgttaccctgtccgcattgagcgggcctgtgagaatctgaagtcagcgcgacacagggcctgcaatgaagttcccgctgttggggataagttgcaaatggaataatttagtatggtttgtagctattttgatgaccacctcgcctggataccttcccataaccactctgctggtcaccacctcttccacgagctcttcctgcaaatcctcctctagatccccactgttgctgttgctgatattgttccttcgacatggctacttttatttcacatttactaagaccaacattgtggtatttcttttccattatcttcttcactggttcttcttccttaaaggtaataaagcagaacccacgcctcttattggtcttgttgtccatggggagctctatggattccacctcaccaaaaccaccaaagtactcccttattttctcttcaggtgtatctggagaaaggccaccaacaaaaatttttttaaccggctcttttgttttcatggctttggcccttttaggatcaatcaccttcccattcaatttatgttctttttgatccatgaccttatctacactctccgattctttaaatagcacaaagccaaaaccccttgatcgccctgtgataggatctaacttcagagtgcagtctacaacttcaccaaatttggaaaagtagtccttcagatctttctttgtagtgtcccagctaaggcctcctataaacattttccattcttcccgctgtgccgtcgctgcttcagctcgtgccgaattcttggcctcgagggccaaattccctatagtgagtcgtattaaattcgtaatcatgtngtagcnaaggattcagattta

SEQ ID NO: 46122 - DNA, 530 bp, Homo sapiens
ttgtaatcactggccagcatccgaaatggtgtaatttcagcccgaacacggattgatgttcttttggacacttttcgaagaaagcagcccttcactcacttccttgcctttttcctcaatgaagttgaggttcaggaaggattcctgagattccaggaggaagtactggcgaagtgctccatggatcatggggttgacagcagcattttccagaatcctaaaaagcttcatctaactattgggatgttggtgcttttgagtgaggaagagatccagcagacatgtgagatgctacagcagtgtaaagaggaattcattaagctacaagaattagttgatcgagtgctggaacgttttcaggcatctggactaatagtgaaagagtggaatagtgtgaaactgcatgctacagttatgaatacactattcaggaaagaccccaatgctgaaggcaggtacaatctctacacagcggaaggcaaatatatcttcaaggaaagagaatcatttgatggccgaatatttaagac

SEQ ID NO: 46123 - DNA, 1545 bp, Homo sapiens
tcgtaatatattttcatgaagaatttaggtccaaaaaaaagatgggcattaattctagtcatttaaaaaattctatagatcagaggttacatggccaagattgaaacttagaggagtatagttacataaaagaaggcaaaacgatgtataaatgaaagaaattgagatggtgcacgatgcacagttgaagtgaacttgcggggtttttcagtatctacgattcatagatctggaattcgcggccgcgtcgacctcagttaggacccagagggaaccatggaaaccccagcgcagcttctcttcctcctgctactctggctcccagataccaccggagaaattgtgttgacgcagtctccaggcaccctgtctttgtctccaggggaaagagccaccctctcctgcagggccagtcagagtgttagcagcagctacttagcctggtaccagcagaaacctggccaggctcccagactcctcatctatgatgcatccaacagggccactggcatcccatcaaggttcagtggcagtgggtctgagacagacttcactctcaccatcagcagcctagagcctgaagattttgcaacttattactgtcaacaatatgataatctccctgaggtcactttcggcggagggaccaaggtggagatcaaacgaactgtggctgcaccatctgtcttcatcttcccgccatctgatgagcagttgaaatctggaactgcctctgttgtgtgcctgctgaataacttctatcccagagaggccaaagtacagtggaaggtggataacgccctccaatcggggtaactcccaggagagtgtcacagagcagggacagcaagggacagcaccttacagcctcagcagcaccctgacgctgagcaaagcagactacgagaaacacaaagtctacgcctgcgaagtcacccattcagggcctgagctcgcccgtcacaaagagcttcaacaggggagagtgttagagggagaagtgcccccacctgctcctcagttccagcctgaccccctcccatcctttggcctctgaccctttttccacaggggacctacccctattgcggtcctccagctcatctttcacctcacccccctcctcctccttggctttaattatgctaatgttggaggagaatgaataaataaagtgaatctttgcacctgtggtttctctctttcctcatttaataattattatctgttgttttaccaactactcaatttctcttataagggactaaatatgtagtcatcctaaggcgcataaccatttataaaaatcatccttcattctattttaccctatcatcctctgcaagacagtcctccctcaaacccacaagccttctgtcctcacagtcccctgggccgtggtaggagagacttgcttccttgttttcccctcctcagcaagccctcatagtcctttttaagggtgacaggtcttacggtcatatatcctttgattcaattccctgggaatcaaccaaggcaaatttttcaaaagaagaaacctgc

SEQ ID NO: 46124 - DNA, 454 bp, Homo sapiens
  misc_feature (1)...(454): n = a,t,c or g
ggtgnntnnnnccttgaaaatcggtatgacatgattacgaatttaatacgactcactatagggaatttggccctcgaggccaagaattcggcacgaggaaaacctcccatctttatgtagctgacagggacttcgggcagaggagaacataactgaatcttgtcagtgacgtttgcctccagctgcctgacaaataagtcagcagcttatacccacagaagccagtgccagttgacgctgaaagaatcaggcaaaaaagtgagaatgaccttcaaactaaatatttaaaatagaacatactccccaatttagtctagacacaatttcatttccagcatttttataaactaccaaattagtgaaccaaaaatagaaattagatttgtgcaaacatggagaaatctactgaattggcttccagattttaaattttatgtcatagaaatattgactc

SEQ ID NO: 46125 - DNA, 455 bp, Homo sapiens
  misc_feature (1)...(455): n = a,t,c or g
tttganatttgtatgacctgattacgaatttaatacgactcactatagggaatttggccctcgaggccaagaattcggcacgagccgagatatgccagcaagtgaagatttacaagatttacaaaagaagctctgtcgaaagagatgtataaatcaattactctgtaaattgcccacagattcagagttggctcctaggagctgatgctgccattgtcgacatctgatatttgaaaaaacagggtctgcaatcacctgacagtgtaaagaaaacctcccatctttatgtagctgacagggacttcgggcagaggagaacataactgaatcttgtcagtgacgtttgcctccagctgcctgacaaataagtcagcagcttatcccacagaaancnatgccngtgnncnttgaagnattcaggcaaaaaggngaaatngaccttcaactattnttaa

SEQ ID NO: 46126 - DNA, 1581 bp, Homo sapiens
ggcagagtgcttcagtttgtctttttttttttaaactaaaagggaggctgctttcttgccttaaggagcccattgcctttcccgctgaagtctagatgttgacatgtaataaagcgggcagcaggatggtggtggatgcggccaactccaatgggcctttccagcccgtggtccttctccatattcgagatgttcctcctgctgatcaagagaagctttttatccagaagttacgtcagtgttgcgtcctctttgactttgtttctgatccactaagtgacctaaagtggaaggaagtaaaacgagctgctttaagtgaaatggtagaatatatcacccataatcggaatgtgatcacagagcctatttacccagaagtagtccatatgtttgcagttaacatgtttcgaacattaccaccttcctccaatcctacgggagcggaatttgacccggaggaagatgaaccaacgttagaagcagcctggcctcatctacagcttgtttatgaatttttcttaagatttttagagtctccagatttccaacctaatatagcgaagaaatatattgatcagaagtttgtattgcagcttttagagctctttgacagtgaagatcctcgggagagagattttcttaaaaccacccttcacagaatctatgggaaattcctaggcttgagagcttacatcagaaaacagataaataatatattttataggtttatttatgaaacagagcatcataatggcatagcagagttactggaaatattgggaagtataattaatggatttgccttaccactaaaagaagagcacaagattttcttattgaaggtgttactacctttgcacaaagtgaaatctctgagtgtctaccatccccagctggcatactgtgtagtgcagtttttagaaaaggacagcaccctcacggaaccagtggtgatggcacttctcaaatactggccaaagactcacagtccaaaagaagtaatgttcttaaacgaattagaagagattttagatgtcattgaaccatcagaatttgtgaagatcatggaacccctcttccggcagttggccaaatgtgtctccagcccacacttccaggtggcagagcgagctctctattactggaataatgaatacatcatgagtttaatcagtgacaacgcagcgaagattctgcccatcatgtttccttccttgtaccgcaactcaaagacccattggaacaagacaatacatggcttgatatacaacgccctgaagctcttcatggagatgaaccaaaagctatttgatgactgtacacaacagttcaaagcagagaaactaaaagagaagctaaaaatgaaagaacgggaagaagcatgggttaaaatagaaaatctagccaaagccaatccccaggtactaaaaaagagaataacatgaaaacgcccagggttacttgaatgtttttataagataggaatatatgtcttcaccatggggggggtctcgatttcactaacgttgtatatgaaaatgtctgcaataaaaagtacttttaaactttgtaaaaaaaaaa

SEQ ID NO: 46127 - DNA, 382 bp, Homo sapiens; identical to SEQ ID NO: 15051
  misc_feature (1)...(382): n = a,t,c or g

SEQ ID NO: 46128 - DNA, 1507 bp, Homo sapiens
gggagagtgtccgttgcttcccgtccgtgtcgcggccctgcggttggcggcctcctcgtggagcggagaaggccaggcggcccctgctcgagtcccgcgtcgccatggccgcggttcccgagttgctgcagcagcaggaggaggaccgcagcaagctgagatctgtatctgtggacctgaatgttgatccctcgcttcagattgacatacctgatgcgctcagtgagagagacaaagtcaaatttacagtgcacacaaagaccacactgcccacgtttcagagcccagagttttctgttacaaggcaacatgaagactttgtgtggctacatgacactcttattgaaacaacagactatgctgggcttattattccacctgctcctacgaagcccgactttgatggtcctcgagagaagatgcagaaactgggagaaggtgaagggtctatgaccaaagaagaatttgccaagatgaaacaagaactggaagctgagtatctcgctgtgtttaagaagactgtgtcctcccatgaagtctttcttcagcggctttcttctcaccctgttctcagtaaagatcgcaactttcatgttttcctggaatatgatcaggatctaagtgttaggcggaaaaatactaaagagatgtttggtggcttcttcaaaagtgtggtgaaaagtgctgatgaagtcctttttactggagttaaggaggtagatgacttctttgagcaagagaagaacttccttattaactattacaataggatcaaagattcttgtgtgaaagctgacaaaatgaccagatctcataaaaatgttgccgatgactatatccacaccgcagcctgcttacatagcctggctttagaagagcccacagtcatcaaaaagtacctattgaaggttgctgagctatttgaaaaactaaggaaagtagagggtcgagtttcatcagatgaagatttgaagctaacagagctcctccgatactacatgctcaacattgaagctgctaaggatctcttatacagacgcaccaaagccctcattgactatgagaactcaaacaaagctctggataaggcccggttaaagagcaaagacgtcaagttggctgaggcacaccagcaggagtgctgccagaaatttgaacaactttccgaatctgcaaaagaagaactgataaatttcaaacggaagagagtggcagcatttagaaagaatctaattgaaatgtctgaactggaaataaaacatgccaggaacaatgtctcccttttgcagagctgtattgacttgttcaagaataactgatatgccttcactcagaagaaaagaaatgaatgtgaaagaaagccaagcatcacttgcacttaaatcattaccacggaagatatattagcttcaactttagtttaaaattatgtgaataaatattttgatttctacaaatcttaacatttaaccatgttggtttaaaaatattattgcttgctacttgg

SEQ ID NO: 46129 - DNA, 516 bp, Homo sapiens
ttttttttttttttcagaaaaagtaccctctttatttgcattgcagaaatgccagggggctcggacatgggtgcccacagggtaggtttccacccaggtcgtcatcatctggcaccaggagcctggggggggtgcccggcggcagaggctgagaggtgcaggggtgaggtggacagtcccctgagccatccctgtggggcacacgggccacctgtccagcacttgcgctccacgctgaccatctcacaggcgctccaggagagggttgaggccccccaaacctggcctgcagccatcctgggtctggcctccgaggagctggcggcgggcgcaccgtgtgcccttggcctgccagggatggcgcttaccctcagcagcctgtcaccgtggggtccagggcctgagcgcttggagatgcgcacttgactacctcctcagagcatgtgggatggatacccacggtccgcatcacctgcgcataggaagcccccacttgatccccctcgtgccgaattc

SEQ ID NO: 46130 - DNA, 877 bp, Homo sapiens
  misc_feature (1)...(877): n = a,t,c or g
ccgaatttaatacgactcactatagggaatttggccctcgaggccaagaattcggcacgagggcgactcccgctcgtgccccggagtcaccgccgtccgcggatccggcgctagtagcggggcctgccgaggaagccgagtgcccgccgccgcgccagcctcagcccgcgcagaatgtgctcgctgccccgcggcttcgagccccaagctcccgaggacttggcgcagcggagtttgttggagctgcggtaattgttgaagcgccaggagagacttttgcgcaacgaaaaattcatttgcaaattgcccgacaaaggtaaaaagatctttgactcttttgccaaactgaaagctgccattgcagaatgtgaagaagttagaagaaaaagtgaactgtttaaccctgttagtttagactgtaagctaaggcaaaaagcaattgcagaagttgatgtgggtacagataaggcccagaattctgacccgatacttgatacttcatcactagttcctggatgttcctctgtagataacatcaagtcatctcaaacctcacaaaaccagggacttgaccgtcctactcttgaaggtgatgaagagacttcggaggttgagtacacagtgaataagggcccagcttccagcaatagagacagggtaccaccttcatctgaagctagtgagcatcacccgcggcatcgtgtttcaagtcaagcggaagatacttccagcagctttgacaacctgtttattgacaggttacagaggatcaccattgcggaccaaggtgaacaacagtcagaagaaanccangtactaagaacttgcaggctttccagtgggactganaanaacctnttacntganngctnnaaac

SEQ ID NO: 46131 - DNA, 844 bp, Homo sapiens
ctcgaccgctacccgcaccctaaatcccagaggttggccccctgaggtgtgagtgaaatgagcttttgctttattttccaagtttctctctcaccttcaggggcattcttcgggggtgcatcagagggagggcagagcctgaggatctaagcgaaggcttccccgggtgtaatttcctgggctgtttgtgaggagagatcgaattcgcctcctgctctcaggcctctctgctcctgtcttttgtttggatgccggcgctgctgcctgtggcctcccgccttttgttgctaccccgagtcttgctgaccatggcctctggaagccctccgacccagccctcgccggcctcggattccggctctggctacgttccgggctcggtctctgcagcctttgttacttgccccaacgagaaggtcgccaaggagatcgccaggggccgtggtggagaagcgcctagcagcctgcgtcaacctcatccctcaagattacatccatctatgagtggaaagggaagatcgaggaagacagtgaggtgctgatgatgattaaaacccaaagttccttggtcccagctttgacagattttgttcgttctgtgcacccttacgaagtggccgaggtaattgcattgcctgtggaacaggggaactttccgtacctgcagtgggtgcgccaggtcacagagtcagtttctgactctatcacagtcctgccatgatgagccctgttcctgctcatcatgaagatccccgcgatacttcaacgccttctgacttccaggtgatgactgggcccccaataaatcccgtctttgggtcaaaaaaaaaaaaaaaagtcgacg

SEQ ID NO: 46132 - DNA, 1330 bp, Homo sapiens
cgctccgggagctggtgcagtggctaggcttcgcaccttcgagatcttcgtgcacctgctggccctgttggtgttctctgtgctgctggcactgcgtgtggatggcctggtcccgggcctctcctggtggaacgtgttcgtgcctttcttcgccgctgacgggctcagcacctacttcaccaccatcgtgtccgtgcgcctcttccaggatggagagaagcggctggcggtgctccgccttttctgggtacttacggtcctgagtctcaagttcgtcttcgagatgctgttgtgccagaagctggcggagcagactccgggagctctggttcggcctcattacgtccccgctcttcattctcctgcagctgctcatgatccgcgcctgtcgggtcaactagcctcaccgaggtgccggagagggagcgctggacaactagaatgttgacctcgagccgaggccctacttgcagcgcaccggaggagaggctctctagtctgaaggcaccgccggcttgcgccgagctgagtgccgggtttccctattccaatcctgtttgaaatggtttcttcagcagggcttaaaagagcagccttcatcctgaaaatgtatttccttttgtttaatgctttgagtagataatcctgaattgaggtcatgaggaggccccccaggccagacagtcctgaacccctctgacacttggaaactgaatataagtaaaatggtccaggtggactctgagtatttcctgtggatcctgggaaagtactgttgcacaaaggctgcaaagctggactcaggaatgtcctccaaccagcagcgctgacctaagagctccctgtgccgtctatccagaccagacttcggtagatgcctttgttagatctatcacatgtaaacgagcttgtatctccttccctgtgccacgagagagattggctttttattccagtctaggcagagacagaagaatgttgaataagagcacgattagagtcctgtctggttatctgttgcccaagaaaagaactctgctgtccaggcactgcttggcttactatcccagcaaagactgcagttttgtggacttttgaccaccttgggctggcactcttagcacacctgagacagatttaagcctccctaagagactgaagagaggaacaggtgtcagatactcataggcactgagatctacaaatgggaagcttgtgagtggcccatctttgttggcctacgaactttggtttgatgccagtcaggtgccacatgagaacctttgctgagatgcaaataaagtaagagaatgttttcctgaaaaaaaaa

SEQ ID NO: 46133 - DNA, 5478 bp, Homo sapiens
ggaagatgccaaagtctatgtggctaaagtggactgcacggcccactccgacgtgtgctccgcccagggggtgcgaggataccccaccttaaagcttttcaagccaggccaagaagctgtgaagtaccagggtcctcgggacttccagacactggaaaactggatgctgcagacactgaacgaggagccagtgacaccagagccggaagtggaaccgcccagtgcccccgagctcaagcaagggctgtatgagctctcagcaagcaactttgagctgcacgttgcacaaggcgaccactttatcaagttcttcgctccgtggtgtggtcactgcaaagccctggctccaacctgggagcagctggctctgggccttgaacattccgaaactgtcaagattggcaaggttgattgtacacagcactatgaactctgctccggaaaccaggttcgtggctatcccactcttctctggttccgagatgggaaaaaggtggatcagtacaagggaaagcgggatttggagtcactgagggagtacgtggagtcgcagctgcagcgcacagagactggagcgacggagaccgtcacgccctcagaggccccggtgctggcagctgagcccgaggctgacaagggcactgtgttggcactcactgaaaataacttcgatgacaccattgcagaaggaataaccttcatcaagttttatgctccatggtgtggtcattgtaagactctggctcctacttgggaggaactctctaaaaaggaattccctggtctggcgggggtcaagatcgccgaagtagactgcactgctgaacggaatatctgcagcaagtattcggtacgaggctaccccacgttattgcttttccgaggagggaagaaagtcagtgagcacagtggaggcagagaccttgactcgttacaccgctttgtcctgagccaagcgaaagacgaactttaggaacacagttggaggtcacctctcctgcccagctccccgcaccctgcgtttaggagttcagtcccacagaggccactgggttcccagtggtggctgttcagaaagcagaacatactaagcgtgaggtatcttctttgtgtgtgtgttttccaagccaacacactctacagattctttattaagttaagtttctctaagtaaatgtgtaactcatggtcactgtgtaaacattttcagtggcgatatatcccctttgaccttctcttgatgaaatttacatggtttcctttgagactaaaatagcgttgagggaaatgaaattgctggactatttgtggctcctgagttgagtgattttggtgaaagaaagcacatccaaagcatagtttacctgcccacgagttctggaaaggtggccttgtggcagtattgacgttcctctgatcttaaggtcacagttgactcaatactgtgttggtccgtaggcatggagcagattgaaatgcaaaaacccacacctctggaagataccttcacggccgctgctgggagcttctgttgctgtgaatacttctctcagtgtgagaggttagccgtgatgaaagcagcgttacttctgaccgtgcctgagtaagagaatgctgatgccataactttatgtgtcgatacttgtcaaatcagttactgttcaggggatccttctgtttctcacggggtgaaacatgtctttagttcctcatgttaacacgaagccagagcccacatgaactgttggatgtcttccttagaaagggtaggcatggaaaattccacgaggctcattctcagtatctcattaactcattgaaagattccagttgtatttgtcacctggggtgacaagaccagacaggctttcccaggcctgggtatccagggaggctctgcagccctgctgaagggccctaactagagttctagagtttctgattctgtttctcagtagtccttttagaggcttgctatacttggtctgcttcaaggaggtcgaccttctaatgtatgaagaatgggatgcatttgatctcaagaccaaagacagatgtcagtgggctgctctggccctggtgtgcacggctgtggcagctgttgatgccagtgtcctctaactcatgctgtccttgtgattaaacacctctatctcccttgggaataagcacatacaggcttaagctctaagatagataggtgtttgtccttttaccatcgagctacttcccataataaccactttgcatccaacactcttcacccacctcccatacgcaaggggatgtggatacttggcccaaagtaactggtggtaggaatcttagaaacaagaccacttatactgtctgtctgaggcagaagataacagcagcatctcgaccagcctctgccttaaaggaaatctttattaatcacgtatggttcacagataattctttttttaaaaaaacccaacctcctagagaagcacaactgtcaagagtcttgtacacacaacttcagctttgcatcacgagtcttgtattccaagaaaatcaaagtggtacaatttgtttgtttacactatgatactttctaaataaactctttttttttaaaagtctggtctttccttcaatgttacagcaaaacagatataaaatagacaataaattatagtttatatttacaaaaaaagctgtaagtgcaaacagttgtagattataaatgtattatttaatcagtttagtatgaaattgccttcccagtacatgattgtgaaaaagacatttagaaaatattctaaaatttaatctgagcctcactttctacaagggaaatcatgatttccgttcataaacagcatgctcatccccctaacaccattcttataagctgggcaccctcattttattttcttcgttggttctaaccctgtggcgtggtatgctgtatagtaaaaaggcagagaaccactttactgaaaaggtactagagccggcagtccagaagttaatgtgctggtcaaagaaccgttctggtaaagaagaggtgagcattgccttcacgtgttacacggttacacaccccttgtagcctcacctcagtgtaatcagtctacttttggtactagcaaagagtacagcaaatggaggattgaggtgtagaaatggtatgttttggctgaaataagtgtattttcacaccaacaaaactccagcacgaacatacaacagcaatgactgagacaagggcgccccgtggagccctggctgtggcctgggctgtgccgccctgtggacttctgggaatgaactgaacagaggcgttccccccacttccccgatttctgttctctgtaaaatctacctttgatagacagtactgaaccagctgatcctttagccaagaatacatttaactcctttgagattattttccctatttactaacaaacaccccaaatagcttgatctacagctaaaactaattttggtgggtttttgggggaggagggtaggaagagcttcacggttatgtttctgcagttaccagaccttatgctacagacatccaaactcagcttgctacagaccaacaactactcacgtcatttaccaagtgagcaaattattaatgaggtcctttaaaatcttcctgggtaataaggcactggcatgagatagtttcaaagtctcatcgtcccacctccaactgtgcttccgtgtttttttaaggcagatgtaatctaggaatccaaggcagaatgtgtgtccccagcatctggtttcgagttagtggcatccacaagctcttacaaccatattcctgtattttttcagaatgacattggagttgtcatcaaagtaaagaaccgagatggcatttagcttagttggcgcacagcacggtttggggacatactcggggttcataaggtgaaccaaggtctgcacaatcgcgtggttggttgcattcatgtgtgcgttgagtgggaaggagcattctccatcacagtaattggcagcatagcccttgggtgcaatgatccagtcctgccatcccaggtcttggaaactcacatacagctcatgcttcctgcaggctgttttcaattcactgctgttgtaatctgaagcactggagacccgcgccacgtcctgggactgggtagagcgattacgactctgttgtcggcgccggctggaggctgacctggtggtgcgcacgtggacctcactcactttgaagaaagccaccatgaagggctgcttatcgtaagggccgtctctgcccaccaggcctgcggctcgggggtggacgtggactccatcccttgtcaccacgctcagctgaagccccatgttatgctgtggagtcacaacccacagattgctagtggccgtgatgtcaaattccagccagccttcttctgaggcccatactacacgggtgtccaacaaaaacaggtcagagtctctgtgctgatgctcctgtaagacttgataaatgctgataagaaaagtttggtttttaaaactccccataacacagtccttgtagatgcggaattctgcagccgtcaccacctcaccctcaggaatctgggataagttgaacttgaactctttgtggtgtcgctgacgaggggagaactccttgtcgtactccaccaggttcacaaagctcatgaccatgtccgcgtcgttgaggaaggcgctgtcctgcgcgctggtcagtggggacgcgccgccgctgccagatccgggggccagaaggctcttgcggttgagcgggtgcgcggcgcccgggggcggctgccgacgctgggacgagctggctgcttcgtggggccaggactgctgcctctccccctccgacgccccgtcctcgtcgttgtcggcggacagggcgttgtacagatccagcatgaagaggggcgcggacttcagtcgcccgggagggggctctccgcgaggcagctgctgctgctgctgctgctcctcctgctgccggagcgccgggggctgcggctgttggaggccgtgcaggggccggggccggtgcgggagccccagcaccgacaagatctccttctgcatctcccgcttctcctgcgtcttgagccgccggtacaggaagcccgaggaggactgcggcgacggcggcggctgctccgtgcggccggggctcccgccgtcccccagcagctgccccccggcggcggcggccgcggcagcgggcaagggcggccgcagcggcgggggcccgcagcagctgcacagcagcccccaccaccagcacagccactgcgccctccgccccagccccggcatccccgcccggccgggctgcccccgcggatcccgcgaggcgtggagcggcggagcgaggccggagcgcggccgctgtggcccttggcgtgagcagtccccgccacctctcggcgggctcgcttccccttcctggccctcagtccttatctctcatggtcg

SEQ ID NO: 46134 - DNA, 1106 bp, Homo sapiens
  misc_feature (1)...(1106): n = a,t,c or g
gtgggacagagtggggcaagaacacacacggcccgggcacagcctcttagccagctctccatgtcagtatgagcagtaaccagggaactgggcaattggcacatcagcctatcagaattcatgggaggttatttcttaagtgaaattctaaagagttaaaggatgaatttggacagtgatggaatggatgacatcatcagtcaagaatcctcattggatatggaggggaattataaaaaggcacagaaaaatgagagagagtctatcagacagaagttggcacttggaagcttctttgatgatggcccagggaatttataccagctgtagcaaaagtgggaagccaagcctttcctcccggcttgaatgaagagttggtccagctgcttctcatccgagatgagctgcacacagagcaggatgccatgctggtggacattgaagacttgaccagacatgctgaaagtcagcagaagcacatggcagagaaaatgcctgcaaagtgaaaagaagccattcaaccagagaacaagctagaatttattttgcttctgtggttgtaaaaatgctgttgctaaaggtggcgcagaaacaaatatcagtgttagtcattgataatgtctgaagcttaatgtccagtgattggcctttgcttcttaatttattttaattttttacttgtgccacttaatatcaggcattttaataaaatattgttacaaaaaatgtacagtactgacaccaccacaaatcatggttaataaaagagagtagttttaactttatttttatttgtttagagattttaagttggaacagtattttcccattgactacttttcattcttcactgtagttttaaagaagaactgtaaatgacggtgctatacaagtcaaaaaatacatgcctgcctcgtagtgaagttgtagctctccgtaatatgtatattttactcagttttcaacattttgtgaatgttgactacctgaagttcctttttagatgtgctattaacattctgttggattcagagggttccttgaaagttttatgtataaatatgtaaaataaaaattaaaactttgaantaaanaaaaaaaaaaaa

SEQ ID NO: 46135 - DNA, 1431 bp, Homo sapiens
tttttttttttagcaatcacataaggaagcatttatttgaggtttaacatgaaatgatacaaataaaatgtgtataaacaaatccacattgagtcataacacagatagcaaaggacaaagtaaaaacaaagaaaactaattggcagctatatacagttggacacaatggtgtcttgtacactagaaagtcttttacaaaataatcatcttagatcaacagaagaccaatcttcaatgtcgtcctgcaagatgggttactttaacatctcctcctaaaaacaaaaacaaaataccagttagatttgtgcaactctgacaagcttttaaaggtccactttcatgaattgttttaagtcctcactttattttcttcaataattaaagatcatatgcatatttattggtaaaatacagtttgggtagtcaataaactcaccctggagttcccaaatgacattaaattcaaatctattcaggaaagaatctgggaatacaaccttcccatattcagaggttcaactatgctagattaaggtctactagaagcatctctagtaacccaagtaaaatgctatcacaaacaccaatttctaataagtttattacaagaacataaattgatctgtgcatatgatctttaatttatatcccagatttaaaagttcttgttttggtttgtagatttcactattagctataaaaagaaaaagcaagcattaaatcttaaaagaatgaacacttaaaatgaggctccacaattgaaatacaacactaaacagaagaccaaaatgattaagctgtaaaaaggcatttatgtactttaactcctgtaaaaaaccatttaagttaagtttagacacttaatctccaaaaagattaaaaatgaagccaaagtctgaagttttccactttaatctttacgctggtacatgaagttggaagagaccataccacaggacagcgttttctggtgtatgccttgcgctctgcccgcaacgtgcgacccccagagatagacgtggtcagggtgacacacggcctgcaatgaagttcccgctggcgggtacaaacaaggtataatgtcagagttagaagacaacattcttgttttccttaagttgtacccatttcagtactttacctgttaatagttctaaaatgtttaattattcctctagaccacctggtacacaaaagcaaacagaaaaactcttaagtttttctgcaatactaaagaaagtgagataagactttaaagttaaagatctatagacactttaggcaaaacaggctcataaagcaattaaaaaatcaacaatttagtaaaaacaggctacatagtattttgtttttacgtttcatttgtctattgatctttaaattaaattagacatttctactgttttcctgtactcttatacacacctgttt

SEQ ID NO: 46136 - DNA, 726 bp, Homo sapiens
accgctatgacatgattacgaatttaatacgactcactatagggaatttggccctcgaggccaagaattcggcacgagtcggaggaggccaaggtgcaacttccttcggtcgtcccgaatccgggttcatccgacaccagccgcctccaccatgccgccgaagttcgaccccaacgagatcaaagtcgtatacctgaggtgcaccggaggtgaagtcggtgccacttctgccctggcccccaagatcggccccctgggtctgtctccaaaaaaaagttggtgatgacattgccaaggcaacgggtgactggaagggccctgaggattacagtgaaactgacccattcagaacagacaggcccagattgaggtggtgccttctgcctctgcccctgatcatcaaagccctcaaggaaccacccaagagacagaaagaaacagaaaaacattaaacacagtgggaatatcacttttgatgagattgtcaacattgctcgacagatgcggcaccgatccttagccagagaactctctggaaccattaaagagatcctggggactgcccagtcagtgggctgtaatgttgatggccgccatcctcatgacatcatcgatgacatcaacagtggtgctgtggaatgcccagccagttaagcacaaaggaaaacatttcaataaaggatcatttgacaactggtggaaaaaaaaaaaaaaaaaaaaagattt

SEQ ID NO: 46137 - DNA, 4002 bp, Homo sapiens
  misc_feature (1)...(4002): n = a,t,c or g
ttttcaagacagggtctcactctgctgcccagcctggagtgcagtggtgtgatcatagctcaccgcagcctcaatctcccgggccgaagcgatccttctgtctcagcctccccaacagctgggagtatagcggtgcaacaccacacccagctttgctatttatttaaatgtcattctccaacacatatggggaatgacatatgcttcccattattacatagcaaaacatactccatatccagaaaaaatatttatatgacatatggcctagtattctaaatcaaggcaggatcttccaacaagagcaggagagagaagaaaacatttacattctataacatgattataagaattgagatagatgaaatgaaaaacaacatctttgaacaattacagttgacagaacagctttcccttattctacttgctttaaataactcatatctgtaaacttgaacaccaactctggctgatttaacagtcttaatcccttgattttccatactgaacatcacccaatatatagtgaagatcaaaggcgacttccacacgaacaagcgcgtgtgcgaggagatcgccattatccccagcaaaaagctccgcaacaagatagcagggtgagtcgggccttcctcggcctccgggcgtccgcgatctgtttgtgtgctctgccgccctccgactcgggaagagacggtgccttggtggtttcgttagcctgagactccctggtgtcccggagaagggctagagctctgcgtgtgcaggatttctgttgtgaacttaggcctgtgtcatgactggccgcggtgaccctgggtcgaaggtagccaccgtcagacctcttgctttgaagctacgttgcttttagttgtcaannnnnnnnnnnnnnnnnnnnnnnnnnnnnnnnnnnnnnnnnnnnnnnnnnnnnnnnnnnnnnnnnnnnnnnnnnnnnnnnnnnnnnnnnnnnnnnnnnnnnnnnnnnnnnnnnnnnnnnnnnnnnnnnnnnnnnnnnnnnnnnnnnnnnnnnnnnnnnnnnnnnnnnnnnnnnnnnnnnnnnnnnnnnnnnnnnnnnnnnnnnnnnnnnnnnnnnnnnnnnnnnnnnnnnnnnnnnnnnnnnnnnnnnnnnnnnnnnnnnnnnnnnnnnnnnnnnnnnnnnnnnnnnnnnnnnnnnnnnnnnnnnnnnnnnnntggatgtcaacttctaatgcttacttcacagttgcagttactgttcgagagatttataggcatatggcctggaagaatagtgccaaagtcaacgtattaattgccaagttatgtgaatttgaaattggaagaaaatgaaggctgtgaagggtcgtgaaactgcggggcggggcggggcgagtggggggtggggcgcttgatcatcatgaaggagagtttgaatagagagtgagaaagccaaggggaaggaatgctcaggccagtggaggttctatgtgtaggaggtcccaggatagtgagtcctcttccttctcactgtggaaaagaactaaagcgggtatttatatatccacatgtgctcagtaccaggtgggagttgatttgtcttctcactgttctctttggctgtgtgtgctttgtagttatgtcacgcatctgatgaagcgaattcagagaggcccagtaagaggtatctccatcaagctgcaggaggaggagagagaaaggagagacaattatgttcctgaggtaaactttctggatatttgggcttctggctaatcctcaaatgataaagctatgggttcttggcttccaaagggacctcagctgaatctgagacctttaatccatacattccataaccagctgtgggtgcccataggccccctaccagtttcttagcctccattctgctcttctggaaccagttaagtctattccatatttcatgagagcccttaatgttgatttgatgactgctgtcgtggctcgattgtttgcccctaatatagtattctttggtgtaaacacagacttcaagtgttctgaatactgaatgagggcatgggaaggtaaggccagaagaacaggtcatcggggtctgtaatactgtaagagactgctcaccttgtgagaggaatgctatccttgtgcagctcctcttccccatatttaagaacctggggagaggaggaggagaggtgagtgataatctcattgattggtattttgaccctacctcgtttccttgtaggtctcagccttggatcaggagattattgaagtagatcctgacactaaggaaatgctgaagcttttggtaagtgtttgctggattcctaaagtggtattttcctggtcaaaaaccatcagtaggtcttattatnnnnnnnnnnnnnnnnnnnnnnnnnnnnnnttgggaatcccatctaaacttgtagccactaaactggactgctttcataaggggtgtagcggaagttgtgtgcattgagttagttcgccacaagatcatgattcccaaatctagtgcttccaggacacttttctctcttggctgcttctgttcttggtttatagctggcttacgttgccccctttgtgtcagccctggctgaatctgcctgcttttcttctgtgaaggcattcctttggtgtctccatgctaaccactcagaaatgagctttggtccatttccaggtacatacaaggcactacttaggtagttcacgagtatcttcattgcactttgatgttttttctatggcttatcttagtccttttgcatacttgggtgaaagcatgggcttcatgggcggttggtgattttgaacaacttcatttttcctatttttatggtcattaaatgtttaagacactcaaaaaggtagtagcaaaatgaactcacatgtactttcccagctacagccccgctgtgggtcttttcttcctgaaataaccactgcgctgaatgcagcatttttgttgaaactaaaatgggtttctgaggaccaaataggacatggagttccaggtataagttgggcccttggcttcttgccctgcctaccagcctgaacttgtttgagggcagggtctgctcttgcctccctcccttctgcttgatgccttgtgtacttgggcccttcacaaatgttgattagattagtaatagctcttacccagggctggtcctggaaagcaagtggcactgtgtattctcaaagggacagagttttgctttagaggacatttggcaatgtccagacacatttttcgttctcatagccaggggatacctgctaactnnnnnnnnnnnnnnnnnnnnnnnnnnnnnnnnnnnnnnnnnnnnnnnnnnnnnnntgcctataacaaagaatgtccagcccaggatgtctacgttgccaagattgagaaacggtgttttagagtgattgataggaaggggttgtgaaaacagatacaaatggcatggtacattgggtaaaagtcatagagttgtaaatggggataccacatggtcaggtgtgtgttgaaggaagatcactctggaaaacgtgggaggcattgagaaccctgttggctcttaaagggtccttcaggtcgcctctggacccccttgagagtgctgtggctctaggggcctgtgttttcttctggggtccactcacagatctcaccagtaactgctcactgaatccattttctcgttccaggacttcggcagtctgtccaaccttcaggtcactcagcctacagttgggatgaatttcaaaacgcctcggggacctgtttgaattttttctgtagtgctgtattattttcaataaatctgggacaacagccttgcctgtgtcatctttgcagttgtgtgtgggtagaggaaaggcaggagctctcgaggcaacagatcagctggcacttgtctgggattcaggtgctgctgcatctggtttatggggagtgggttcaccagagtttagtaaaggagcaagggcaagcctgaacgtgttgagagtggtctgcag

SEQ ID NO: 46138 - DNA, 2321 bp, Homo sapiens
cactggcccagcacttggatttacataagatgagttagaaaggtacttctgtagggtcctttttacctctgctcggcagagaaatcgatgctgtcatgttcctttattcacaatcttaggtctcaaatattctgtcaaaccctaacaaagaagccccgacatctcaggttggattccctggttctctctaaagagggcctgccccttgtgccccagaggtgctgctgggcacagcccaagagttgggaagggccgccccacagtacgcagtcctcaccacccagcccagggtgctcacgctcaccactcctgtggctgaggaaggatagctggctcatcctcggaaaacagacccacatctctattcttgccctgaaatacgcgcttttcacttgcgtgctcagagctgccgtctgaaggtccacacagcattgacgggacacagaaatgtgactgttaccggataacactgattagtcagttttcatttataaaaaagcattgacagttttattactcttgtttctttttaaatggaaagttactattataaggttaatttgcagtcctcttctaaatagaaaaccatatccttggctactaacatctggagactgtgagctccttcccattccccttcctggtactgtggagtcagattggcatgaaaccactaacttcattctagaatcattgtagccataagttgtgtgctttttattaatcatgccaaacataatgtaactgggcagagaatggtcctaaccaaggtacctatgaaaaggcgctagctatcatgtgtagtagatgcatcattttggctcttcttacatttgtaaaaatgtacagattaggtcatcttaattcatattagtgacacggaacagcacctccactatttgtatgttcaaataagctttcagactaatagcttttttggtgtctaaaatgtaagcaaaaaattcctgctgaaacattccagtcctttcatttagtataaaagaaatactgaacaagccagtgggatggaattgaaagaactaatcatggaggactctgtcctggacacagggtcctcaaagctagcagagatacgcagacattgtggcatctgggtagaagaatactgtattgtgtgtgcagtgcacagtgtgtggtgtgtgcacactcattccttctgctcttgggcacaggcagtgggtgtagaggtaaccagtagctttgagaagctacatgtagctcaccagtggttttctctaaggaatcacaaaggtaaactacccaaccacatgccacgtaatatttcagccatttcagagggaaactgttttctctttatttgcttatatgttaatatggtttttaaattggtaacttttatatagtatggtaacagtatgttaatacacacatacatatgcacacatgctttgggtccttccataatacttttatatttgtaaatcaatgttttgggagcaatcccaagtttaagggaaatatttttgtaaatgtaatggttttgaaaatctgagcaatccttttgcttatacatttttaaagcatttgtgctttaaaattgttatgctggtgtttgaaacatgatactcctgtggtgcagatgagaagctataacagtgaatatgtggtttctcttacgtcatccaccttgacatgatgggtcagaaacaaatggaaatccagagcaagtcctccagggttgcaccaggtttacctaaagcttgttgccttttcttgtgctgtttatgcgtgtagagcactcaagaaagttctgaaactgctttgtatctgctttgtactgttggtgccttcttggtattgtaccccaaaattctgcatagattatttagtataatggtaagttaaaaaatgttaaaggaagattttattaagaatctgaatgtttattcattatattgttacaatttaacattaacatttatttgtggtatttgtgatttggttaatctgtataaaaattgtaagtagaaaggtttatatttcatcttaattcttttgatgttgtaaacgtactttttaaaagatggattatttgaatgtttatggcacctgacttgtaaaaaaaaaaaactacaaaaaaatccttagaatcattaaattgtgtccctgtattaccaaaataacacagcaccgtgcatgtatagtttaattgcagtttcatctgtgaaaacgtgaaattgtctagtccttcgttatgttccccagatgtcttccagatttgctctgcatgtggtaacttgtgttagggctgtgagctgttcctcgagttgaatggggat

SEQ ID NO: 46139 - DNA, 706 bp, Homo sapiens
gggagacaaccgcctctagttgtaccccagcctcgttggagagcagcaggtgctgtgcgccttgtagaatgccgcgaactgggttctttggaagcagccccctgtggcggccttccgggtctcgcagcctgaagcctggattccagcagtgaatgctagacagaaaccaagccattaatgagatgttattactgttttgggcctccatgccccagctctggatgaaggcaaaaactgtactgtgtttcgcattaagcacacacatctggccctgacttctggagatggatccttccatcttgtggggccaggaccatggccgaagccccttggagagagaggctgcctcagccagtggcacaggagactccaaggagctactgacattcctaagagtggaggaggaggaggagccttgctgggccagggaaacaaagtttacattgtcctgtagctttaaaaccacagctgggcagggtgagaagctagatgcccctgcagtttggccctggagccagggcagaggaatgtagggcctgcatggagaagggttctgccctgcctgaggaggaggacacagcacaagggcacatgtgcccatggctgggaacatgacccagcctgaaagatacaggggatcatgttaaaaatagcagtattatttttcgtctcaatggtattgtaactaagttatttactcctcctg

SEQ ID NO: 46140 - DNA, 3839 bp, Homo sapiens
  misc_feature (1)...(3839): n = a,t,c or g
tctcggcccggcatcattgtgggaagagctgaagcaggcgctcttggctcggcgcggcccgctgcaatccgtggaggaacgcgccgccgagccaccatcagtgcctgggcacttacaggaaggcttcggctgcgtggtcaccaaccgattcgaccagttatttgaccgacgaatcggaccccttcgaggtgctgaaggcagcagagaacaagaaaaaagaagcccggcgggggcggcgttgggggccctggggccaagagcgcagctcagggccgcggcccagaccaactccaacgcggcaggcaaacagctgcgcaaggagtcccagaaagaccgcaagaacccgctgccccccagcgttggcgtggttgacaagaaagaggagacgcagccgcccgtggcgtgtaagaaagaaggaataagacgagttggaagaagacctgatcaacaacttcaccctgaagttgttgatcagggtgaagggaaaataattgatagaagaccagaaaggcgaccacctcgtgaacgaagattcgaaaagccacttgaagaaaagggtgaaggaggcgaattttcagttgatagaccgattattgaccgacctattcgaggtcgtggtggtcttggaagaggtcgagggggccgtggacgtggaatgggccgaggagatggatttgattctcgtggcaaacgtgaatttgataggcatagtggaagtgatagatcttctttttcacattacagtggcctgaagcacgaggacaaacgtggaggtagcggatctcacaactggggaactgtcaaagacgaattaactgacttggatcaatcaaatgtgactgaggaaacacctgaaggtgaagaacatcatccagtggcagacactgaaaataaggagaatgaagttgaagaggtaaaagaggagggtccaaaagagatgactttggatgagtggaaggctattcaaaataaggaccgggcaaaagtagaatttaatatccgaaaaccaaatgaaggtgctgatgggcagtggaagaagggatttgttcttcataaatcaaagagtgaagaggctcatgctgaagattcggttatggaccatcatttccggaagccagcaaatgatataacgtctcagctggagatcaattttggagaccttggccgcccaggacgtggcggcaggggaggacgaggtggacgtgggcgtggtgggcgcccaaaccgtggcagcaggaccgacaagtcaagtgcttctgctcctgatgtggatgacccagaggcattcccagctctggcttaactggatgccataagacaaccctggttcctttgtgaacccttctgttcaaagcttttgcatgcttaaggattccaaacgactaagaaattaaaaaaaaaaagactgtcattcataccattcacacctaaagactgaattttatctgttttaaaaatgaacttctcccgctacacagaagtaacaaatatggtagtcagttttgtatttagaaatgtattggtagcagggatgttttcataattttcagagattatgcattcttcatgaatacttttgtattgctgcttgcaaatatgcatttccaaacttgaaatataggtgtgaacagtgtgtaccagtttaaagctttcacttcatttgtgttttttaattaaggatttagaagttcccccaattacaaactggttttaaatattggacatactggttttaatacctgctttgcatattcacacatggtcaactgggacatgttaaactttgatttgtcaaattttatgctgtgtggaatactaactatatgtattttaacttagttttaatattttcatttttggggaaaaatcttttttcacttctcatgatagctgttatatatatatgctaaatctttatatacagaaatatcagtacttgaacaaattcaaagcacatttggtttattaacccttgctccttgcatggctcattaggttcaaattataactgatttacattttcagctatatttactttttaaatgcttgagtttcccattttaaaatctaaactagacatcttaattggtgaaagttgtttaaactacttattgttggtaggcacatcgtgtcaagtgaagtagttttataggtatgggttttttctcccccttcaccagggtgggtggaataagttgatttggccaatgtgtaatatttaaactgttctgtaaaataagtgtctggccatttggtatgatttctgtgtgtgaaaggtcccaaaatcaaaatggtacatccataatcagccaccatttaacccttccttgttctaaaacaaaaaccaaagggcgctggttggtagggtgaggtgggggagtattttaatttttggaatttgggaagcagacagctttactttgtaaggttggaacagcagcactatacatgaaatataaaccaaaaacctttactgtttctaaatttcctagattgctattatttggttgtaagttgagtattccacagaaagtggtaattatctcttctctcttcctccattagaaaattaggtaaataatggattcctataatgggagcatcaccacttattaaaacacacatagaatgatgaattaaaaaagttttctaggattgtcttttattctgccacatttattgataaacagtgaaggaatttttaaaaaatttttaagaattgtttgtcacgtcatttttagaaatgttctacctgtatatggtaatgtccagttttaaaaatattggacatcttcaatcttaaacatttctatttagctgattggttctcacatatacttctaaaagaaacttttatgttataagagttactttttggataagatttattaatctcagttacctactattctgacattttaggaaggaggtaattgtttttaatgatggataaacttgtgctggtgttttggatcttatgatgctgagcatgttctgcactggtgctaatgtctaatataattttatatttacacacatacgtgctacccagagattaatttagtccatatgaactattgacccattgttcattgagacagcaacatacgcactcctaaatcagtgtgtttagacttttcaagtatctaactcatttccaaacatgtaccatgttttataaacctcttgatttccagcaacatactatagaaaacacctgctactcaaaacacaacttctcagtgtcatccattgctgtcgtgagagacaacatagcaatatctggtatgttgcaagctttcaagatagcctgaacttaaaaagttggtgcattagttgtatctgatggatataaatttgcctcctagttcactttgtgtcaagagctaaaactgtgaacctaactttctcttattggtgggtaataactgaaaataaagatttattttcatgctcacttcttaaaagtcataaaaacaatcaaataggatcatgtttattgtcatgtgtttcctggtttctgacctgtgtgcacacccctgtgtgtttataatttttaaattgaattttatatggggtttttatttgctaaaaaccaggctgttgaatcacatttgggaagggtacttatcttaatgactaatgacttaattgggaaagttgaattcttgtaaaatacaaaatccaaggacttcttgggatttaatctaattgtcacttcttagcagatcacttttttggataatggaaagttaagcataccgaatgctacttttggttgacaaacgggcctaatagtccggggggaaatccctaacnggtaaggntcccaagtatgg

SEQ ID NO: 46141 - DNA, 2929 bp, Homo sapiens
tttttttttttttttaacggtaaaactgaaaatatttattagtatgaatcagtgtgtgttaaaccaaaaataacagatacaattaggcattgttgatggaaatgctttactacagaatagaatacatggcggaaaggtcctagctgactgcagcggtgtcttgtatgtgcaagaactgggtccagcccagatggaagctctttacaaaaacacgagaaaaaggagcagtttgcacaacagggcagcaccactggactacagggtctggtttcaacaatgatgttaaaacagtaagctagatacccagtcggtctgaatacagttcagagctctttaatttataagctagctcaccattcaacttgccatgagcattgcagaacagtgagaactggagcccacacaaaaaagctcagtttcagccaccgcaagccaaagtccttgactgtagaggaaatatttcagtcatccaaacctttctcagaaaatgaactcagtttccattggggcacagcccttattgttagctaaaagttagtttcgggccttcaaccttttagtctgcaaggtaacgtcatattcaactgcctaatgtgccgtttttaaccataaaatggcaagtcaattatgtggcaatgtaaaatgcttgcacaactccactgtcattctcagagatttccattgggaagccatgcctactttatattaacacatggctaggggccaaactcagccagtgaaatggattacatatcggagtaacacatatacaatcatatttacacagatacacactcatgccacacacgaaagaaaaaaaaaagggagaaggaacaaattttggaaaacgatgccaaggatgctacactacatgaaactacatgactttttttagcaacagtaatttccaggcctttacataatattacatggttatggttcaattattagacagccaggaagtaatcccgagccaaaacaaaggaaggttgtaaagcctcattgtagacaaggcctgagcatccacagagaagatacaatgtttatgtgaatcctggtgtgccccaagtgtgatctactctcttcactgactactcctgagtgcctgatgaagaatatatatattatcctctgactggcttgaatagctaagacaatacagaaaggtaacagagtggtttcacaccctcatgtgcttctgaaataaaaccatgggctcattagtgggtagctcactatctgtggcaaagactagacattttatgcaaaacacaaccactgcaaacccagcccaaagatgcaaaactctcagctaggatacttacccctcagctaaaaaacctgaacagctatctagagataaacccaggttctcagggaaaactggatgaggaaaggttacaaaataagcctgcaagtcagctggaaagaggtcacttcaattttcaactcattttttttttttttttttttacctttggcaaggggtatgatcatttcttggcctgcaagcacaatcatgccaaccattaatgtggacaatgtggaaaaaaccctaaaaatccctgcaaagcccctgtcaagacatccaaatgccgcttgctaacagtttttgaggtacctatttgggagagccaagtggaactcttgaagcaaaataagtgtttcccagccttcacatcctaacactgtcaatgaactctcttaagttgagtgaagtggaagcgtgctgagttactgaagtgccaggtctttaatccaatcagctcacaacctctttcctgacttttgcgatatagattgtcaataaaggttagccgtcccttggaatgctcatggcaaagaaggtaccagctggccctggctagcacacagcatgattaaccatttctgagcaccaatcctaatgtcctttaagaatcacccccctaatataagccctggcaggaaatcagctgcttcttgatcccaactttttatgaaagttagaatggtaatagaatttgaattttcagtaggaatcagttctcttcctttccacactttttcttccttgacttcctttggatacaaacatctttaattgagcagacagggaatctgaaaaggaaggttttcatcggagcccattctcagttccttggcattctagggtcagacctctggttagccctaaagcccttctcctcaagctagaaacataaaaatactttttctgattttgtagttttttggggtctagaattttaaagtgctgacacttcctctggctggctttcctgtaacctattattaattgttattattagaagtttgcccaatgatttagattcaaacattaaatttaattctagttaattctcttcccctagatatgacaccaagagatattctcttagtaaaataatactatgtgcgttaaacttctctaagagaggacgaatgtattcctgaggaggagatgcatgtcaggtggtctcttgaataatgtgtatgtcctgcatctctcaccacttacatagtgattacttaaatcactctttcaaactaggccacccaatcccaaaattatatgcagtaatttagtttgatttggtttgtttgggtatatatgaccataacttagaaaaattgttcaccaattaaaagtggtgtagacaacagtttctaatacacttttcctggcttctgtaataactcaagtctcagtctgagtgacggtccattgacacttctctgatttcctccaaaaagtaataaataaaggcttacttccaaagctagctaaaaaactaacctcctgaactaaatttgcctttcagtgaaggttggttaggtaacaaaggcaatgacactgaagtagttactggaatttggataggtagcacaggaaatccaggtggaatgccactttagaatcccatacaca

SEQ ID NO: 46142 - DNA, 8883 bp, Homo sapiens
  misc_feature (1)...(8883): n = a,t,c or g
gaattcatgccccttttgaaatagacttatgtcattgtcagaaaacataagcatttatggtatatcattaatgagtcacgattttagtggttgccttgtgagtaggtcaaatttactaagcttagatttgttttctcacatattctttcggagcttgtgtagtttccacattaatttaccagaaacaagatacacactctctttgaggagtgccctaacttcccatcattttgtccaattaaatgaattgaagaaatttaatgtttctaaactagaccaacaaagaataatagttgtatgacaagtaaataagctttgctgggaagatgttgcttaaatgataaaatggttcagccaacaagtgaaccaaaaattaaatattaactaaggaaaggtaaccatttctgaagtcattcctagcagaggactcagatatatataggattgaagatctctcagttaagtctacatgaaaaggatggtttcttggagcttccacaaacttaaaaccatgaaacatctattattgctactattgtgtgtttttctagttaagtcccaaggtgtcaacgacaatgaggaggtgaattttttaaagcattattatattattagtagtattattaatataagatgtaacataatcatattatgtgcttattttaatgaaattagcattgcttatagttatgaaatggaattgttaacctctgacttattgtatttaaagaatgtttcatagtatttcttatataaaaacaaagtaatttcttgttttctagtttatcacctttgttttcttaagatgaggatggcttagctaatgtaagatgtgtttttctcacttgctattctgagtactgtgattttcatttacttctagcaatacaggattacaattaagaggacaagatctgaaaatctcacaaactataaaataataaaagagcagaattttaagataaaagaaactggtggtaggtagattgttctttggtgaaggaaggtaatatatattgttactgagattactatttataaaaattataactaagcctaaaagcaaaatacatcaagtgtaatgatagaaaatgaaatattgcttttttcagatgaaaagttcaaattagagttagtgtgtattgttattattaatagttatgaaacacggttcagtctaatttatttatttgtagaacagtttgtcctcaactattatttttgctgacttattgctgttaatttgcagttactaaaaatacagaaatgcatttaggacaatggatatttaagaaatttaaattttatcatcaaacgtatcatggccaaatttcttacatatagcatagtatcattaaactagaaataagaatacacaataatatttaaatgaagtgattcatttcggatcattattgagtttcaagggaacttgagtgttgtacttatcagactctacatgtaagaacatatagttaatctggttgtgtgtgtaaaaacatatggttaatctggttaagtctggttaatcatattaggtaagaaaaatgtaaagaatgtgtaagacgaaatttttgtaaagtactctgcaaagcactttcacatttctgcttatcaactaaacctcacagagatagtttaatagtttaggctttaaaatggattttgattattcaacaagtggccttcataatttctttaagtgtttttctttaagtatatactttctttaaatattttttaaaatttccttttctctagtaaagccagaccatccatgctacctctctagtggcactctgaaataaaaagaaaatagttttctctgttataattgtatttgtaataagcagatgaatcacatttcttaaaatttgttttagagagggtaagctctgactaggaccatgacttcaatgtgaaatatgtatatatcctccgaatctttacatattaagaatgtatatagtcaactggttaaacaggaaaatctggaacagcctggctgggttttaatcttagcaccatcctactaaatgttaaataatattataatctaatgaataaatgacaatgcaattccaaatagagttcatctgatgacttctagactcacaaaattgcaagagagctcagttgttgctcagttgttccaaatcatgtcgtttgttaatttgtaattaagctccaaaggatgtatagctactgacaaaaaaaaaaatgagaatgtagttaatccaaatcaaaactttcctattgcaatgcgtattttctgcttcattatcctttaatataatattttaagttagcaagtaattttaattacaatgcacaagccttgagaattattttaaatataagaaaatcataatgtttgataaagaaatcatgtaagaaatttcaagataatggtttaacaaataattttgttgatagaagataagactaaaagtgaaattcgaagtggagaggacacttaaactgtagtacttgttatgtgtgattccagtaaaaatagtaatgagcacttattattgccaagtactgttctgagggtaccatatgcaataagttatttaatccttacaataatcttgtaaggcagattcaaactatcattacacttattttacagatgagaaaactggggcacagataaagcaacttgcccaaggtctcatagctgtaagtcaaccctacggtcaagacctacaagtagccgagctccagagtacattatgagggtcaaagattgtcttattacaaataaattccaagtagaatcaacctttaataagtctttaatgtctcttaaatatgtttatataggagtctaatcaccaattcacaaaaatgaaagtagggaaatgattaacaataatcataggaatctaacaatccaagtggcttgagaatattcattcttcttgacagtatagattctttacaatttcgtaagttccaatgtatgttttaggaatatgaggtcattactattcataatctgatacagctttatcctaaggcctctctttaaaaactacactgcatcatagcttttttgtgcagttggtctttctactgttactgaacagtaagcaacctacagattcactatcaccaaccagccagttgatggatcttaagcaaattatcaagcttgtgataacctaaattataaaatgagggtgttggaatagttacattccaaatcttctataacactctgtattatatttctgcctcattccttgtagggtttcttcagtgcccgtggtcatcgaccccttgacaagaagagagaagaggctcccagcctgaggcctgccccaccgcccatcagtggaggtggctatcgggctcgtccagccaaagcagctgccactcaaaagaaagtagaaagaaaagcccctgatgctggaggctgtcttcacgctgacccagacctggtgggtgcactgatgtttcttgcagtggtggctctctcatgcagagaaagcctgtagtcatggcagtctgctaatgtttcactgacccacattaccatcactgttattttgtttgtttattttggaaataaaattcaaaacataaacatattgggcctttggtttaggctttctttcttgttttctttggtctgggcccaaaatttcaaattaggatatgtgggtgccacctttccatttgtattttgccactgcctttgtttagttggtaaaattttcatagcccaattatattttttctggggtaagtaatattttaaatctctatgagagtatgatgatgactttcgaatttctggtcttacagaaaaccaaataataaatttttatgttggctaatcgtatcgctgaattttcctatgtgctattttaacaaatgtccatgacccaaatccttcatctaatgcctgctattttctttgtttttagggggtgttgtgtcctacaggatgtcagttgcaagaggctttgctacaacaggaaaggccaatcagaaatagtgttgatgagttaaataacaatgtggaagctgtttcccagacctcctcttcttcctttcagtacatgtatttgctgaaagacctgtggcaaaagaggcagaagcaagtaaaaggtagatatccttgtgctttccattcgattttcagctataaaattggaaccgttagactgccacgagaatgcatggttgtgagaagattaacatttctgggttagtgaatagcattcatacgcttttgggcaccttcccctgcaacttgccagataagcactattcagctcttattcccagtctgacatcagcaagtgtgattttctatgaaaaattctactatgactccttattttaagtatacaagaaacttgtgactcagaagataatatttacagagtggaaaaaaacccctagcatttatagttttaacatttgaggttttgaatgagagagttatccataatatattcaattgtgttgtggataatgacacctaacctgtgaatcttgaggtcagaatgttgagtgctgttgacttggtggtcaggaaacagctagtgcgtgagcctggcacaggcatctcagtgagtagcatacccacagttggaaatttttcaaagaaatcaaaggaatcatgacatcttataaatttcaaggttctgctatacttatgtgaaatggataaataaatcaagcatatccactctgtaagattgaacttctcagatggaagaccccaatactgctttctcctcttttccctcaccaaagaaataaacaacctatttcatttattactggacacaatctttagcgtatacctatggtaaattactagtatggtggttaggatttatgttaatttgtatatgtcatgcgccaaatcatttccactaaatatgactatatatcataactgcttggtgatagctcagtgtttaatagtttattctcagaaaatcaaaattgtatagttaaatacattagttttatgaggcaaaaatgctaactatttctacataatttcatttttccagataatgaaaatgtagtcaatgagtactcctcagaactggaaaagcaccaattatatatagatgagactgtgaatagcaatatcccaactaaccttcgtgtgcttcgttcaatcctggaaaacctgagaagcaaaatacaaaagttagaatctgatgtctcagctcaaatggaatattgtcgcaccccatgcactgtcagttgcaatattcctgtggtgtctggcaaaggtaactgattcataaacatatttttagagagttccagaagaactcacacaccaaaaataagagaacaacaacaacaacaaaaatgctaagtggattttcccaacagatcataatgacattacagtacatcataaaaatatccttagccagttgtgttttggactggcctggtgcatttgctggttttgatgagcaggatggggcacaggtagtcccaggggtggctgatgtgtgcatctgcgtactggcttgaacagatggcagaaccacagatagatgtagaagtttctccattttgtgtgttctgggagctcatggatattccaggacacaaaaggtggagaagagctttgttcatcctcttagcagataaacgtcctcagaactgggttggacttactaaagtaaaatgaaaatctaatatttgttatattattttcaaaggtctataataacacactccttagtaacttatgtaatgttattttaaagaattggtgacctaaatacaaagtaattatgtcataaacccctgaacataatgttgtcttacatttgcagaatgtgaggaaattatcaggaaaggaggtgaaacatctgaaatgtatctcattcaacctgacagttctgtcaaaccgtatagagtatactgtgacatgaatacagaaaatggaggtaagctttcgacagttgttgacctgttgatctgtaattatttggataccgtaaaatgccaggnnnnnnnnnnnnnnnnnnnnnnnnnnnnnnnnnnnnnnnnnnnnnnnnnnnnnnnnnnnnnnnnnnnnnnnnnnnnnnnnnnnnnnnnnnnnnnnnnnnnnnnnnnnnnnnnnnnnnnnnnnnnnnnnnnnnnnnnnnnnnnnnnnnnnnnnnnnnnnnnnnnnnnnnnnnnnnnnnnnnnnnnnnnnnnnnnnnnnnnnnnnnnnnnnnnnnnnnnnnnnnnnnnnnnnnnnnnnnnnnnnnnnnnnnnnnnnnnnnnnnnnnnnnnnnnnnnnnnnnnnnnnnnnnnnnnnnnnnnnnnnnnnnnnnnnnnnnnnnnnnnnnnnnnnnnnnnnncttagctctaacatctaacatagctgacaaaggagtaatttgatgtggaattcaacctgatatttaaaagttataaaatatctataattcacaatttggggtaagataaagcactggcagtttccaaagattttacaagtttacctctcatatttatttccttattgtgtctattttagagcaccaaatatatactcaatggaatggacaggggattcagatattattttcaaagtgacattatttgctgttggttaatatatgctctttttgtttctgtcaaccaaaggatggacagtgattcagaaccgtcaagacggtagtgttgactttggcaggaaatgggatccatataaacagggatttggaaatgttgcaaccaacacagatgggaagaattactgtggcctaccaggtaacgaacaggcatgcaaaataaaatcattctatttgaaatgggattttttttaattaaaaaacattcattgttggaagcctgttttaggcagttaagaggagtttcctgacaaaaatgtggaagctaaagataagggaagaaaggcagtttttagtttcccaaaattttatttttggtgagagattttattttgtttttcttttaggtgaatattggcttggaaatgataaaattagccagcttaccaggatgggacccacagaacttttgatagaaatggaggactggaaaggagacaaagtaaaggctcactatggaggattcactgtacagaatgaagccaacaaataccagatctcagtgaacaaatacagaggaacagccggtaatgccctcatggatggagcatctcagctgatgggagaaaacaggaccatgaccattcacaacggcatgttcttcagcacgtatgacagagacaatgacggctggtatgtgtggcactctttgctcctgctttaaaaatcacactaatatcattactcagaatcattaacaatatttttaatagctaccacttcctgggcacttactgtcagccactgtcctaagctctttatgcatcactcgaaagcatttcaactataaggtagacattcttattctcattttacagatgagatttagagagattacgtgatttgtccaatgtcacacaactacccagagataaaactagaatttgagcacagttactttctgaataatgagcatttagataaatacctatatctctatattctaaagtgtgtgtgaaaactttcattttcatttccagggttctctgatactaagggttgtaaaagctattattccagtataaagtaacaaacacagtccctagatggattggccataaaggcccagttatctctctttcttgctatagggcacaggaggtctttggtgtattagtgtgactctatgtatagcacccaaaggaaagactactgtgcacacgagtgtagcagtcttttatgggtaatctgcaaaacgtaacttgaccaccgtagttctgtttctaataacgcccaaacacattttcctttccaggttaacatcagatcccagaaaacagtgttctaaagaagacggtggtggatggtggtataatagatgtcatgcagccaatccaaacggcagatactactggggtggacagtacacctgggacatggcaaagcatggcacagatgatggtgtagtatggatgaattggaaggggtcatggtactcaatgaggaagatgagtatgaagatcaggcccttcttcccacagcaatagtccccaatacgtagatttttgctcttctgtatgtgacaacatttttgtacattatgttattggaattttctttcatacattatattcctctaaaactctcaagcagacgtgagtgtgactttttgaaaaaagtataggataaattacattaaaatagcacatgattttcttttgttttcttcatttctcttgctcacccaagaagtaacaaaagtatagttttgacagagttggtgttcataatttcagttctagttgattgcgagaattttcaaataaggaagaggggtcttttatccttgtcgtaggaaaaccatgacggaaaggaaaaactgatgtttaaaagtccacttttaaaactatatttatttatgtaggatctgtcaaagaaaacttccaaaaagatttattaattaaaccagactctgttgcaataagttaatgttttcttgttttgtaatccacacattcaatgagttaggctttgcacttgtaaggaaggagaagcgttcacaacctcaaatagctaataaaccggtcttgaatatttgaagatttaaaatctgactcnnnnnnnnnnnnnnnnnnnnnnnnnnnnnnnnnnnnnnnnnnnnnnnnnnnnnnnnnnnnnnnnnnnnnnnnnnnnnnnnnnnnnnnnnnnnnnnnnnnnnnnnnnnnnnnnnnnnnnnnnnnnnnnnnnnnnnnnnnnnnnnnnnnnnnnnnnnnnnnnnngtcccagctagcctgtgaggtggagattgcattgagccaagatc

SEQ ID NO: 46143 - DNA, 515 bp, Homo sapiens; identical to SEQ ID NO: 25292
  misc_feature (1)...(515): n = a,t,c or g

SEQ ID NO: 46144 - DNA, 1674 bp, Homo sapiens
ttttttttttttttggaccccaggagagacgcattttctctttcagatgcaaacaaaatcttacactcttctcctttggatacaatagagaaacggaaagaaaggaaggaacaagaggcctgtgttaagtcctgttgatgttaagtcctgttgagagcaccaggtaaacactctgcaccccttctcttagtagtaataggtttttcactccttggcctcagctgtcctcacaggacagtgggggcagatcagagaacacatcagaaatacatacaaagaaatcgtacaaactggacaggttcccctccccctgccacaactggcatcccaacagagggaacaagtactaaatcatttttgacgacgtaaataagactgaaaacaggttaaacagttgctgaacttaagggcatgacaaaaaggactcctctctctgacccaggtaggcaaaatgctttgggtgtgaggtaaaaaaaaatgggtaagagcagctgtacagagtggggtgaaatgttaaacagggtgcagtgcccaagggctaagaaccaggtccagcgcaagcctgagaccacaggaggcactcacagctcacaaaggcgtctcgcctgattggccagggcaggacctgccgcctcttctcggtgcacagacagtcatgccaaccctgggcagggtggcatctgcccctgctttccccactgagtggggagacagggcagtgtgctcaggccctcaatcctcacgcaggtaggcctcctgctccgactcagcccgctcctccccttcctcctgtgttttctgacggagctcttctatctgtgcttctgccagcttggtttctgctttccgggagagctggtgcacctcttccacctgcagtttcaccagctgaatgtgattcctggcggttatagaggcctgatctgcgccagtttgatatgcagcttctgctgccatctctgaaagaccaactgcagtcatccaagtggtttccagcttcaagtactcttggtgttttgaagtcatctcagctctggctcctatgatcacctgccacacttcatcttcctcctctgaattcattttcccaagtaaacttgtatattgtcggtaaagagaagttaaggtataaacagccttagtatattcagtaatagcttcaatcaacgcatatgtggtctgagagagaaaggtagaggtgctatctgttaccaaagacactgctctcctcatcaatgcttcactactaagggaatgaggctctgatttctggaagtagaagtcagatttcataaggcacgaccgccaatctgtaacaggctcttggatttacttgcaggggctgtaaactcaaactcgagccaagcaggaacctaaatgaggatgcaggacagctgaggggttttgaaattttcaacatacaccaagtttaaaatgttgcctcaggcagggtgttggtggctcacgcctgtaatcctagcacttggaaggccaagggcaaggcgggaggatcacttgagcccaggagttcacgaccagcctgggcaacatggctggcaacatgaccccgtgtctattaaaaaaaaataagtaaataaaggccgaggcgggtggatcacttgaggtcaggaattcgaaatctgcctgaccaacatggtgaaaccccatctctac

SEQ ID NO: 46145 - DNA, 729 bp, Homo sapiens; identical to SEQ ID NO: 15351
  misc_feature (1)...(729): n = a,t,c or g

SEQ ID NO: 46146 - DNA, 1401 bp, Homo sapiens
gcgcggttgaggccttcggtggtgaacgagtctccagcaccatgtctggtttgtctggcccaccagcccggcgcggcccttttccgttagcgttgctgcttttgttcctgctcggccccagattggtccttgccatctccttccatctgcccattaactctcgcaagtgcctccgtgaggagattcacaaggacctgctagtcactagcaggtccttgtgactggcgcgtacgagatctccgaccagtctgggggcgctggcggcctgcgcagccacctcaagatcacagattctgctggccatattctctactccaaagaggatgcaaccaaggggaaatttgcctttaccactgaagattatgacatgtttgaagtgtgttttgagagcaagggaacagggcggatacctgaccaactcgtgatcctagacatgaagcatggagtggaggcgaaaaattacgaagagattgcaaaagttgagaagctcaaaccattagaggtagagctgcgcacgcctagaagacctttcagaatctattgttaatgattttgcctacatgaagaagagagaagaggagatgcgtgataccaacgagtcaacaaacactcgggtcctatacttcagcatcttttcaatgttctgtctcattggactagctacctggcaggtcttctacctgcgacgcttcttcaaggccaagaaattgattgagtaatgaatgaggcatattctcctcccaccttgtacctcagccagcagaacatcgctgggacgtgcctggcctaaggcatcctaccaacagcaccatcaaggcacgttggagctttcttgccagaactgatctcttttggtgtgggaggacatggggtaccacctacacccaacaagtcaatgagggacttctttttaatttggtaggattttgactggttttgcaacaataggtctattattagagtcacctatgacaaaaaataggggttacctagataatgccaaagtcagcatttgtcctgggttccccttgtgtgatctgtttggactatgttttcttttcttctcccacttgctcagcagcttgggcttccattctagttcttttaccaagatttttgtgtgaccatgttgacttcatttggattgccctctttcaatttccttgtgaaaacacccttaactttctctttacccttagctgaaatgtttacatagcttctggtgatatcttttcatgattttatatctcttaaaatggtgatggatgtgacacctcataaaagtgagctttgaactgtagataactcttaaagaaaatgtcattttagacaattaaaatatttgtgctcaactgcttgaacttttttcgtgtatgtgtatttaattctatgcaatattat

SEQ ID NO: 46147 - DNA, 901 bp, Homo sapiens
ctacctcgcccaggctgccagaccggaagcgctccgctgtacctggatcctgctcctctgggttgaaacccgggcgccgccaagatgccggcttaccactcttctctcatggatcctgataccaaactcatcggaaacatggcactgttgcctatcagaagtcaattcaaaggacctgcccccagagagacaaaagatacagatattgtgggatgaagccatctattacttcaagggccaatgtcttcttcaaaaactatgaaattaagaatgaagctgataggaccttgatatatataactctctacatttctgaatgtctgaagaaactgcaaaaagtgcaattccaaaagccaaggtgagaaagaaatgtatacgctgggaatcactaattttcccattcctggagagcctggttttccacttaacgcaatttatgcccaaacctgcaaacaaacaggaagatgaagtgatgagagcctatttacaaccagctaaggcaagagactggactgagactttgtgagaaagttttcgaccctcagaatgataaaccccagcaagtggtggacttgctttgtgaagagacagttcatgaacaagagtctttcaggacctggacagtgaagggagcccgggcagccaccgtctccagagccctgggcagcattttcccagcaagatgtacacaatcttttgcctttatttcgtaaagttttatacagaagagagaagagcatgtctttacttgaaaaactcttgatcaagaatttgggtgggagaaaagaaagtgggttatcaagggtgatttgaaattttctgcagcattaaagctggcgcttaataagaataagtaataataaagaaatttctaacattccatgtcaaaaaaaaaaaaaaa

SEQ ID NO: 46148 - DNA, 5099 bp, Homo sapiens
cctgcctgcccgcctgcttgctctctggctgtgctcctgcttaaagaaatcagtccttcctttccgacttagtcctcgggaagaagtttcagactacaaggtatcattggaacatttcaagatcatcaaatcaaattccacagggattggtgaccaaccagaaggctcagacatctgattgctgacctgtccagacatcatctggtctccctgaacctgaaatcacaccatggatgattttgagcgtcgcagagaacttagaaggcaaaagagggaggagatgcgactcgaagcagaaagaatcgcctaccagaggaatgacgatgatgaagaggaggcagcccgggaacgccgccgccgagcccgacaggaacggctgcggcagaagcaggaggaagaatccttgggacaggtgaccgaccaggtggaggtgaatgcccagaacagtgtgcctgacgaggaggccaagacaaccaccacaaacactcaagtggaaggggatgatgaggccgcattcctggagcgcctggctcggcgtgaggaaagacgccaaaaacgccttcaggaggctctggagcggcagaaggagttcgacccaacaataacagatgcaagtctgtcgctcccaagcagaagaatgcaaaatgacacagcagaaaatgaaactaccgagaaggaagaaaaaagtgaaagtcgccaagaaagatacgagatagaggaaacagaaacagtcaccaagtcctaccagaagaatgattggagggatgctgaagaaaacaagaaagaagacaaggaaaaggaggaggaggaagaggagaagccaaagcgagggagcattggagaaaatcaggtagaggtgatggtggaagagaaaacaactgaaagccaggaggaaacagtggtaatgtcattaaaaaatgggcagatcagttcagaagagcctaaacaagaggaggagagggaacaaggttcagatgagatttcccatcatgaaaagatggaagaggaagacaaggaaagagctgaggcagagagggcaaggttggaagcagaagaaagagaaagaattaaagccgagcaagacaaaaagatagcagatgaacgagcaagaattgaagcagaagaaaaagcagctgcccaagaaagagaaaggagagaggcagaagagagggaaaggatgagggaggaagagaaaagggcagcagaggagaggcagaggataaaggaggaagagaaaagggcagcagaggagaggcagaggataaaggaggaagagaaaagggcagcagaggagaggcagaggataaaagaggaagagaaaagggcagcagaggagaggcaaagggccagggcagaggaggaagagaaggctaaggtagaagagcagaaacgtaacaagcagctagaagagaaaaaacgtgccatgcaagagacaaagataaaaggggaaaaggtagaacagaaaatagaagggaaatgggtaaatgaaaagaaagcacaagaagataaacttcagacagctgtcctaaagaaacagggagaagagaagggaactaaagtgcaagctaaaagagaaaagctccaagaagacaagcctaccttcaaaaaagaagagatcaaagatgaaaagattaaaaaggacaaagaacccaaagaagaagttaagagcttcatggatcgaaagaagggatttacagaagttaagtcgcagaatggagaattcatgacccacaaacttaaacatactgagaatactttcagccgccctggagggagggccagcgtggacaccaaggaggctgagggcgccccccaggtggaagccggcaaaaggctggaggagcttcgtcgtcgtcgcggggagaccgagagcgaagagttcgagaagctcaaacagaagcagcaggaggcggctttggagctggaggaactcaagaaaaagagggaggagagaaggaaggtcctggaggaggaagagcagaggaggaagcaggaggaagccgatcgaaaactcagagaggaggaagagaagaggaggctaaaggaagagattgaaaggcgaagagcagaagctgctgagaaacgccagaagatgccagaagatggcttgtcagatgacaagaaaccattcaagtgtttcactcctaaaggttcatctctcaagatagaagagcgagcagaatttttgaataagtctgtgcagaaaagcagtggtgtcaaatcgacccatcaagcagcaatagtctccaagattgacagcagactggagcagtataccagtgcaattgagggaacaaaaagcgcaaaacctacaaagccggcagcctcggatcttcctgttcctgctgaaggtgtacgcaacatcaagagtatgtgggagaaagggaatgtgttttcatcccccactgcagcaggcacaccaaataaggaaactgcctggcttgaaggtaggggtttctagccgcatcaatgaatggctaactaaaaccccagatggaaacaagtcacctgctcccaaaccttctgacttgagaccaggagacgtatccagcaagcggaacctctgggaaaagcaatctgtggataaggtcacttcccccactaaggtttgagacagttccagaaagaacccaagctcaagacgcaggacgagctcagttgtagagggctaattcgctctgttttgtatttatgttgatttactaaattgggttcattatcttttatttttcaatatcccagtaaacccatgtatattatcactatatttaataatcacagtctagagatgttcatggtaaaagtactgcctttgcacaggagcctgtttctaaagaaacccatgctgtgaaatagagacttttctactgatcatcataactctgtatctgagcagtgataccaaccacatctgaagtcaacagaagatcccaagtttaaaattgcctgcggaatgtgtgcagtatctagaaaaatgaaccgtagtttttgtttttttaaatacagaagtcatgttgtttctgcactttataataaagcatggaagaaattatcttagtaggcaattgtaacactttttgaaagtaacccatttcagatttgaaatactgcaataatggttgtctttaaaaaaaaaaaagaaatgtactgttaaggtattactttttttcatgctgatgattcatatctaaattacattattatgttagctgacagtggtactgattttttaggttggttgttttgtggatttctttagtagtgatagtagcctgaaccacattttagataactcaattatgtatgtatgtgcatacacatatacaaacacactaatggtagaatgcttttttatgtgctagactattatatttagtagtatgtcattgtaactagccaatatcacagcttttgaaaaattaaaaaatcacactatattaatattttatatttgccaacagaaacatggcagataggtatcaatatgttttcaatgcctgatgacctataagaagaaagtattgaaaagaagagagattagaactgttagaaggagttgaaattttctaaaagacatagtatttagtttataattaaatgcattcttgaagtccagtgtgaattttattaatgctatcatctcgaccaagctcaaagcctacttattagaaacaatgaagttcacaataggtcataaggtctcttccttttctaaaattgaaagacaagaaatttagtgccaatattgtacagacagaaattccatgtatgagtctcaacaaagactacctttggctaaatgtctagaagcagagaagtaaagtgagcaaaatccagtgttgaggagtcatgacagtactttgatctttatatactctgaagcatttcttcaaacttttctacttttatttgtcattgatacctgtagtaagttgacaatgtggtgaaatttcaaaattatatgtaacttctactagttttactttctcccccaagtcttttttaactcatgatttttacacacacaatccagaacttattatatagcctctaagtctttattcttcacagtagataatgaaagagtcctccagtgtcttggcaaaatgttctagtatagctggatacatacagtggagttctataaactcatacctcagtggacttaaccaaaattgtgttagtctcaattcctaccacactgagggagcctcccaaataactattttcttatctgcagtattcctccagaagagctaaccagggcagggctggcatgagaagtgacatctgcgttacaaagtctatcttcctcataagtctgtaaagagcaattgaatcttctagctttagcaaacctaagccaaaggaaggaaagccacgaagaatgcagaagtcaaaccctcatgacaaagtaggcacaagtctacaataagctaaatcagaatttacaaatacaagtgtcccaggtagcattgactcccgtcattgggagtgaaatggatcaaagtttgaattaaggcctatggtaaggtaacattgctttgttgtacttttgaacaagagctcctcctgatcactattacatatttttctagaaaatctaaagttcagaagagaatgtatcactgctgacttttattccaatatttggatggagtaagttttagggtagaattttgttcagtttggatttaatcttttgaaaagtaaattccttgtttactggtttgactataattctctgttatctttacgaggtaaaactgcaagctgactagcatgttctgtgaatctgccattcctaaaaattttataaacacttgatacttttcactgataatggatcgctccaataaacatatattgtgaaaatgcatccacaataaatggaattccttcctgcaaaaaaaaaaaaaaaaaaaactcgtttgcctatctgtaaaggtaatacattctgattacaaaaaatgaaaatgttacatagaaatgtaccgttatccatctaccagataactattattaataatgtgtatttatttttccaggaattaaaaaacatctatcatataagtattgcaaataaaacttaaaaagca

SEQ ID NO: 46149 - DNA, 736 bp, Homo sapiens
gtagaagcttgggttgaatctttcaatctgctgccatccgcggcttgggggtcgaaggtccgggcggcgcggttgcattccttccctaggtctctggcggctacgtatccgatcctgtcctgcgagcagggccctcggcggccttgaccaaggcgacagtgaacacagtctgaagttccggcccaagacctgggcttgctggcaggagtcagctctgggcatctttggctttacggatttttaagtggccctttctccttgctctctgcagaaatgggcaagttcatgaaacctgggaaggtggtgcttgtcctggctggacgctactccggacgcaaagctgtcatcgtgaagaacattgatgatggcacctcagatcgcccctacagccatgctctggtggctggaattgaccgctaccccccgcaaaagtgacagctgccatgggcaagaagaagatcgccaagagatcaaagataaaatcttttgtgaaagtgtataactacaatcacctaatgcccacaaggtactctgtggatatccccttggacaaaactgtcgtcaataaggatgtctttcagagatcctgctcttaaacgcaaggcccgacgggaggccaaggtcaagtttgaagagagatacaagacaggcaagaacaagtggttcttccagaaactgcgggttttagatgctttgttttgatcattaaaaattataaagaaaaaaaagtcgacgc

SEQ ID NO: 46150 - DNA, 471 bp, Homo sapiens
  misc_feature (1)...(471): n = a,t,c or g
gggnttnnnctttggccnacngagactcntatgacatgatnacgaatttaatacgactcactatagggaatttggccctcgaggccaagaattcggcacgaggaggctgtcctctgggaggcactacgcaagatgggactgcgtcctggggtgagacatcccctccttggagatctaaggaaacttctcacctatgagtttgtaaagcagaaatacctggactacagacgagtgcccaacagcaaccccccggagtatgagttcctctggggcctccgttcctaccatgagactagcaagatgaaagtgctgagattcattgcagaggttcagaaaagagaccctcgtgactggactgcacagttcatggaggctgcagatgaggccttggatgctctggatgctgctgcagctgaggccgaagcccgggctgaagcaagaacccgcatgggaattggagatgaggctgtg

SEQ ID NO: 46151 - DNA, 400 bp, Homo sapiens
  misc_feature (1)...(400): n = a,t,c or g
annacttctatgacatgattacgaatttaatacgactcactatagggaatttggccctcgaggccaagaattcggcacgagcccaacagcaacccacctgagtatgaattcctctggggcctgcgagcccgccatgagaccagcaagatgagggtcctgagattcatcgcccagaatcagaaccgagacccccgggaatggaaggctcatttcttggaggctgtggatgatgctttcaagacaatggatgtggatatggccgaggaacatgccagggcccagatgagggcccagatgaatatcggggatgaagcgctgattggacggtggagctgggatgacatacaagtcgagctcctgacctgggatgaggacggagattttggcgatgcctgggcca

SEQ ID NO: 46152 - DNA, 1408 bp, Homo sapiens
gacatgctgagggatgtcatccaagaatatgatgaatatttcccagaaatcattgaacgagcaagctacactctggagaagatgtttcgagtcaatctgaaagaaattgataagcaaagtagcttgtatattctcatcagcactcaggaatcctctgcaggcatactgggaacgaccaaggacacacccaagctgggtctcctcatggtgattctgagtgtcatttttatgaatggcaacaaggccagtgaggctgtcatctgggaggtgctgcgcaagttggggctgcgccctggggtatgactgggctctctcagcgcttgctgtccgtgttgtcctttggcaagagaggatggtcctaggattgcatcagtctggtggtctggtggagcgggtggggtgctggactgggtagagggcccagggttctgacctgggtggatgacgggcaaatggtcctgaactctctgctgtctctctccttaatgtcctctgtctgttctaagctgagatgttagatagaccttcagggatccctgacaaagaggcatctggtcttaactgcttgcttctagtggccatgtgctcattactttcttcacttcattgagactgccccatgtgctaagagaggtctccttccatgttgggaaaatggcctctggccctcaatctggggcagttcctgatctgtggttcatgggggttaatttttcccaattgtcaagggtgaggcattcactctttggggaagtgaggaagctcatcacagacgagtttgtgaagcagaagtacctggagtacaagagggtccctaacagcagaccacctgagtatgaattcctctgggggcttgcgctcctaccacgagaccagcaagatgagggtcctgagattcatcgcccagaatcagaaccgagacccccgggaatggaaggctcatttcttggaggctgtggatgatgctttcaagacaatggatgtggatatggccgaggaacatgccagggcccagataccatcagtacattctgaatagcaaccgtgccaacaggagggccacgtggagagctggcgtcaaccagtggcaccaactggaggggccagcaccagcgtcctagatggccccagcaccagctccaccatccggaccagaaatgctgccagagctggcgccagcttcttctcctggatccagcaccgttgacgaactgcagcgatcttactgggcaagccagagcgcctcctctcgagattccttctcgacacagcaccctaggcggcttcttcctgtcagtcggaggtggcatgcaagatgaagctctctttgctcttcctgctttcattttgtgcttttccttgtgttttcatgttttgggtatcagtgttacattaaagttgcaaaatt

SEQ ID NO: 46153 - DNA, 2692 bp, Homo sapiens
atgaatccttctagagacgtccacgatgccagcacgagccgccgcttcacgccgccttccaccgcgctgagcccaggcaagatgagcgaggcgttgccgctgggcgccccggacgccggcgctgccctggccggcaagctgaggagcggcgaccgcagcatggtggaggtgctggccgaccacccgggcgagctggtgcgcaccgacagccccaacttcctctgctccgtgctgcctacgcactggcgctgcaacaagaccctgcccatcgctttcaaggtggtggccctaggggatgttccagatggcactctggtcactgtgatggctggcaatgatgaaaactactcggctgagctgagaaatgctaccgcagccatgaagaaccaggttgcaagatttaatgacctcaggtttgtcggtcgaagtggaagagggaaaagcttcactctgaccatcactgtcttcacaaacccaccgcaagtcgccacctaccacagagccatcaaaatcacagtggatgggccccgagaacctcgaagacatcggcagaaactagatgatcagaccaagcccgggagcttgtccttttccgagcggctcagtgaactggagcagctgcggcgcacagccatgagggtcagcccacaccacccagcccccacgcccaaccctcgtgcctccctgaaccactccactgcctttaaccctcagcctcagagtcagatgcaggaatcatggatgctgccaattttgagcagtttttgcaagaaaggatcaaagtgaacggaaaagctgggaaccttggtggaggggtggtgaccatcgaaaggagcaagagcaagatcaccgtgacatccgaggtgcctttctccaaaaggtatttgaaatatctcaccaaaaaatatttgaagaagaataatctacgtgactggttgcgcgtagttgctaacagcaaagagagttacgaattacgttacttccagattaaccaggacgaagaagaggaggaagacgaggattaaatttcatttatctggaaaattttgtatgagttcttgaataaaacttgggaaccaaaatggtggtttatccttgtatctctgcagtgtggattgaacagaaaattggaaatcatagtcaaagggcttcccttggttcgccactcatttatttgtaacttgacttctttttttttctgcttaaaaatttcaattctcgtggtaataccagagtagaaggagagggtgactttaccgaactgacagccattggggaggcagatgcgggtgtggaggtgtgggctgaaggtagtgactgtttgattttaaaaagtgtgactgtcagttgtatctgttgcttttctcaatgattcagggatacaaatgggcttctctcattcattaaaagaaaacgcgacatctttctaagattctctgtgggaaaatgactgtcaataaaatgcgggtttctgggccattcgtcttactttcattttttgattacaaatttctcttgacgcacacaattatgtctgctaatcctcttcttcctagagagagaaactgtgctccttcagtgttgctgccataaaggggtttggggaatcgattgtaaaagtcccaggttctaaattaactaaatgtgtacagaaatgaacgtgtaagtaatgtttctacaggtctttgcaacaaactgtcactttccgtctccagcagaggggagctgtaggaatagtgcttccagatgtgggtctcccgtgtggggcccagcaatggggggcccctgatgccaagagctctggaggttcttgaaagaggggacaccgaaggaggagtgactgggaagcctcccatgccaaggaggtgggaggtgccctggaaatagctgcctcatgccacttaggccatgactggatttaatgtcagtggtgtgccacagtgcagaggctagacaactgaaaggggctaccaaggctgggaaaaaaatgcaattgttgctgtgagtgactttgaaagactctggtgccttgtggtgcccttctgaaattcaaacagtaatgcaaaagtgtctgcattagaatttacggtgtctaaaattcatgtttttaaaagagcttgcctacagatggtttccacacttgaaattgtgccctgcgagttgcatagctggaagttcaatgctcagtcctaccttggctcccattaaacatttggtgctctgtggattgagttgaacgtgttgaggctttgcaatttcacttgtgttaaaggctctggcatttttcccatttctatgcaaatttctttgaagcagaattgcttgcatatttcttctctgccgtcacagaaagcagagtttctttcaaacttcactgaggcatcagttgctctttggcaatgtcccttaaccatgattattaactaagtttgtggcttgagtttacaaattctacttgttgcattgatgttcccatgtagtaagtcatttttagtttggttgtgaaaaaaccctgggctgaagttggcatttcagttaaaagaaaaaaagaaactagtcccagatttgaaaacttgtaataaaattgaaactcactggttttctatgtctttttgaactcttgtaatcgagttttgatcatattttctattaaagtggctaacacctggctactcttactgtaaaaaaaaaa

SEQ ID NO: 46154 - DNA, 1179 bp, Homo sapiens
tttttttttttttttttttcactgctaaaatattttattttaaaatgtaccacagtgaatggatgtatccatactggttcttataaatgtacacatacacatccatatatttgacaaagtatatatatgaactggttaaagacctatccaaaagaggaaatatttctagaaagttcatgtgtttatacttcatttgacaattaaaacttatttgaactgatgaagttttagttgcttagcaatgactaataataccaatgcctgtcaataatgacaactaaattgagaactataaatttcactgctgtgccttgggtcaaaattttcaatgatggaatcctaaataagtaacagttattcctataatggggtatatattcagaaggaataaatacctgccactattaccaaaagactgttctctgtagagctcaaaaaaaggattatgccacaatacataatttttatttaaaaaagatctctttagatgccactgcaaattctgcttttactaaacagaaaggcagcaccccatttctttcttgtaaaggaggaaagtctttcataaaaaactctttgaagaagttttggtagtatgttcagagtcaaacacagcagcactttattaacaaggacagagtaatataatcacaaggaaatacttgttaagtctaaattaaatgatatcttgggcagcataaaatgaatactaacaagggcaggcatctcaatatgtctgtctcacagctgttcaatgtgaaagtagtttgtaagcaaggaaagacaagagcaacatttacaccacaaattgactgtaaaatacttcattacattgagaaaggtaatcaatggtcaaaatccataaccagaaggagacaccatttgagtatctatcaatgggccaaacagacctgttagattttaatactgcctggtatgcaactcagatactgatttcttctctatggaggaagccaatgttcatgttcttgataacagtcattaatctttctgattgagacagtccaaacccatgtgacctcagaacactgggtctaagagtgaacttcttacattgatatattttccttgagttctttcatggtgctgtatcagcatgctaccataatctgaaaatgacatggggcacaaaggagccatatatatatatttcatgtt

SEQ ID NO: 46155 - DNA, 4617 bp, Homo sapiens
tttttttttttttgaccagaaaaagtgtttattcatcaagtctttaaagatacaaaaacacgtgtcttctgtggagctctgagaacaggactccagcaaagcacttttcagccttgtggtcttcaagcatttccaagatctttgctgcaaggagcattgtactcagcaattgcaaactcatccgtctcgtagtaatcatagactttcactatggctggtttcagatctcttactggggacatcttgcagaaccgtgaagaacaagctcagtgtctgatttgacacccttatcaagggtaaatcaagacatggttgctgctgacttctgtccggctcacatggttagatctttccaagcattttcactgttggcttcagggggaatgaagccagagaccatcttcacatcaacgatcgccatgttggagggcagagcggctccctgtgtaactgacacttagggagatttggaagctggtgtgggctttgggttcatcacaagtttgaggcagagtctgcactcctaaagcaaaggggaactcttcccttttctgggagaatattgtatttcaaggatgtctggaggtagacacatccttctcctgtcactttcatgctgtattccccaggcagctctggcaatgagacctgctgcagtaacaggcggttgttgttgtccacttggaatttgctggaaaatgtccctgaagactggatagtcacctgtgcagccttcccagtcctggtaaatgtggctgctccatatttggacagagcatggagagccaccactgtgtcctgggtggaggagaaaccgccctgggcattctgctgcttcgtgatccacttcacgatgttggttgcagaggtcaggtcctccgaggttggggctggctgggccgtgagataagcgaggagcacataggatgtcatctccacctcagcagagggagcctggggttcgtaaaaatgccccactggtgccttgggtttctgagggcgctcccaatggacagagttgtctttcttcacagcttcctcattaagtgacttgagtacttccttcctcttgtcctggttacctgccagggcaaaaagcataggcccagcagtgctttggtatatacatggctgccatggtccccttcttgtgctgtccttcccaggctgactcccaggcaaaacagggcattgcggacaacagggtgagtgactgtgagaggaatctccagaagggcgatggtgatataggcggagagggtcacttcatcttctactcctccctttatggcattgttgagcagtgacccagagctcctgaaacaggccattgtccttctgcctctgggagagcccatatgagggcttggggtaaatgtgtgcttcatcgatgaagatgtaggctcgagcttgggcaaaagtcttcagaacaaaggctgtgagccaggtgttgccctggttcctgccatatcgctccccaaaggtgctgtaggagccatcatagtgtttgtagttcaactgtctctggtaaccagtgttgagatagccaatggccttggacttgatctctggagtaagctgctgtgtttcatttagataatccagtacatagatgttaggagcaaagaggaccatattctgctctccacagccatagggcatctggagaagattttgtgtgttttgcatggcagagcctaatatgtctcccaaaactgagacagaagctcgggcagattcttctaccacatttggtggcagtttcagggataattcttcagaaacctcaccacctgatggacaaagtagggagttgaatgttgtttccttctctagtccttcaggttcaaccaacagaggcttgatgactgtgtctttccttccgtgttcaggaactgaaggcacctcagtcccacacagctcttgagactctagtgcctctgcgctcacagtgaaattcacatttcctaatgactttggggttactgcccaggacacagtttgccgcccgtttgcacagatgcagtgaggcgcttgttccttctccactgggacagctaggaaggcggggagaggcttccagctgcacactgacccggatgcatttggggaagggtagttttaggaccgtaggccttgagtgtgaaggcctctccaggaatcacagagtaaggcattgtaagctccacaaagaagggctggaaggctcggagagaggcagtggaagagataccaagtccagcatcttcagacaggcagaaggcccctgccttccactcggtgatggtgtcagggactgttactcctacctcagccacccctgctgagtttaccaccaccaaatcccagatccatgtctcagggaagtactttcgtacggtctccgtgtgaggctcttcaacatgcaccaggcgtgcatggcctcttcccattacatctgactcataaaaacctacacgtagaccttcaggtccatgcatttcatactgttgaagctgtggacacattttgggtttacgaatctttgagttggtgaatgcctttaagcccatgtcctctaggaagctgtacatatccttttcatttgtacttgatactggagtatatgtgattccattaatatagacattatgacgattgatgcagtcttcatcgtcctggtcattcaaaggcccaggggaagccagtgaggtccttttctggtagcaggttgtaaaccgaggacgccgagagctcagcatcaggcttcatgagcagcacgctttggtccacagcacggagggcgcagacggactgaggagccgctgtgactcgcaggtggccgtgtgaggctgggagactttgtgatggggctgaagcctcaaatccaccttgttggccagacaattttcaacatcatattttgcagaatccccaatcacgtccccggtaggtaaaacagcatagatgagcaaccgagcgacaggagcaatgtctgacttcacagggattgagatggaaaaatggcccttcatgtcttcctgcttcacaagcagtccatgtgtcccagttcggacaatgcctccctttgccattatcagataatagaaggagagcttcttcagccccagcagggtgcctccattcagaatataatgtgcctggactgtctgagtatggccacagggtagttccatgagacatgggctcaaggtggacaaagctcttgccttggggagaacacaagataagcagtgtgatgtgccctcttcgtgttcttctgacacccactggtagccgtaacagggactacgatccttgtaattgaccctaacagtaagagaggtacccataacattggtggtgttgatagagaactgtacaaggccatgctcatccgtggtagcattggagtaatagtttgcttcatttcctctgatgaatatgactttatttggtatagggacgcctttcccatctactaggcgcacctgcccaaagaagggaattccctgtcgaaagtgtgagtccactttcacaaatgagagtttggttatggttcttgtgatttcactggactgccttccagtcaattccaccactgttccttcttcttggatctgggcctcagtgtgaagtttcatttcatactccttcctcttcagctggaagaccttggtttttacttgctgatagaagcagccatggctgtttagctgtccactgaatttctcacagaaagcctgtgaatcttcaccgtggcagtcggaagcgtcactatactttctgcaaatgctcacagtcacatgtccagggacaggcttcccatatgtgtataggccacacactgatacattcatctcttcttccaagatggtgattatctttggcactgttacttgtacttcaaacttgggaagaacaaattcctccacggtgaaagggtgctctgtccttccacctgatttcttctgtaccaccaccttgtaggagccctggaagggctctgatgagaggggaaaagaaaattgcttggaggccaccctctaactggaaactctgccattgtgcgatgcgatttcctttgggatcctgaatgtatactagtggaatcaactcattcagggggtgaaagttttcatccatggagacaacacgaaatttcactgtctgccctggtttgtagattgatttgtctgtctggacaaagaccagactgtcctcgttcttaaccatcactgtggtccgcttcttaaattcttgggttggtcctttcacttggacagtgaggaacattacctcctcattggatgaagactttggacagcgaaggcgacacagtggagtacgtcattctccgcctccaggtcagtgaagaggctcctgtttcccctgacagactccaaggaagcacttacagtcactgtctcattcaggtagctcagaaggacacagcccttctcagtggtctcagtgtggagcagggaggggaccagaaccatatactgcggttttccagagactgaggcgtctgtgggcaggaggaccaagaggagaagaaccagacttggatgaaggagtttgttcttccccatgttgcagaaagaaggagctggaggagaccagactgtattgtac

SEQ ID NO: 46156 - DNA, 2679 bp, Homo sapiens
ctagcaccaaatccaagatggcggccagcaggaggctgatgaaggagcttgaagaaatccgcaaatgtgggatgaaaaacttccgtaacatccaggttgatgaagctaatttattgacttggcaagggcttattgttcctgacaaccctccatatgataagggagccttcagaatcgaaatcaactttccagcagagtacccattcaaaccaccgaagatcacatttaaaacaaagatctatcacccaaacatcgacgaaaaggggcaggtctgtctgccagtaattagtgccgaaaactggaagccagcaaccaaaaccgaccaagtaatccagtccctcatagcactggtgaatgacccccagcctgagcacccgcttcgggcttgacctagctgaagaatactctaaggaccgtaaaaaattctgtaagaatgctgaagagtttacaaagaaatatggggaaaagcgacctgtggactaaaatctgccacgattggttccagcaagtgtgagcagagaccccgtgcagtgcattcagacaccccgcaaagcaggactctgtggaaattgacacgtgccaccgcctggcgttcgcttgtggcagttactaactttctacagttttcttaatcaaaagtggtctaggtaacctgtaaagaaaggattaaaaatttaagatgttctagttctgctctctttgttttaaaaatcactgcttcaatctacttcaaaagaatggtgtttcttttcttgtccaattttatccaaaatcttcaagttacatttaacccataaggtttaaaaaaaaggaaaaaaaacggttgtggttccctttcttccctacccttgccactcccactttctggcaccgagtttatttttcacttacttacttccccagaccccgggctcgcctccacaaaggagaagagactgccctggcggtcctggtggcttttcttagcatgtgtgggcactgttgcccagtgtggggagttggtttaaattctcctgactccagtttataacatccttttaaaaaatttaaaaacaaacagccacacccctcctccagtccttctcctcagttcttgtgtgaaactccagctgatgttaccacagtaacatcagttaattgggcaagccctgatgtcagtgtgtgtaaactgacctctggccctggcctggcacagagaaagccctataatcacaggtctgtggtggccccgaaatggggggcctgctagtcaggaggatgctgtgcacactgtgtgtgatgaatctcgccagaaaggctcctgaggtcccaggttggcacttctccctgcagccattgtagaagatctgctggtccttgcaggcaaagctacagccagaatgtccgtttgaaactcctagctcatctgtcaccgagcttcatccgaatgtgccacggagcttgctctccacttcctccgtgcagtggccctgccacagccctccctcggcacactttgaccctttgtaggattggaattagcaggactcggctatttaaagcaccagtctggggtcgcctgggcccctgctgaccccctcctccagagcagccagcccagcccgggaacaagacggacttcctcctccttcggactcacagcctttgcagagtcaagctccacttgaagctcactcagtaatatcctttcaatgtgttttatattgttttgactgcctttttttgtagaaataaaaattgaccttagaatttatcgtcagataaacttgtaaagatttgaatattaatgtcttttcaaggcaaatgggattgtccccgcactagtagagaatccatgtcgctctgacaccccaaggaagccgacgatccaaatgccgtgtgtcaccaaccccgcttctgccactggcggcttcccttcttggctcttgggggggactagatcctgtggagaagatgacttaaactttgctttttgttttaattttaattctataacttgagatctttccggggcctacaggcgtgtaagacagcttggtctggtctgtgcagaagtggggagtgatgggcaggttcggcagcctaacattgttcaggcgcatggccctgcggtgtgtacacgaactcggcttcttttgtcctaggtacgccaagggcaggtttctggagactcccttgtgcccgggatggcaagggcaccgggctggcgtttccacatctgtcttcattagcagaaaagtgatgatggattttatttcactcacactccagtttgtaataaaatgccaaattctgtcagctatccaaacaagccaccatttgttcttgttgcttctctggatccagaaatgttgccattcttggaaactgtcccattgcttcgtatttctgccaacgtagctctgcctgcctgtcaacccctcactgcactctgctcatcacgggaggatacctgtgtgccggcagcccctcagggactctcagccctggcactggcaccccagggttggccccgtcagcagaggcttggctttcgagccagtgggtgtctctcctttgggcctgggcggcttgctcctgccagccatgccttcagggtaggctctgagcaagctggcgaacagcctggctgctccaaaaccaaaaaactgggtcctctggaggaggggcgagctgtgg

SEQ ID NO: 46157 - DNA, 603 bp, Homo sapiens
  misc_feature (1)...(603): n = a,t,c or g
gggcatgaatactatagaccaagggatggcagcactgaagttgggtagcacagaagttgcaagcaatgttccaaaagttgtaggttctgctgttggtagcgggtccattactagtaacatcgtggcttccaatagtttgcctccagccaccattgctcctccaaaaccagcatcttgggctgatattgctagcaagcctgcaaaacagcaacctaaactgaagaccaagaatggcattgcagggtcaagtcttccgccacccccgataaagcataacatggatattggaacttgggataacaagggtcccgttgcaaaagccccctcacaggctttggttcagaatataggtcagccaacccaggggtctcctcagcctgttaggtcagcaggctaacaatagcccaccagtggctcaggcatcagtagggctacagacacagccattgccttccaccttccaccacagcctgcccaggttttcagttccaggcaacagggcagcttcagccaacccgntgggtaggcactttgggaaccgtgggcagtgggtttcggtcttatgggggttggtggttattggagttgggacagttttcaggt

SEQ ID NO: 46158 - DNA, 2700 bp, Homo sapiens
ttcatgttttaagtcttttaatttctaattttaaatatagaaattttctattttaaacataaacaaattcttttctatttctaaatagttttactatgtgtcagtctggtaatcttgctatatgtcattataatacctggttcatgagaaagtatcactaatatcatcatccttgtcatcttcattaatcctcttcctcttcttcctcctcctcattttcagacagttcatgctcactgccgaatccttcatctctctatccagttcatacatgaaatctggatccgaactgtttgctaagagatctgtgctcatcagagtttgttccgaaaaggtgtggcttcgaaaggcatccccgaaaggcggatccattccgcttacactaggctacaacagagtgatttttattttagaaagttaaagactactttgagaccaatttatcacatatgagccccaaccccacccccactaagtaacttattcttttcagaaaacatttctatactttttttctactgtatagtatatttaagagctttggctaacactgaactgtagacttatattaggaaaatacctaaaaatagaaaaaatagagtgctgccaatgccccagtggagaagctgaggtcatcatcagatttgaaatatttaaagtggatacaaaactatttcagcaatgcagacaattaagtgtgttgttgtgggcgatggtgctgttggtaaaacatgtctcctgatatcctacacaacaaacaaatttccatcggaatatgtaccgactgtttttgacaactatgcagtcacagttatgattggtggagaaccatatactcttggactttttgatactgcagggcaagaggattatgacagattacgaccgctgagttatccacaaacagatgtatttctagtctgtttttcagtggtctctccatcttcatttgaaaacgtgaaagaaaagtgggtgcctgagataactcaccactgtcccaaagactcctttcttgcttgttgggactcaaattgatctcagagatgacccctctactattgagaaactttgccaagaacaaacagaagcctatcactccagagactgctgaaaagctggcccgtgaccctgaaggctgtcaagtatgtggagtgttctgcacttacacagaaaggcctaaagaatgtatttgacgaagcaatattggctgccctggagcctccagaaccgaagaagagccgcaggtgtgtgctgctatgaacatctctccagagccctttctgcacagctggtgtcggcatcatactaaaagcaatgtttaaatcaaactaaagattaaaaattaaaattcgtttttgcaataatgacaaatgccctgcacctacccacatgcactcgtgtgagacaaggcccataggtatggccccccccttcccccccccagtactagttaattttgagtaattgtattgtcagaaaagtgattagtactatttttttttgttgtttcaaaaaaaaaatttttgtgtgtctgtttttttttttttttttttttgttgtttaaaagcaaggcatgcttgtcggatgactctgtaacagactaattggaattgttgaagctgctccctggttccactctggagagtaatctgggacatcttagtgttttgttttgttttttttccctcctcttttttttgggggggagtgtgtgtggggtttgttttttagtcttgtttttttaattcattaaccagtggttagcccttaaggggaggaggacggattgattccacattccacttcctagatctagtttagaaaacatgttccccatctggtgctcttaggaaggagtatagtaaatgcctcatttaataacatactcctttttgaaagttgccttttctctccacccttgagtagatccagtatttgatgaaactcatgaaagtgggtggagcccatcttgcccctcctcttttctaggacgcactatatgtgactgtgactttcaaggacatttgtttgccatttgctgatttttttgggaagttaatttctaacttctttcactgataaatgaagaaaagtattgcacctttgaaatgcaccaaatgaattgagtttgtaattaaaaaaatttttttccctttcagtcattgtcttatatgcttagcatagatttgcagctcagtagtatatggtgttcctagaatgcagctgaagacctgttatgtagaggaaatacgaggggtggtgctagaagacagacatctgtggaatgattcacatcctctcaagttaggaggatggaggcctgccttcattaagaagctgggggtagggtgggggtggggagaacacttaacaacatggggaccagtcaggggaatccccttatttctgttttgcatatgaggaaccctagagcagccaggtgaggctctctagtttaataaaaatcatggaaagactcttaatgcagactcttcttaagtgttaatagggattttttcagcttattttggttgcagtttccaatttttaaaaatgttgaggtaatctttcccaccttcccaaacctaattcttgtagatgcattagtgttgaaccaatgctttctcatgtctcaattctttgtatatgcattcttttcagatgtattaaacaaacaaaaacccttcaaaaaaaaaaaaa

SEQ ID NO: 46159 - DNA, 771 bp, Homo sapiens
ccctcctcctcgcgctgtttccgcctcttgccttcggacgccggattttgacgtgctctcgcgagatttgggtctcttcctaagccggcgctcggcaagttctcccaggagaaagccatgttcagttcgagcgccaagatcgtgaagcccaatggcgagaagccggacgagttcgagtccggcatctcccaggctcttctggagctggagatgaactcggacctcaaggctcagctcagggagctgaatattacggcagctaaggaaattgaagttggtggtggtcggaaagctatcataatctttgttcccgttcctcaactgaaatcttttccagaaaatccaagtccggcttagtacgcggaattggagaaaaaagttcaagtgggaaagcatgtccgtcttttatcggctcagagggagaattctgccttaagccaacttcgaaaaagcccgtacaaaaaaataagcaaaagcgtccccagggagcccgtactctgacagctgtgcacgatgcccatccttgaggacttggtcttccccaagcgaaattgtgggcaagagaatcccgcgtcaaactagatggcagccggctcataaaggttcatttggacaaagcacagcagaacaatgtggaacacaaggttgaaactttttctggtgtctataagaagctcacgggcaaggatgttaattttgaattcccagagtttcaattgtaaacaaaaatgactaaataaaaagtatatattcacagtaaaaaaaagtcga

SEQ ID NO: 46160 - DNA, 1085 bp, Homo sapiens
  misc_feature (1)...(1085): n = a,t,c or g
tttttttttttggatgaatatacttcctttatcgagggtgacaaaccaaaacaaaaaaagaccaaacatgtaaaaacccagggttctagaaatacaaactcaattcattcaaattcaagctcatccagaccctggtcacaaaccctagtgaggtgcatgtgagcaccaagtcagggagagggggcaggagtgactctgaggccaacagagagggtgggaaggggatctccctaggtcccctggtgatcaccccccacccaaactggtatctccacattctcaatgactatgaagacataccaggctctgtccttttggcccccaccccatccctggccagagcttcaaaggccagtcccaaaaggttctaccctcacttgctcaggcttctagccttcctcttctcctccttcttcacatttttctctgtgattagtagcaggttagggtactgtataagccgcagtgaggctgggggccaagggggtggggtagagatgggatgaagagaggagaagagctgtccaaggacccctctcttcatgggatcccaaactgtacaaccagctcctcttttgcgtccacacggatctgagaaagtgcactgtaggcataagcagctatcctggagacctgctgcaaatcagagaacgggatgggctcactggccagcacttggtggggctggctggtaagagacggcagcggtggcagcttcttccaatgggtcaaggctgctgctcagcacagccaagcgggtgcttgtactgcctggcacggtccatgtactcatgctgctccatgccctgtgagtctgcagcagacacatcaatgatgttgctggctgtcttggcaaggatggaagagagcagggcctgctcatcagtgcgagcggaaggcaggctgtggtagttgggctcggctccattgagagctttggtaggggggctgctagggtccagcagcagcttccgctcctctcggtcctggtccgagtcctcgttctcgctgctgtagcagcaccccatggccggggtcgggcncggggcttcaggccgcgccgaggagggacggcgtccgtgagg

SEQ ID NO: 46161 - DNA, 4588 bp, Homo sapiens
gggcggggcgatcggcggagctcccacctccgcttacagctcgctgccgccgtcctgccccgcgcccccaggagacctggaccagaccacgatgtggaaacgctggctcgcgctcgcgctcgcgctggtggcggtcgcctgggtccgcgccgaggaagagctaaggagcaaatccaagatctgtgccaatgtgttttgtggagccggccgggaatgtgcagtcacagagaaaggggaacccacctgtctctgcattgagcaatgcaaacctcacaagaggcctgtgtgtggcagtaatggcaagacctacctcaaccactgtgaactgcatcgagatgcctgcctcactggatccaaaatccaggttgattacgatggacactgcaaagagaagaaatccgtaagtccatctgccagcccagttgtttgctatcagtccaaccgtgatgagctccgacgtcgcatcatccagtggctggaagctgagatcattccagatggctggttctctaaaggcagcaactacagtgaaatcctagacaagtattttaagaactttgataatggtgattctcgcctggactccagtgaattcctgaagtttgtggaacagaatgaaactgccatcaatattacaacgtatccagaccaggagaacaacaagttgcttaggggactctgtgttgatgctctcattgaactgtctgatgaaaatgctgattggaaactcagcttccaagagtttctcaagtgcctcaacccatctttcaaccctcctgagaagaagtgtgccctggaggatgaaacgtatgcagatggagctgagaccgaggtggactgtaaccgctgtgtctgtgcctgtggaaattgggtctgtacagccatgacctgtgacggaaagaatcagaagggggcccagacccagacagaggaggagatgaccagatatgtccaggagctccaaaagcatcaggaaacagctgaaaagaccaagagagtgagcaccaaagagatctaatgaggaggcacagaccagtgtctggatcccagcatcttctccacttcagcgctgagttcagtatacacaagtgtctgctacagtcgccaaatcaccagtatttgcttatatagcaatgagttttattttgtttatttgttttgcaataaaggatatgaaggtggctggctaggaagggaagggccacagccttcatttctaggagtgctttaagagaaactgtaaatggtgctctggggctggaggctagtaaggaaactgcatcacgattgaaagaggaacagacccaaaatctgaacctcttttgagtttactgcatctgtcagcaggctgcagggagtgcacacgatgccagagagaacttagcagggtgtccccggaggagaggtttgggaagctccacggagaggaacgctctctgcttccagcctctttccattgccgtcagcatgacagacctccagcatccacgcatctcttggtcccaataactgcctctagatacatagccatcctgctagttaacccagtgtccctcagacttggatggagtttctgggagggtacacccaaatgatgcagatacttgtatactttgagccccttagcgacctaaccaaattttaaaaatactttttaccaaaggtgctatttctctgtaaaacacttttttttggcaagttgactttattcttcaattattatcattatattattgttttttaatattttattttcttgactaggtattaagcttttgtaattatttttcagtagtcccaccacttcataggtggaaggagtttggggttcttcctggtgcaggggctgaaataacccagatgcccccaccctgccacatactagatgcagcccatagttggcccccctagcttccagcagtccactatctgccagaggagcaagggtgccttagaccgaagccaggggaagaagcatcttcataaaaaactttcaagatccaaacattaatttgtttttatttattctgagaagttgaggcaaatcagtattcccaagggatgggcgacaagggcagcccaagcagggcttagggatatcccagcctaccaatatgctcattcgactaactaggagggtgagttggccctgtctcttcttttttctggacctcagtttcctcagtgagctggtaagaatgcactaaccttttgatttgataagttataaattctgtggttctgatcattggtccagaggggagataggttcctgtgatttttccttcttctctatagaataaatgaaatcttgttactagaacaagaaatgtcagatggccaaaaacaagatgaccagatttgatctcagcctgatgaccctacaggtcgtgctatgatatggagtcctcatgggtaaagcaggaagagagtgggaaagagaaccaccccactctgtcttcatatttgcatttcatgtttaacctccggctggaaatagaaagcattcccttagagatgaggataaaagaaagtttcagattcaacagggggaagaaaatggagatttaatcctaaaactgtgacttggggaggtcagtcatttacagttagtcctgtgtctttcgacttctgtgattattaaccccactcactaccctgtttcagatgcatttggaataccaaagattaaagccttgacataagatctcatttgcagaaagcagattaaagaccatcagaaggaaattatttaggttgtaatggcacaggcaactgtgaggaaactgttgtgccaaaaatagaattccttctagtttttcttgttctcatttgaaaggagaaaattccactttgtttagaatttcaagcttttatgtatccatcccatctaaaaactcttcaaactccacttgttcagtctgaaatgcagctccctgtccaagtgccttgggagaactcacaggcaggcacggccttaatcaaaggttttaccaggcccttgggacactatggggaggagggcaagagtacaccaatttgttaaaagcaagaaaccacagtgtctcttcactagtcatttaggaacatgggttattcatccaagactactctaccctgcaacattgaactcccaagagcaaatccacattcctcttgagttctgcagcttctgtgtaaatagggcagctgtcgtctatgccgtagaatcacatgatctgaggaccattcatggaagctgctaaatagcctagtctgggggagtcttccataaagttttgcatggagcaaacaaacaggattaaactaggtttggttccttcagccctctaaaagcataggggcttagcctgcaggcttccttgggctttctctgtgtgtgtagttttgtaaacactatagcatctgttaaagatcccagtgtccatggaaacattcccacatgccgtgactctggactatatcagtttttggaaagcagggttcctctgcctgctaacaaggtatagacaaggctgagcagggttcctgtggcccaggatggaggccaccgctgccctgccatcccgtctgcctgccatgggacggctcctctgagtgttccctggccccacgtgtgtggtgtttgtgtgtctgtgcctggccaagggaggtgccaacactgggcttgccacagccccaggagaggaatttggggcctaggaaccgagggcacacgggactctagcctcatccccaggacccccttggctcagagtgtggtgctagaaactggtccccagcccagccccagtactgccacctttacacctacccctgcaagtccccagagggctgcccacgatagaagctgccaagcagggagaacctgtgccaactgtggagtggggaggttgggcctggaccctcaacccctgcaaccttccctagccccctcaatagatgagcaggtcaggctgtggcccttacctcacccgcagttctcgcccagtgctgcagccggctcacctctctccgcttcttgcacatcactggcctgtgtgtgctgcttgctcctgttctgttcgcttgctcccgttccgttcggcttttgctttgcgttagggtgaagaccctagcgtccagctcccctcaacgctatattttgacactaaaaaagaaggtttctaaattgtaggagcaggatggaaatactttgctgcccttgccatctttttaggatgggcccccaggagactgaggtcttcctgggccctcattgctgcttatcgtaccccccatcacctgcacatgggacagaccgggctggagggtgaccttggctgtgtacgtcccagcaaaagagctctggcccgcatctcgctgtgccctgaagggggatgaagggcgatgcctcgcccgaggctttgggctgctgcactgcatgctgggactgctcctactctctgtcccacccctcacccagctgtggtccggctttgggagagtggtgaattgcgctgcccgaactcggagcggagcagggtagggaccgtgtacagcttgataacccttaataaaaagggagtttgaccagaaaaaaaaaaaa

SEQ ID NO: 46162 - DNA, 522 bp, Homo sapiens
gggagctactggtaggagatagcatagccaacagcacagatttgttcgatgagatagtgacagccaccaccacagaatctggtgacctggagcttgtgcattccacccctggggctaacgtcctggagctgctgcccatagtcatgggtcaggaggagggcagtgtggtggtggagcgagccgttcagaccgacgtggtgccctacagcccagccatctcagagctcattcaagagtgtgctgcaaaagctccaaggacccctgtccctcgaagcttggcgtcccctgatgagtctgaaccagactccgatggagagcttcccagagtccctctctgccttagtggttgatttaactccaagaaatccaaactcagccatccttttgtctcccgtggagaacccctacgccaatgtggatgcagaagttcatgcaaaccggctcatgagagagctggatttttgcagcctgcgtggaagagaggttggatggtgtcatccaattggtcgcggggggtcctta

SEQ ID NO: 46163 - DNA, 819 bp, Homo sapiens
atcaatgttataataatgaaccatggttttgcaaggtattagtgttgggaaaactgagtaaagtgcactgtattattccttaaactacgtgattattacagtcttctcaaaattaaaagtttgatttatttaaaaagtgctaacacttggccgggtgcggtggctgacgcctgtaatagcagcacttcggaaggccgaggcgggcggatcactaggtcaggagattgagaccatcttttgtctttccgtggagctgtcgccatgaaggtcgagctgtgcagttttagcgggtacaagatctaccccggacacgggaggcgctacgccaggacccgacgggaaggttttccagtttcttaatgcgaaatgcgagtcggctttcctttccaagaggaatcctcggccagataaactggactgtcctctacagaaggaagcacaaaaagggacagtccggaagaaattcaaaagaaaagaaccccgcccgagcaagtcaaattccagagggcccattacttggtgcatctcttgcctgatataatggcccaagaggaatcagaaaccctgaagttagaaaggctcaacgagaacaagctatcagggctgctaaggaagcaaaaaaaggctaagcaagcatctaaaaagactgcaatggctgctgctaaggcacctacaaaggcagcacctaagcaaaagattgtgaagcctgtgaaagtttcagctccccgagttggtggaaaacgctaaactggcagattagatttttaaataaagattggattataactctaggtaaaaaaaaaaaaaaaaaagtcgacg

SEQ ID NO: 46164 - DNA, 1930 bp, Homo sapiens
tttttttttttttttttgacttttaaaaaattatttaatttagtagttttttttttttggaaaaaaatcaataaggcaaaaaaactgaaaatatatatagttgtgttttgttttcatgtgactttattccacctgaaagattctaaacttcttccattagcgggaatctgattgggatcagccagaaatgtagtgcagatgggtgaaggaagagaaggggataaagcagagaagtccaatttagttggggaattctcactctatccaaagccccggatgaggtcactgcttttatgagcctccttgaaagaagccttgacataatccctggcttattttgggaataaggttcttaggaggaaattccccagcagtcaaagtcactcctctcccatgtttatcacaactaggaaggaagggataggggaagaaataaaagtattaatttacccagtaaaaccaatttccccatagggatggcttcctttggaatggtatttcccccaggacccacgctggctgaggctcagcagttaaggaacaaaaacaaaaaatactaacaaaaagcatacaaggaaggcacctcaatttgtgatcctcaaccaagggtgggttgcacaggggatatttctcaacaagacaacaaaaacaaatactgcacaaacagagaaggaagccagggccccacaggagcaattatctgatccaccccacatgacggtgctttaagccccacatcctaggaagaaagttcttttggaattcaggcctatgcgccggacagagcagaattaaattggaagttgccctccggactttctacccacactcttcctgaaaagagaaagaaaagaggcaggaaagaggttaggatttcattttcaagagtcagctaattaggagagcagagtttagacagcagtaggcaccccatgatacaaaccatggacaaagtccctgtttagtaactgccagacatgatcctgctcaggttttgaaatctctctgcccataaaagatggagagcaggagtgccatccacatcaacacgtgtccaagaaagagtctcagggagacaagggtatcaaaaaacaagattcttaatgggaaggaaatcaaaccaaaaaattagatttttctctacatatatataatatacagatatttaacacattattccagaggtggctccagtccttggggcttgagagatggtgaaaacttttgttccacattaacttctgctctcaaattctgaagtatatcagaatgggacaggcaatgttttgctccacactggggcacagacccaaaatggtactgtgccagaagaagagaagccagaaagacaatgaaggatggcattaaggggggttgggaaagcaaaagtggctagtagtctttttccatcctgcctgtgttctcagaagctctccgcctgaggaagtccataaaacccctttgtgaggagaatgcacccccttaccaatgaccaaagtggtctccagttgctattaaagatgatggagaacaacagaggggtgtttgatgcaagtaaaaacagaaacttccaagaatgtaactctgaatattccagccctatagaacaatctctctcacaggtgttccaatatcgcagttatctccgcgtggacactcccattaaaccgacccgcgcgtgtgaacacacttgatgatgttatacctaagctccactgcaaccattcacaatgcctccattggtaagtcttatgtgtttctttttaagggaacttctaaattcggctcttgcttttaacagcaccaaaatgcccctgaatcataatcttagccagatcttggctgagcaggatactacaaggggagggtgagtgacattgtcttaaatgggggcagagggagaaagaagagccaagaatacttgtcgacc

SEQ ID NO: 46165 - DNA, 793 bp, Homo sapiens
cagctatgacatgattacgaatttaatacgactcactatagggaatttggccctcgaggccaagaattcggcacgagccaggtgggaggttagtgtggcccgggcgtccgctcctcagcggatgtggcagccccgagccatggctctcgccgtccgagtcgtttattgtggcgcttgaggctacaagtccaagtatcttcagctcaagaagaagttagaagatgagttccccggccgcctggacatcgtgagtcttgggatggggagaaagacttgagcacagccactgtgtcggtccgttaggcctggatggcactgcaggggggttagtgcggcgagggaactccccaggccaccgggttctttgaagtgatggtagccgggaagttgattcactctaagaagaaaggcgatggctacgtggacacagaaagcaagtttctgaagttggtggccgccatcaaagccgccttggctcagggctaatgcgccctgaaggcagagattgacgcccccggtctttgcctctgagcgggagagtctgtgtgtatgtgtcttccccggaatccacaccaccccaccctcctcctgtcccgtggtttcatcatatctctttgcataccccatgtcttccccagttgtcccctggagtttggggggacatcccccctcaggcatccttctcaaggggaagccaagagaggcatcaggatgggtgggtttctgattgtggcaacgtttgcaaccgttcacgattcaataaatattggatgaatttaaccgaaaaaaaaaa

SEQ ID NO: 46166 - DNA, 1932 bp, Homo sapiens
tttgtcgtgctcctggcgttggtggcgggtgttttggggaacgagtttagtatattaaaatcaccagggtctgttgttttccgaaatggaaattggcctataccaggagagcggatcccagacgtggctgcattgtccatgggcttctctgtgaaagaagacctttcttggccaggactcgcagtgggtaacctgtttcatcgtcctcgggctaccgtcatggtgatggtgaagggagtgaacaaactggctctacccccaggcagtgtcatttcgtaccctttggagaatgcagttccttttagtcttgacagtgttgcaaattccattcactccttattttctgaggaaactcctgttgttttgcagttggctcccagtgaggaaagagtgtatatggtagggaaggcaaactcagtgtttgaagacctttcagtcaccttgcgccagctccgtaatcgcctgtttcaagaaaactctgttctcagttcactccccctcaattctctgagtaggaacaatgaagttgacctgctctttctttctgaactgcaagtgctacatgatatttcaagcttgctgtctcgtcataagcatctagccaaggatcattctcctgatttatattcactggagctggcaggtttggatgaaattgggaagcgttatggggaagactctgaacaattcagagatgcttctaagatccttgttgacgctctgcaaaagtttgcagatgacatgtacagtctttatggtgggaatgcagtggtagagttagtcactgtcaagtcatttgacacctccctccattaggaagacaaggactatccttgaggcaaaacaagcgaagaacccagcaagtccctataaccttgcatataagtataattttgaatattccgtggttttcaacatggtactttggataatgatcgccttggccttggctgtgattatcacctcttacaatatttggaacatggatcctggatatgatagcatcatttataggatgacaaaccagaagattcgaatggattgaatgttacctgtgccagaattagaaaagggggttggaaattggctgttttgttaaaatatatcttttagtgtgctttaaagtagatagtatactttacatttataaaaaaaaatcaaattttgttctttattttgtgtgtgcctgtgatgtttttctagagtgaattatagtattgacgtgaatcccactgtggtatagattccataatatgcttgaatattatgatatagccatttaataacattgatttcattctgtttaatgaatttggaaatatgcactgaaagaaatgtaaaacatttagaatagctcgtgttatggaaaaaagtgcactgaatttattagacaaacttacgaatgcttaacttctttacacagcataggtgaaaatcatatttgggctattgtatactatgaacaatttgtaaatgtcttaatttgatgtaaataactctgaaacaagagaaaaggtttttaacttagagtagccctaaaatatggatgtgcttatataatcgcttagttttggaactgtatctgagtaacagaggacagctgttttttaaccctcttctgcaagtttgttgacctacatgggctaatatggatactaaaaatactacattgatctaagaagaaactagccttgtggagtatatagatgcttttcattatacacacaaaaatccctgagggacattttgaggcatgaatataaaacatttttatttcagtaacttttccccctgtgtaagttactatggtttgtggtacaacttcattctatagaatattaagtggaagtgggtgaattctactttttatgttggagtggaccaatgtctatcaagagtgacaaataaagttaatgatgattccaaaaaaaa

SEQ ID NO: 46167 - DNA, 1578 bp, Homo sapiens
atccttaccaaggtttttttggaaaggtacgaatcttaactttttccccttctgtgtctcagggtaatactattcagagtcgcccctttgctcattttctcccgtatttgttaccttcctgaggcctcagtattagtcgtgagcacaaagttttgagacctttggcgttgtttcttgatgtgggaggggaggtgttagtgcatgcaagggttgaactagatagaccctgccttagtagagggtgggactataaccttagaggccagaacttgatccagaagttgctgtccacagaagtgctttctatttcatcatttttgtttctagggctctttttctgtagccaggtcttcccaaggattttagtatttgcattggagttgaggtttactctaatgatggtggcccagctgtgcccagaggacagccaggcaggccctgggagggagtttagaaagacagtcctggtgaatgggcttcaagtggtcacaaagagggtggctgtgaggtgaccccagacactgcagaacgaggtgcaccctctgcgttttggatgtccttggaatgtgggagcctagaaataaccctgtggatggaattggggcagcggctgctggagatctgtgcgccttgccttccttcagcaggaccgtctaggtgcgcagccacctatggatgcgtcccagccagccccgtcgctctcgtccatcctcagagacaaagaagagggcagggagtttgggcttggttttgaactttcctttcaatgtagcaaagcattcctagttaaccagagccttggaatctactgcctgctggccaggctttaaaatgaaaagtgttttaatgctgccataaaagggaggcgggggggaggaagggaaaataaaggcatctttccaagtactcatctaatttaattgtcaaaagattgataggccatgaattacttctccatctcactaagggttaaaggcgtgcaaccccccactggctgtgtcccctgccaccgaagtgagtgacctgccctacaaccaggtgggaccacctgtgctgcagtccggaggggcttctgcaggaagcactcaccccccacaccttccccggcctgagcttcccctacctttcgtcaccacctgagggcatgagcacaggccatggggcgtgcctggtgagtctgcctgtggttcaggcttagcctgtggtctcctgtgtgctgctgcccgcatgggatgcgcaggggaggcgtggggatccgcaggagggtggttgggatacaccggatacctctgctctcattgcttgtttccaaatgctctatggacatttgtgtgctaaatcctattaaataaaaaagacgggttaaaacccagatgctgtatattcatttgtaattatgtataaagtgaagcagttttaaactgtaaagatttttttcagtgtgttttctcgaattttgccacaacatactggcttcgtattttatttatctttctttctagttaccagcttcagacccttgtaaagtctccctcagccctttcaaaaaataataaatttcctgtgaagttaaaaaaa

SEQ ID NO: 46168 - DNA, 1578 bp, Homo sapiens
  misc_feature (1)...(1578): n = a,t,c or g
tttttttttttccataataacaaaagtcagtttattaaatgctcaattctcaaaattatatgtatatatttttaattatttaaaaaaacttccatgcccttccattcccctccctccaaactaggtattgtccaagttgtatcaaatgccacaaagtctaccatgcacccagaagcagagaagacaggaggtccagaggacaaggtatgctggggtcactactcgcactgcagagtccacgcgagttaactcatgctgggggcaaagaatggaaagagctaatacacagacaaagcaaaagaacgaaatgcgcagcttgaccagagacgtttacaatttataccaacttacaaatatttagggtgcccaccaactccgagagaacagaccaaactaaccacatgaaggaagacctctgccggggcctcctctccctacaacctcctctcaagaatcattaggaagcccaaacagcttcacagttccggcttcccggctgctgtcatatttgccgtctttgtcatcacaggcaaatgccagcagaggccttttggggtgcccacgccactgtgaaggtcggagactcacactgtacctcccatagtttgtcccctgtctccacttcagcaatgtcaataaaatgatcttccgatgctgacgccagcattttcccatcatggctgaaactgagggttcttacaggccaatccagcctggaaaagcaccgaacacacactaactcatccacatcccagaggctgaccaaagcatctgcacttcctgtggcaaagtacttccccatggggtcaaacttgatacagatgcagttggaaggatgggcgttgatggactgcacaggcttcagttctgggtagctgaggatgttgatacaaccattgccatttgtcaggaagaacatattattgtcattgttccaggagatttcgttgacctcgaacttgaactgctcttctgctttggaacggtgtgtcttggcatcaataaaggtcaccacatcatccttgttgcctacagcaatggtctgcccatcaggactccagcagatattaatgttctcccctttagtgttcacagtggcaatgcattttgtagtcctcacatcccagatgcgaatggttttatctccagacgccgtaacaaataggtcaggattacttggatgccaacaaagctggtccacactatccccatgtccccggataattgttttctttgaccaaccggtccttctccagcaagaagacgctggccgtcttgtcgaaggaccccgaggctaggcgacgcccgtcgcaacttccaggccaccgagtgcacccttntgcgctgtgcgccaggaactcgcgcgtcttgctgtggccccggaacagctcctgcatcccaagcacgtagcgcgacgggccgctgctcactgagcaccacggggccatcgagccggggccgctctggcccaacgccgagggccccatggctgcacggggaccgccatgccgagctccccagcttccaactcacaacactgcagcagctccacggcgcagtcagtcctggcgccgctgc

SEQ ID NO: 46169 - DNA, 11042 bp, Homo sapiens
  misc_feature (1)...(11042): n = a,t,c or g
gattcaaaagattcacttgtttaggccttagcgggcttagacaccagtctctgacacattcttaaaggtcaggctctacaaatggaacccaaccagactctcagatatggccaaagatctatacacacccatctcacagatcccctatcttaaagagaccctaatttgggttcacctcagtctctataatctgtaccagcataccaataaaaatctttctcacccatccttagattgagagaagtcacttattattatgtgagtaactggaagatactgataagttgacaaatctttttctttcctttcttattcaacttttattttaacttccaaagaacaagtgcaatatgtgcagctttgttgcgcaggtcaacatgtatctttctggtcttttagccgcctaacactttgagcagatataagccttacacaggattatgaagtctgaaaggattccaccaatattattataattcctatcaacctgataagttaggggaaggtagagctctcctccaataagccagatttccagagtttctgacgtcataatctaccaaggtcatggatcgagttcagagaaaaaacaaaagcaaaaccaaacctaccaaaaaataaaaatcccaaagaaaaaataaagaaaaaaacagcatgaatacttcctgccatgttaagtggccaatatgtcagaaacagcactgagttacagataaagatgtctaaactacagtgacatcccagctgtcacagtgtgtggactattagtcaataaaacagtccctgcctcttaagagttgttttccatgcaaatacatgtcttatgtcttagaataagattccctaagaagtgaacctagcatttatacaagataattaattctaatccatagtatctggtaaagagcattctaccatcatctttaccgagcatagaagagctacaccaaaaccctgggtcatcagccagcacatacacttatccagtgataaatacacatcatcgggtgcctacatacatacctgaatataaaaaaaatacttttgctgagatgaaacaggcgtgatttatttcaaataggtacggataagtagatattgaagtaaggattcagtcttatattatattacataacattaatctattcctgcactgaaactgttgctttataggatttttcactacactaatgagaacttaagagataatggcctaaaaccacagagagtatattcaaagataagtatagcacttcttatttggaaaccaatgcttactaaatgagactaagacgtgtcccatcaaaaatcctggacctatgcctaaaacacatttcacaatccctgaacttttcaaaaattggtacatgctttaactttaaactacaggcctcactggagctacagacaagaaggtgaaaaacggctgacaaaagaagtcctggtatcttctatggtgggagaagaaaactagctaaagggaagaataaattagagaaaaattggaatgactgaatcggaacaaggcaaaggctataaaaaaaattaagcagcagtatcctcttgggggccccttccccacactatctcaatgcaaatatctgtctgaaacggttcctggctaaactccacccatgggttggccagccttgccttgaccaatagccttgacaaggcaaacttgaccaatagtcttagagtatccagtgaggccaggggccggcggctggctagggatgaagaataaaaggaagcacccttcagcagttccacacactcgcttctggaacgtctgaggttatcaataagctcctagtccagacgccatgggtcatttcacagaggaggacaaggctactatcacaagcctgtggggcaaggtgaatgtggaagatgctggaggagaaaccctgggaaggtaggctctggtgaccaggacaagggagggaaggaaggaccctgtgcctggcaaaagtccaggtcgcttctcaggatttgtggcaccttctgactgtcaaactgttcttgtcaatctcacaggctcctggttgtctacccatggacccagaggttctttgacagctttggcaacctgtcctctgcctctgccatcatgggcaaccccaaagtcaaggcacatggcaagaaggtgctgacttccttgggagatgccataaagcacctggatgatctcaagggcacctttgcccagctgagtgaactgcactgtgacaagctgcatgtggatcctgagaacttcaaggtgagtccaggagatgtttcagcactgttgcctttagtctcgaggcaacttagacaactgagtattgatctgagcacagcagggtgtgagctgtttgaagatactggggttgggagtgaagaaactgcagaggactaactgggctgagacccagtggcaatgttttagggcctaaggagtgcctctgaaaatctagatggacaactttgactttgagaaaagagaggtggaaatgaggaaaatgacttttctttattagatttcggtagaaagaactttcacctttcccctatttttgttattcgttttaaaacatctatctggaggcaggacaagtatggtcgttaaaaagatgcaggcagaaggcatatattggctcagtcaaagtggggaactttggtggccaaacatacattgctaaggctattcctatatcagctggacacatataaaatgctgctaatgcttcattacaaacttatatcctttaattccagatgggggcaaagtatgtccaggggtgaggaacaattgaaacatttgggctggagtagattttgaaagtcagctctctgtgtgtgtgtgtgtgtgagtgtgcgcgtgtgtttgtgtgtgtgtgagagcgtgtgtttcttttaacgttttcagcctacagcatacagggttcatggtggcaagaagataacaagatttaaattatggccagtgactagtgctgcaagaagaacaactacctgcatttaatgggaaagcaaaatctcaggctttgagggaagttaacataggcttgattctgggtggaagcttggtgtgtagttatctggaggccaggctggagctctcagctcactatgggttcatctttattgtctcctttcatctcaacagctcctgggaaatgtgctggtgaccgttttggcaatccatttcggcaaagaattcacccctgaggtgcaggcttcctggcagaagatggtgactgcagtggccagtgccctgtcctccagataccactgagctcactgcccatgatgcagagctttcaaggataggctttattctgcaagcaatacaaataataaatctattctgctaagagatcacacatggttgtcttcagttcttttttttatgtctttttaaatatatgagccacaaagggttttatgttgagggatgtgtttatgtgtatttatacatggctatgtgtgtttgtgtcatgtgcacactccacacttttttgtttacgttagatgtgggttttgatgagcaaataaaagaactaggcaataaagaaacttgtacatgggagcgtctgcaagtgggagtaaaaggtgcaggagaaatctggttggaagaaagacctctataggacaggactcctcagaaacagatgttttggaagagatggggaaaggttcagtgaagggggctgaacccccttccctggattgcagcacagcagcgaggaaggggctcaacgaagaaaaagtgttccaagctttaggaagtcaaggtttaggcagggatagccattctattttattaggggcaatactatttccaacggcatctggcttttctcagcccttgtgaggctctacggggaggttgaggtgttagagatcagagcaggaaacaggtttttctttccacggtaactacaatgaagtgatccttactttactaaggaacttttcattttaagtgttgacgcatgcctaaagaggtgaaattaatcccatacccttaagtctacagactggtcacagcatttcaaggaggagacctcattgtaagcttctagggaggtggggacttaggtgaaggaaatgagccagcagaagctcacaagtcagcatcagcgtgtcatgtctcagcagcagaacagcacggtcagatgaaaatatagtgtgaagaatttgtataacattaattgagaaggcagattcactggagttcttatataattgaaagttaatgcacgttaataagcaagagtttagtttaatgtgatggtgttatgaacttaacgcttgtgtctccagaaaattcacatgctgaatccccaactcccaattggctccatttgtgggggaggctttggaaaagtaatcaggtttagaggagctcatgagagcagatccccatcatagaattattttcctcatcagaagcagagagattagccatttctcttccttctggtgaggacacagtgggaagtcagccacctgcaacccaggaagagagccctgaccaggaaccagcagaaaagtgagaaaaaatcnnnnnnnnnnnnnnnnnnnnnnnnnnnnnnnnnnnnnnnnnnccttgcactaagtaaggcagatgaagaaagagaaaaaaataagcttcggtgttcagtggattagaaaccatgtttatctcaggtttacaaatctccacttgtcctctgtgtttcagaataaaataccaactctactactctcatctgtaagatgcaaatagtaagcctgatcccttctgtctaactttgaattctattttttcttcaacgtactttaggcttgtaatgtgtttatatacagtgaaatgtcaagttctttctttatatttctttctttcttttttttcctcagcctcagagttttccacatgcccttcctactttcaggaacttctttctccaaacgtcttctgcctggcctccatcaaatcataaaggacccacttcaaatgccatcactcactaccatttcacaattcgcactttctttctttgtcctttttttttttagtaaaacaagtttataaaaaattgannnnnnnnnnnnnnnnnnnnnnnnnnnnnnnnnnnnnnnnnnnnnnnnnnnnnnnnnnnnnnnnnnnnnnnnnnnnnnnnnnnnnnnnnnnnnnnnnnnnnnnnnnnnnnnnnnnnnnnnnnnnnnnnnnnaaagataacttcctgatgttgccatggcattttttttccttttaattttatttcannnnnnnnnnnnnnnnnnnnnnnnnnnnnnnnnnnnnnnnnnnnnnnnnnnnnnnnnnnnnnnntctttctggccttttagccatctgtatcaatgagcagatataagctttacacaggatcatgaaggatgaaagaatttcaccaatattataataatttcaatcaacctgatagcttaggggataaactaatttgaagatacagcttgcctccgataagccagaattccagagcttctggcattataatctagcaaggttagagatcatggatcactttcagagaaaaacaaaaacaaactaaccaaaagcaaaacagaaccaaaaaaccaccataaatacttcctaccctgttaatggtccaatatgtcagaaacagcactgtgttagaaataaagctgtctaaagtacactaatattcgagttataatagtgtgtggactattagtcaataaaaacaacccttgcctctttagagttgttttccatgtacacgcacatcttatgtcttagagtaagattccctgagaagtgaacctagcatttatacaagataattaattctaatccacagtacctgccaaagaacattctaccatcatctttactgagcatagaagagctacgccaaaaccctgggtcatcagccagcacacacacttatccagtggtaaatacacatcatctggtgtatacatacatacctgaatatggaatcaaatatttttctaagatgaaacagtcatgatttatttcaaataggtacggataagtagatattgaggtaagcattaggtcttatattatgtaacactaatctattactgcgctgaaactgtggctttatagaaattgttttcactacactattgagaaattaagagataatggcaaaagtcacaaagagtatattcaaaaagaagtatagcactttttccttagaaaccactgctaactgaaagagactaagatttgtcccgtcaaaaatcctggacctatgcctaaaacacatttcacaatccctgaacttttcaaaaattggtacatgctttagctttaaactacaggcctcactggagctacagacaagaaggtaaaaaacggctgacaaaagaagtcctggtatcctctatgatgggagaaggaaactagctaaagggaagaataaattagagaaaaactggaatgactgaatcggaacaaggcaaaggctataaaaaaaattaagcagcagtatcctcttgggggccccttccccacactatctcaatgcaaatatctgtctgaaacggtccctggctaaactccacccatgggttggccagccttgccttgaccaatagccttgacaaggcaaacttgaccaatagtcttagagtatccagtgaggccaggggccggcggctggctagggatgaagaataaaaggaagcacccttcagcagttccacacactcgcttctggaacgtctgaggttatcaataagctcctagtccagacgccatgggtcatttcacagaggaggacaaggctactatcacaagcctgtggggcaaggtgaatgtggaagatgctggaggagaaaccctgggaaggtaggctctggtgaccaggacaagggagggaaggaaggaccctgtgcctggcaaaagtccaggtcgcttctcaggatttgtggcaccttctgactgtcaaactgttcttgtcaatctcacaggctcctggttgtctacccatggacccagaggttctttgacagctttggcaacctgtcctctgcctctgccatcatgggcaaccccaaagtcaaggcacatggcaagaaggtgctgacttccttgggagatgccataaagcacctggatgatctcaagggcacctttgcccagctgagtgaactgcactgtgacaagctgcatgtggatcctgagaacttcaaggtgagtccaggagatgtttcagcactgttgcctttagtctcgaggcaacttagacaactgagtattgatctgagcacagcagggtgtgagctgtttgaagatactggggttgggagtgaagaaactgcagaggactaactgggctgagacccagtggcaatgttttagggcctaaggagtgcctctgaaaatctagatggacaactttgactttgagaaaagagaggtggaaatgaggaaaatgacttttctttattagatttcggtagaaagaactttcacctttcccctatttttgttattcgttttaaaacatctatctggaggcaggacaagtatggtcgttaaaaagatgcaggcagaaggcatatattggctcagtcaaagtggggaactttggtggccaaacatacattgctaaggctattcctatatcagctggacacatataaaatgctgctaatgcttcattacaaacttatatcctttaattccagatgggggcaaagtatgtccaggggtgaggaacaattgaaacatttgggctggagtagattttgaaagtcagctnnnnnnnnnnnnnnnnnnnnnnnnnnnnnnnnnnnnnnnnnnnnnnnnnnnnnnnnttcttttaacgtcttcagcctacaacatacagggttcatggtggcaagaagatagcaagatttaaattatggccagtgactagtgcttgaaggggaacaactacctgcatttaatgggaaggcaaaatctcaggctttgagggaagttaacataggcttgattctgggtggaagcttggtgtgtagttatctggaggccaggctggagctctcagctcactatgggttcatctttattgtctcctttcatctcaacagctcctgggaaatgtgctggtgaccgttttggcaatccatttcggcaaagaattcacccctgaggtgcaggcttcctggcagaagatggtgactgcagtggccagtgccctgtcctccagataccactgagcctcttgcccatgattcagagctttcaaggataggctttattctgcaagcaatacaaataataaatctattctgctgagagatcacacatgattttcttcagctcttttttttacatctttttaaatatatgagccacaaagggtttatattgagggaagtgtgtatgtgtatttctgcatgcctgtttgtgtttgtggtgtgtgcatgctcctcatttatttttatatgagatgtgcattttgatgagcaaataaaagcagtaaagacacttgtacacgggagttctgcaagtgggagtaaatggtgtaggagaaatccggtgggaagaaagacctctataggacaggacttctcagaaacagatgttttggaagagatgggaaaaggttcagtgaagacctgggggctggattgattgcagctgagtagcaaggatggttcttaatgaagggaaagtgttccaagctttaggaattcaaggtttagtcaggtgtagcaattctattttattaggaggaatactatttctaatggcacttagcttttcacagcccttgtggatgcctaagaaagtgaaattaatcccatgccctcaagtgtgcagattggtcacagcatttcaagggagagacctcattgtaagactctgggggaggtggggacttaggtgtaagaaatgaatcagcagaggctcacaagtcagcatgagcatgttatgtctgagaaacagaccagcactgtgagatcaaaatgtagtgggaagaatttgtacaacattaattggaaggtttacttaatggaatttttgtatagttggatgttagtgcatctctataagtaagagtttaatatgatggtgttacggacctaatgtttgtgtctcctcaaaattcacatgctgaatccccaactcccaactgaccttatctgtgggggaggcttttgaaaagtaattaggtttagctgagctcataagagcagatccccatcataaaattattttccttatcagaagcagagagacaagccatttctctttcctcccggtgaggacacagtgagaagtccgccatctgcaatccaggaagagaaccctgaccacgagtcagccttcagaaatgtgagaaaaaacnnnnnnnnnnnnnnnnnnnnnnnnnnnnnnnnnnnnnnnnnnnccttacactgagtaaggcagatgaagaaggagaaaaaaataagcttgggttttgagtggactacagaccatgtttatctcaggtttgcaaagctcccctcgtcccctatgtttcagtataaaatacctactctactactctcatctataagacccaaataataagcctgcgcccttctctctaactttgatttctcctatttttacttcaacatgctttactctagccttgtaatgtctttacatacagtgaaatgtaaagttctttattctttttttctttctttcttttttctcctcagcctcagaatttggcacatgcccttccttctttcaggaacttctccaacatctctgcctggctccatcatatcataaaggtcccacttcaaatgcagtcactaccgtttcaggatatgcactttctttcttttttgttttttgttttttttaagtcaaagcaaatttcttgagagagtaaagaaataaacgaatgactactgcataggcagagcagccccgagggccgctggttgttccnnnnnnnnnnnnnnnnnnnnnnnnnnnnnnnnnnnnnnnnnnnnnnnnnnnnnnnnnnnnnnnnnnnnnnnnnnnnnaactttctgacattgccatggcatgtttcttttaatttaatttactgttaccnnnnnnnnnnnnnnnnnnnnnnnnnnnnnnnnnnnnnnnnnnnnnnnnnnnnnnnnnnnnnnnntttaatgggtttnnnnnnnnnnnnnnnnnnnnnnnnnnnnnnnnnnnnnnnnnnnnnnnggcctttgtcagaagaatagattggaaaatctttttcccattctgtagattgtctnnnnnnnnnnnnnnnnnnnnnnnnnnnnnnnnnnnnnnnnnnnnnnnnnnnnnnnnnnnnnnnnnnnnnnnnnnnnnnnnnnnnnnngcttttcacgctttcatnnnnnnnnnnnnnnnnnnnnnnnnnnnnnnnnnnnnnnnnnnnnnnnnnnnnnnnnnnnnnnnnnnnnnnnggggtttttcatttaagtctctaatccatctggagttaattttggataaggtataaggaaggagtccagtttcatttttcagcatatggctagccagttctcccccatnnnnnnnnnnnnnnnnnnnnnnnnnnnnnnnnnnnnnnnnnnnnnnnnnnnnnnnnnncagatggttgtaggtacaatatgcagtttcttcaagtcatataataccatctgaaatctcttattaattcatttcttttagtatgtatgctggtctcctctgctcactatagtgagggcaccattagccagagaatctgtctgtctagttcatgtaagattctcagaattaagaaaaatggatggcatatgaatgaaacttcatggatgacatatggaatctaatgtgtatttgttgaattaatgcataagatgcaacagggagaagttgacaactgcaatgataacctggtattgatgatataagagtctatagatcacagtagaagcaataatcatggaaaacaattggaaatggggaacagccacaaacaagaaagaatcaatacttccaggaaagtgactgcaggtcacttttcctggagcgggtgagagaaaagtggaagttagcagtaactgctgaattc

SEQ ID NO: 46170 - DNA, 1108 bp, Homo sapiens
gaagccggtgctcaccaagatcagttcaggatcaatcattatccttgtagtcatgccttgatcagttctgagatgaagcagggaatgcaggcctgggttagcatcctgaggacacagggcccctggccttgatggcactgggccgtgctcaggtgaagcccacccgtgtctgggagagccttggcttttcagtgggcagcatgctcaactttacttgaagctcccaggtgccaaaccatttagtgccttggctgtttatcccactgccttggaagatggactcctctcatctctgagcctttacctagctgcttcctcatctacctgtggtgttgggaccaagcctccaatatctctgaatagcccactcctagcttggaaacagctataagggctgccctgccccttgtcaaatgatcaccaattcttggtggcttggctggggacaatgaacagtgtctgctggggtctgtgacacactgtttctggaacaaggaagggatggaaggctctacccctccgtggcagcccagcatttggccaactctgtatctgaacttgagctttctatggaacaaacaatggtcttagttttttaagagcctctgggtctctgattccatggagagtcaggagtagaattagtggaccagaaaccatgacatttgccatctaggtactctgctgttcagggtggaggcacagatgagcagagtgggggtgatgttggttgtatgtgcatagaagtcccctggctccagagccatccagtggtgcttggttctctctttcctgcccaggtattgtgtgtggaccaagtgtttaggaaacaagcatagaagcattatgtcacaggaaggcctggcctctcactccttcacactaatgagccttctactgacccaagtttctttttctcgggcagcctgggaccactatgagcagagagatgggagtctgtgtaagaaggatgcaagtatcctttgatttggagtggacagagcaggtccttgcaaaggcagtgggttaaacaacgggatgtctgtgggacaggccagggaaggagggcagaaacagggtctccagttcaccttgccgcaaaactaac

SEQ ID NO: 46171 - DNA, 427 bp, Homo sapiens
ttggtgcttcctgttcgcagctgcggcacttcaaggttactgactttttatgatgtttggtggctatgagactatagaagcatacgaagatgatctttatcgagatgagtcatctagtgaactgagtgttgatagtgaggtggaatttcaactctatagccaaattcattatgcccaagatcttgatgatgtcatcagggaggaagagcatgaagaaaagaactctgggaattcggaatcttcgagtagtaaaccaaatcagaagaagctaatcgtcctttcagatagtgaggtcatccagctgtcagatgggtcagaggtcatcactttgtctgatgaagacagtatttatagatgtaaaggaaagaatgttagagttcaagcacaagaaaatgcccatggtctttcttcttctcttcaatctaat

SEQ ID NO: 46172 - DNA, 478 bp, Homo sapiens
ttttttttaaacttaaaaaaaatttaatgataaatacatattgatagaaattattcaattctcctatgaatgcagcatccaaggatattctccatgttcatggctcccagcccttccctccaggctgatggggcaacttgagacccaccaagccagcagactcctccaccgagcgctcacccttgccatgaaattcctgatgtagggccacatgtttccggatgctacgcaggaggcagagataggtggcagcttggaaatgaagctcatgttgggctctgcacaacttttcactggtgacccgatgtgcacggaaagccttcacaaggtaccgataggccgcggtgtcgcgatagggtcggccggtggccgcgctcaggtagcgcaactcccgcagaagtcctcgaaaagtgtgcgacggggaccctaaggccgccattgtcctgtccttctccgagcgtggtgcccaacggcgtcc

SEQ ID NO: 46173 - DNA, 1968 bp, Homo sapiens
tgcaagagggtgacagcaacacactcaaggcgcttctcctgggaatggagcaggagaagagatggggagcatcgcatagatggaactagacctttttcttgggttggatgatgtgttcccgcgtctactacatggattattgcatcgagcttttagtgtcttcttattcaacaccgaaaataagcttctgctacagcaaagatcagatgctaagattacctttccaggttgttttacgaatacgtgttgtagtcatccattaagcaatccagccgagcttgaggaaagtgacgcccttggagtgaggcgagcagcacagagacggctgaaagctgagctaggaattcccttggaagaggttcctccagaagaaattaattatttaacacgaattcactacaaagctcagtctgatggtatctggggtgaacatgaaattgattacattttgttggtgaggaagaatgtaactttgaatccagatcccaatgagattaaaagctattgttatgtgtcaaaggaagaactaaaagaacttctgaaaaaagcagccagtggtgaaattaagataacgccatggtttaaaattattgcagcgacttttctctttaaatggtgggataacttaaatcatttgaatcagtttgttgaccatgagaaaatatacagaatgtgaatatgtaggtaaatgattacagaaaaatttatctgcttaacaaacttagaatgactttttccttttaaatttagttctatcattaatttatcattaaatttagttctatcatttggtactatcattaatgtattatatacactgatactttaaaacttgtgtggaaaaaactaacttataattttgtatcacacaccctggatatgtgttctgtttctaagcgacatttgtgagagattattgtaaaatgagagcgagcaaataaaacttaatttaatctttgcagatacatacttatgggaaatttgaacaaatgagtgaaactctgtgtttttagtaggctgtgataaacatttccggagcacttgcagaggacttgctatttgccaggtgctttatgtatcattaaatttttctcatagttcagaaaaatgtgcaaaggaaactattgtctcgctccttcaaaacagtcttaattaactttcatattagcagattaaactaggcagagcaggttcaagggaaattaaatgatatggaccctaatttgtatcattctgagttgattgtgtggtttattcattctggaaacatgttgatacttacagtcagccactgcttttgataagtgatattgattaggttgaatcttcttgtaaatagtatttaccagttagcaaagtctgtgttttcagaattacagtgagcacagaggtgttcataaaatggggaattgagtcccactcggtaagagttgcttaaacttgacactgttgacatttggggctggataaaacccctgtggtggggtctgtgcctgtgcattgcaggatggtgagcagcgtccctctcatgtgacacccacagttatgcccggatgttgccagatgcccctaggggacagagtcaacccccaactgaggaccactgtcctacagagtcaggaaatattgtagggagaaaaaaataacaacaacaaaggcctgtgttaatgttaaatagatgagattatggaatgtgtatattaatgttaaaaattgtaccttgatcaatgtactttttataaacttgccatagatatctcagatttgaaacctcaagacagatttattattcttaaatgctgtatgataatgaagaaaaataaaaatttatttcttgcaaagttaaatgtttgttaaattcaatagaatgactcatttatggttaactttgggcaatttataatttcagacaagactgtttagcaagtattttattgaaaagtaaaaaaaattgcaatttaaaaaaaa

SEQ ID NO: 46174 - DNA, 585 bp, Homo sapiens
gggtaaatagttgtgaacataactattgtgaatactatgttatatgttatagttgtgaatgtaaatagtattcacaattgtgaatacaatgtaaatagctttcacaattgtgaatacaatgtaagtagctatgtaaatagtgaatacaatgtaaatagctatgtaaatagttgttatgctgattagggaataatgagaaggaaaaaaagtatacatattcagtacagatgcagtcatctttttttcccctcgaacatttttgatccacaattggttgaatccacagatggggaacacacagtcttggtaaatttaaccaacaaggagggtaaacgcatcccaacagggaaggtaaactgcacatccatcagtacctcttggaggggcatcactggtttatagctcaatacagtgactatatcagaataatggcctttagttttcctgaaagattaaattaggcttgctgttgttgaatgagataatcaaacatatgatgtaattttaaagggtttacatttttaaaaatttaatgattgctacataaaaagggtatcagttaactaattttacttagatggaact

SEQ ID NO: 46175 - DNA, 360 bp, Homo sapiens
gagcacttgctatattttgtgtgggctaacaccccaggaatagctcatcccaacaactggttttaaacatgctcaggcatacaactaggtatgttaaaaatgttttctatctacccaaaaactcagcgaaaatagtaacaatcttgataaaccagatttttgcctctcctttagtggagaaaaacggccgagctgggttttagacaaacgccttggagtccgaatgttcagtccaactacctgcattcaacttgagcatgcaccgtggaatggccattcatggccagagggatgacctcttttgctctatagttgaaaactagctatcagaagggggttagcaaattctagagctttttc

SEQ ID NO: 46176 - DNA, 1254 bp, Homo sapiens
ttttgcattcagaaaggagcagactgtggagcaaaggtggtagagaaaacgaaccctacagaaccagttggagtggtttgccgagtggatggagtttaccaggtggtagaatatagtgagatttccctggcaacagctcaaaaacgaagctcagacggacgactgctgttcaatgcggggaacattgccaaccatttcttcactgtaccatttctgagagatgttgtcaatgtttatgaacctcagttgcagcaccatgtggctcaaaagaagattccttatgtggatacccaaggacagttaattaagccagacaaacccaatggaataaagatgggaaaaatttgtctttgacatcttccagtttgcaaagaagtttgtggtatatgaagtattgcgagaagatgagttttccccactaaagaatgctgatagtcagaatgggaaagacaaccctactactgcaaggcatgctttgatgtcccttcatcattgctgggtcctcaatgcagggggccatttcatagatgaaaatggctctcgccttccagcaattccccgcagtgctacaaatgggaagtcagagaccatcacagctgatgtcaatcacaacttgaaggatgccaatgatgtaccaatccaatgtgaaatctctcctcttatctcctatgctggagaaggattagaaagttatgtggcagataaagaattccatgcacctctaatcatcgatgagaatggagttcatgagctggtgaaaaatggtatttgaaccagataccaagttttgtttgccacgataggaatagcttttatttttgatagaccaactgtgaacctacaagacgtcttggacaactgaagtttaaatatccacagggttttattttgcttgttgaactcttagagctattgcaaacttcccaagatccagatgactgaatttcagatagcatttttatgattcccaactcattgaaggtcttatttatataattttttccaagccaaggagaccattggccatccaggaaatttcgtacagctgaaatataggcaggatgttcaacatcagtttacttgcagctggaagcatttgtttttgaagttgtacatagtaataatatgtcattgtacatgttgaaaggtttctatggtactaaaagtttgttttattttatcaaacattaagcttttttaagaaaataattgggcagtgaaataaatgtatcttcttgtctctggaaaaaaaaa

SEQ ID NO: 46177 - DNA, 322 bp, Homo sapiens; identical to SEQ ID NO: 16263

SEQ ID NO: 46178 - DNA, 668 bp, Homo sapiens
gcacaaaggccgcctcaagcacagaggctccagtctgcatcctttcaggaagggcctgcaagagaaggacaaggtgtggctgttgcgggagcagaagcgcaagaagaaactccgcaagctgctcaagcgcctgcagaacaacgacacgtgcagcatgccaggcctcacgtgcttcacccacgacaaccagcactggcagacggcgcctttctggacactggggcctttctgtgcctgcaccagcgccaacaataacacgtactggtgcatgaggaccatcaatgagactcacaatttcctcttctgtgaatttgcaactggcttcctagagtactttgatctcaacacagacccctaccagctgatgaatgcagtgaacacactggacagggatgtcctcaaccagctacacgtacagctcatggagctgaggagctgcaagggttacaagcagtgtaacccccggactcgaaacatggacctgggcagatgacctttaacaagctgtgattcctgagagaggaacacctgcaccaactgcccaggaaacacacggaattccgtctcatttcattgtcctcccttttgtccactcatgcattcaacaaacacttcctgagaacttacacctgaaaccatgttgactaaagatgaccccatcctcgctg

SEQ ID NO: 46179 - DNA, 1302 bp, Homo sapiens
acaggggaaatacccgcggcgcggacggtagttgctgtggtttccgttctgagctcgcagcttagggagctgaaggatcgcgggacttaggcgttgccgcgttccgagtccggccatcagtggctgcagatccggaggccaggagctcaaccacccttcttcggaacagggccggcctgctgctgtgccctcgaacgctcggtgcctgtatctactccgggggcctaggtcggctccggggggcggctttaggagaaggccgccggcgaagatgttcaaaaacacgttccaagaagcggcttcctctccatcctcttacagcatcggcaagcaagcctctgcaaatctggggacaaaaaggtacggaatggccacattcaaaagaattcactgattaatggacatccagttccctgggtgcttaggagatttgaaggggacaaatgttaagcaccacatatatcacatgccctgcagaccccaagaagacgctgggaattaaacttcctttccttgtcatgattatcaaaaacctgaagaagtattttaccttcgaagtgcaggtactagatgacaagaatgtgcgtcgtcgctttcgggcaagtaactaccagagcaccacccgggtcaaacccttcatctgcaccatgcccatgcggctggatgacggctggaaccagattcagttcaacttgctagacttcacacggcgagcatacggcaccaattacatcgagaccctcagagtgcagatccatgcaaattgtcgcatccgacgggtttacttctcagacagactctactcagaagatgagctgccggcagagttcaaactgtatctcccagttcagaacaaggcaaagcaataactggaattgtgactcgagggatagacccctggatgtgactcttctttttaaaaggaaactatgtggaggacgatgcaaaaacatatttatcttagtttgctctgctgtagttctgttatttatacttggtgttgcttgtcatggacaccggtgaacatgccgtaactctgtgactgcattgtaagtgcagtgggggtaagcagtcctgtgagtggcgcatgaacgctggagcttattccgccgcctgccccagtgtggggggagatacctttaccatgaacttacagaattaaagatggcccataaggaattccagaccaatatttcttcctgcggtttattctatgttttatatattatctaaatatatgtatatgctgtgtcatactcataatctggaaatgaataaagtgatatattcctggtttgtaaa

SEQ ID NO: 46180 - DNA, 332 bp, Homo sapiens; identical to SEQ ID NO: 16268

SEQ ID NO: 46181 - DNA, 1354 bp, Homo sapiens
  misc_feature (1)...(1354): n = a,t,c or g
aaaccaaagttaatcttctaagtccttttaattgttcttataaactagcataagatataaacttaagtagtacacatgagttttataatttactaatctctgacagatagctaagcatagcacatcagagcataacacagtgtgagggaaataaagtgtacaatgacatcttctattctggacctaataattcaatagagaaagaactacttgtagtcactgtggttacagaaggtttcatggacagcgaacataaagctctactagctaacaaataggtcttaatgataaaaacgtgggccttcagagaactaaaggtaccaatgtgtggcagtccaaaattacgaggaaaatgagttcccttcatgggtcacatcagcaatnnnnnnnnnnnnnnnnnnnnnnnnnnnnnnnnnnnnnnnnnnnnnnnnnnnnnnnnnnnnnnnnnnnnnnnnnnnnnnnnnnnnnnnnnnnnnnnnnnnnnnnnnnnnnnnnnnnnnnnnnnnnnnnnnnnnnnnnnnnnnnnnnnnnnnnnnnnnnnnnnnnnnnnnnnnnnnnnnnnnnnnnnnnnnnnnnnnnnnnnnnnnnnnnnnnnnnnnnnnnnnnnnnnnnnnnnnnnnnnnnnnnnnnnnnnnnnnnnnnnnnnnnnnnnnnnnnnnnnnnnnnnnnnnnnnnnnnntacctcatcaattcttaatctataaaccatggataggcttcgggagaacccaagaaccaatgaaatctgttggtaagttttatgtgtgcggttttctacagagagggtcaacagcatgtatattttcaaagaagtctgtggtgcaaaagagagtttattgttagaagtccttgggcaatcaacttggaaaagggtggattgagaatgggggctgtctagatcaggataatgttgaatttgaccctcacttgaggcttttgtacagaggatgagaagacggtaaattcaagggttaatcagaaattaacaccaacatgacttggtgatgagtgagatgtgaaacgtgagaaaaacatcaatgatgaaatcaagcttctgacttgcaacagtgagtataccaagagctacaggcttggaagatgaataaagttgggagcattctgttttttcatgagtgcccatgggacagacagggagaaatggacagttgaaagtacaagtctagannnnnnnnnnnnnnnnnnnnnnnnnnnnnnnnnnnnnnnnnnnnnnnnnnnnnnnnnnnnnnnnnnnnnnnnnnnnnnnnnnnnnnnnnnnnnnnnnnnnnnnnnnnnnnnnnnnnnnnnnnnnnnnttagctcggcatggtgctgcaagattatagtccctgttagtc

SEQ ID NO: 46182 - DNA, 481 bp, Homo sapiens
cctttgattaccaatttaatacgactcactatagggaatttggccctcgaggccaagaattcggcacgaggacatgctgtctgccctcatgaaattggctccaaatgaatgaactactttcatgagcagttgtagcaggcctgaccacagattcccagagggccaggtgtggatccacaggacttgaaggtcaaagttcacaaagatgaagaatcagggtagctgaccatgtttggcagatactataatggagacacagaagtgtgcatggcccaaggacaaggacctccagccaggcttcatttatgcacttgtgctgcaaaagaaaagtctaggttttaaggctgtgccagaacccatcccaataaagagaccgagtctgaagtcacattgtaaatctagtgtaggagacttggagtcaggcagtgagactggtggggcacggggggcagtgggtacttgtaaacctttaaagatggtt

SEQ ID NO: 46183 - DNA, 1642 bp, Homo sapiens
ccaagggaagtttggttggcttagtggattatccagatgatgaagaggaagatgaagaagaagaatcgtcccccaggaaaagacctcgtcttggctcataaaatatttattaggggaccctcaacatgtggtcttacaatgctgcaactgttcagtgagctgaaaatctgaatcagaaagctttctcaattgaacttataaaatatacaaggagtagcaaaagacagtatatcagctaagagagtttagttctaataaaaatcaggcttcccaggaacttgattgcttgctagtaattaaggggtttgccttttaggctgtcaaaacaaacattagtaaccagaacctgggagatagcttctcagcaaggaaaagtcacaggtttggggacggtttaggggaggggaaaaggttgatataataatgcagggttgctcctcggggtgtcgatctagaaacaattttacagaacttcagttgtaaactcaataacattacttgtataatggtgctggccatgttgttgttttaatcagttgcctctttttaaaagaaatttttatggaaaacacattcaactatcattaaaaaaatgaagttaagctgttgggaccatttctttaagatttaacaaaagttcagccttttaggtagttgaagggaagttacaccccgtattcagcacatgttgagttttctacaccaggaattttcaatatgtatattgatgaaaacaagctcaattcaaactggacagttttaagataatgttaaaatcagcacttttagagacaacgaaggccaagaatcagtacagtagtattccaaaatgattttctctagaaatttgaaagtagatcgaacagaatgttgtcaaccgcctaccagtacaatcttttgtggaagatactttgaaatcactttctactttgttagtaaagttctgtctttccagagctgcaagttttaaagtgttacttatacagaccaaccaagaatagtgctgaattaagtggcatttagtatctagaagccattttgatccaagaagctacttaagtgtccaaagtcagcatgcagcacatgtagcttttctgtaaacaagggtgtgatatgaaagctgcttttttaagaagagtaaaagcacattccatatacgtaagtgaattttaaaaataaattgaggcaaacagttaagttttatttttagagcaacaagttaactgtaaatattttaatgttagtttgctcatctatgatctgagatcatgccgaagtgagaaaaatctccccaaaatacaatttaatgcattgggaaaaaaaaaaactttaacagtaattccagccacaatctttagatcacccttgtaatgtgttacgggtccatttttcctggaatcgtttaatctaaagcagtttcccctgttttggagattttgtagttaattttaattttggctattgtttggaaaagatgagctgtctgtgtagatatgaagtatagttttttccataaaacagatgtttattttgtattaaaaaataccactgtacttgttttacaccatttgtatacatgtggtgatattaatgctaaactgtaaaattcaggaattaaaatgtgaccctgtaattccataaa

SEQ ID NO: 46184 - DNA, 497 bp, Homo sapiens
  misc_feature (1)...(497): n = a,t,c or g
gaccttttaggatttgcttatgaggccaaagtgctgctcgtgtcacaggacctagctgagcatcttggacattgttttttaatatgtcaaatcagtgttagtcttgttcagtataataaacatttattgaatgtttggaataatggaagacttggcttctgttcagggctcacagtccagtgaaggaatgtaaaacttgctttaatatacaagacatttggaagaaagcactgcaagaagtgagaaaaacagctggacgcggtggcttatgcctcggcctcccaaagtgcttgggattacaggcgtgagccactgcgcctggcccttaaattgtattttatattttctttttccggctgccatgcctctacattactcttgccctttctttggagttttactggtctttatatcctcagagtctatcacagtgtacagcctgtactagtaagtgtgtttaaaggactgtatgccttcttgnaccataaagagggtaa

SEQ ID NO: 46185 - DNA, 447 bp, Homo sapiens
gagaatgagaagtgtgaccaggcatggtgactcatgcctgtaatccagcactttgggatgctgaggcaggaggatcacttgagcccaggagtttgaggttacagtaagctatgattgtgccactgggctccagcctgggtgacagaactagaccctgtctctaaaaaaagaagaagaggtgtgtatccttctaaatgataaaacagatcactcccctgcttacataaaactttccggtggctggccaggcacggtggctcacgcctgtaatcccagcactttgggaggccgtggtgggcagatcacgaggtcaggaaatcgagaccatcctggctaacgtggtgaaatcttgtctctactaaaaacacaaaaaattaacccaggtatggtggcatgcacctgtagtcccagctactcgggaggctgaggcaggagaatcgcttgaac

SEQ ID NO: 46186 - DNA, 1329 bp, Homo sapiens
cccacgcgtccgaccaagcataaaagaacccatactggagaggaatctttaaatgtgatatatgtgggaagttatagtggcacatcccagaagagaacctatgagggagggaatgccctggatgggggcaggatgaggatgcctctgtagcaggcagagcttaccaagtctctccgaactcaaatggaagaaataccttatgaatgtaagaatgtagggggtcatggcttgtaatttacacagtgtaaatgaaaccatcctagaggattatgaggaatcctttctatgtgattttcaatcatagcaagcaagaaaggctccagtgtcaaggtagttcagctcttacaggatataaaacagtccatacttgagagaaaaacttagatctgagtgatggaatgtgaagcaaatcttcaaaatcagtagacatttctggacataaaacacagatgaggaaagggcttcaattagaagttacgtaatcaccatcagaaagttcatgtttggtaaattctgttactagaaatgtaggaaattcaggtatagctttgaatcccaattacacattggtcagtgggaaaactaagggcctccaacaggcaaattcagggaggataggtttcagggaatataaatttatttaatattagtggtctttaagtataaacttgatgtaattggtttgggagggggcagtgatgatgacttctgaaacaaaatttggatttccttttaggaaaagtagaaagcatagacttacaagtctaacaggagataggagagagtcactcataaaaaatgcaaattgatgaacgtactattgtgatacattagttgaatggatgaaacttttttaaagtttcagatgaactcccataatgaatgatgaatttgtgatgagggataacctggaagtggtattcacacattatgctacaataaaaggttctaccgtggagaggattttgacacattcagtaactaatggaacacaccgtcaacatgaattcgcaccttacatgacagaagtgattcagggattcctatgaatagaaatgctgagaaggaacgcattttattgcagaagctaaaaagctaaagtaccagtcatctagagagaaggaaattaatgtttcttaataatcctgttaaatgtttgattgtttttggaatgtgttattgtaaagatgtcatgcaggacatgtatatgttgtctgttgtaaaatgttaacgaatactttgttcagggctcactctctctttgtcatgaaagccagctccttgtggcgaggtaaagtggaattccaataaagaaattccttaaatcaa

SEQ ID NO: 46187 - DNA, 689 bp, Homo sapiens
tcccagtcccgcccctgtccccaagtggctgcttgggggagaggcgtttgccatcactggtgttgtcacctccctgtttctccaccaagggcttgggcctctcggggctggggcctcccaggggatggggacccagaggtgcagtggccgcccacatccatggcctaggagctactgggcaggttcccggccacacatctggtgggctgttttgttttttttttttcctcttcccccagatgtcttgacgggatcactggggctctttgtgagtgagggtggccaaactaccgccggaggagatggggtctcagagcgagagctgcggagggggaggggaagaagaaggcctcacttttgctgcctgcggggccccacacagccgctgctactttggggggtggggaaggggccaagctgcagacacacacagtcattcatttctgtcccacacccctgtgggtggcgggtgtgcgtgtgtgtgcttgtgtgtgcgcacgtgtcggcgctcacacacacatgctagcccactgatgcacccagcccagggctggcagtctttgcagcgtggggccgtctcaccctggagcctggagaggatctatgcttgtttgtttttgtaatccatatcatagttgctttctttaattgttccttctgaataaacagtttatttaagatactgaaaa

SEQ ID NO: 46188 - DNA, 412 bp, Homo sapiens
ggtggaatcttcgacaggaggagatagatgataggcgatgatgatctggatgacaaagtgagtgtaaattatgtcctcgaattctcaacaactaccccagcttttctagtctgtgtagacaagatccatttttggtgagattgattgattgtggttttatgatccaatgtatcagggccatttatgttgttcagtccttattgggcaccatttaacagctatattaaggttgtccagagaaacagagccaacaggatagggagagagacagagaaattttttttaaggaattggctcacatgattgaaggagctgtcaagttcaaaatgcacagggcaggccagcaggctggaaatcccagcaggagttaatgttgcagtcttcaggctaaagacagtctggaggcagcatt

SEQ ID NO: 46189 - DNA, 1446 bp, Homo sapiens
tgcagcacgagttccgactgggcggtgggctgaaccctgggcttgtccgtgccctggccatcagccccagtggccgtagtgtcgtggccggcttctcctcaggcttcatggtgctcctggacacccgcacgggcctggttctgcgaggctggccagcccacgagggggacattctgcagatcaaggcggtggagggcagcgtcctgggtcagctcctcctctgaccattccttgaccgtctggaaggagctggagcagaagcccacccattcactacaagtcagcatccgaccccattccacaccttttgacctgttacgggcagcgaggtggtcactggcaccgtgtccaacaagattgggcgtctgctccctgcttgagccaccctcgcagggccaccacgaagctcagctctgagaacttccgcggcacgttcaccagcctgggccttgcttgcccactaaacgccacctcctgctgggctcagacaacggggttatccgcctcctggcaatagacttgaggcaaggaactgggcccgggcaaagggtgggaagacatctgcggggcgcgtgttcactcaaccctaattccctgagcagcagctccctccagggaggccctgggtcccacgccctgggtgcccacatggcctgccaactagggcctgcaaatggagtgggggagtcctggcccctgaatcaccagagccaccaagcctgccagaggggtctcattcatggcttggggacacagggctcctagcaagcaggaagttaagagcaggaggaagcgttgctaccttcacttctccccagctccgccctctgggtccacatgaggacagggaagctcgggaaggggaagggagactggccctgcccagccggtctctagcccctcagcccccgctgggcactctctgtcccatccctctaggacagggaagctggccctggtccagggcactgatggtgcttggattccagcctaaggaaggctggccgtggtccaggagttaagggcttgggtctggggtttaagtggccacccatccaggccctggccagtgtgggaccgggacgggaaggaagaaggaggctaggagcagggggaaaaggtgcacttggccagtggcgcctgccaggagtgagtccatgcgttgtctgcccacccctaccacagtgtttgtgccttcagctgagggggcagcctctgggccctgaacccctgctggggctcccacgaccctgagagaaggggtgagaagaatcatctctgcacctcgggtctctgccagaggaagacttaagcatccctgcgacctcacattctagacagagatgaggtcccaggggttggcccctgctgccttctcacaatttgcaatagatgtaaataggaccaataaatcctttggaagagcaaaaaaaaaaaaaaaaaaaa

SEQ ID NO: 46190 - DNA, 1123 bp, Homo sapiens
tttttttttttttatttgaacaggggaagtttaatataaagatgaactctactcggagcatagagtttaaaaagagttctacacaacaccctagggatgaggaagaatgcctcagggaagaaagcacagaaaaggaggtgccctcccgaggctgggactgagacctcctcgctggagaaggtgtgggaggcccctgagggtgaagttccccgggttgctcgagccagagtctgcacagtcacagggcaagcagaaaattctttcgagagggtgggcgctcacagggaatcgggaagcagagcccacctgcctacacctgaaaggccacagccagtgctgggacctctctgaggtctgcagactccaggcagagcactcctggcagctgtgcagcaggagcaggaaggaaacgacatgaaagcccctttctccccagtgtccccagttcaacaccgtgcacgctaccaaggagaaacggcgcacgggccccacccacgactgcagagcaggcaggggagggggatctagagctgaaaggcaatacatggataacgcgcacgccccactcccacttttatttagcaagagtaaatgcagcctaatgacagggcgtgggaagacctcctgctcaccagtgtgggcagagtgtagcgtggcctgggctcctaatacaggtaaattgtctccaaaggactagtaaaggtgactgggtcatcctcctgccccagggacactgattagagaaaatccgtctgtgctggcaatacggcagtgctggacactcggaattcccttgaaggcaaaagcaaggaacagagcgtgattaggtactggacacctgccaagtgctgggctctctccagtttacagatgaggaaactgaggctcctcgagttggagctgggatgccagcccccatggacctggcagaacacgctcttgacagccccacagggcttctccctaggggcgtgcccttagaagattccaggcagcaggcggtaaggcactgcggcggtgtagcgctcccagtcccggccgtacttgctggcgcagcggtgctcgtcccggaggcagcggtgggtcagcaggatggccatgtagatgatgtcggacgcgtggg

SEQ ID NO: 46191 - DNA, 355 bp, Homo sapiens; identical to SEQ ID NO: 48

SEQ ID NO: 46192 - DNA, 312 bp, Homo sapiens; identical to SEQ ID NO: 16303

SEQ ID NO: 46193 - DNA, 1442 bp, Homo sapiens
ggaacgcgcaccaccggccttcaccccttagggcgcgggaggggacgcaggggaaatcgaagctgccagatgcccacgaccacaacgtcaccctccagattgccctctcggaggggcccagtccgcgcaggtggctgctccctactgcctgagctgtggctgagcagcagattggggagaaacaggctctcgcaccttgtcctttattcgacgatttcttcaatggacagaattattagatcctacaaatgtgttcatttcagttgaaagtatagaaaactcgaggcaactattgtgcacaaatgaagatgtttccagccctgcctcggcgggaccaaaggatacagggaagcttggaagcggagtcttgcaacagtggcatcccgacaggcaggcaacctgatccccaaggttttttcggacctggcaggcgttcctggccttttcatggggcggcccacggtatttttgtcaatgacgccactgaaagggatcaagtccgtgattttacctcaggttttcctctgtgcctacatggcagcgttcaacagcatcaatggaaacagaagttacacttgtaagccactagaaagatcattactaatggcgggagcccgttgcttcttcaactttcttaggccgtaatccctcagtttgtccagatgaagtatggcctgactggcccttggattaaaagactcttacctgtgatcttcctcgtgcaagccagtggaatgaatgtctacatgtcccgaagtcttgaatccattaaggggattgcggtcatggacaaggaaggcaatgtcctgggtcattccagaattgctgggacaaaggctgttagagaaacgctagcatccagaatagtgctgtttgggaccttcagctctgattcctgaagtcttcacctacttttttaaaaggacccagtatttcaggaaaaacccagggtcattgtggattttgaaactgtcttgtactgtcctggcaatgggactgatggtgccattttcttttagtatatttccacagattggacagatacagtactgtagtcttgaagagaaaattcagtctccaacagaagaaacagaaatcttttatcacagaggggtgtaggcgtgagttttaggtgaatttatgtggttcctgcttgaaaaccttcccctctccaggttcggtttagagaactttgccacaggtcttctggggaccccagaggtgtctgtgctgacaaggcgacttcagattccatactgagatcgttcccaggctggcgtctctggggtttttaaggctggctggagaagacagtgggagggtgccccgtctgacacccctggggttgctgagggaacggttggagtggggatcggcctgcgaaaggatactgtgaaatcactaattaactaataaacctgtctcaagttgaggatttgaag

SEQ ID NO: 46194 - DNA, 1254 bp, Homo sapiens
ttaatttttcaaaccatcaacattttatttaataaaagcaactgagacattttctaaagtatacggtatatttgatataaaaattcttcaaaatatgtactatagaaattcttcaaaatatgtactaaaaatacaaagtttgtgaatctaaggtacagaaaacactttatacttcagtcacccaaaacaacagcttgtggtctcctccaattacacacagagggagagttcgatgccaggacagtccagatccaacggctacagaacccatgaggatgggctgagggtgtcctaaatgatgaatttgaaactggcttgccattttgccaggataaccagtggttgcaaacagattttcactaattgtggaccacctgaataagcaggctcgatccatgtgaacaggtctcttattttgaggataactggaccgagtaatatcccaaattaaccaatcatttcctgcaacggctccaactttgaaggtgttttttaagcaccagtgtgctgacattaatggcacttgttctgattcaagagataaaatagcctgttgggccaaaagatcataaaaccggattgttccattcttctctgcaaccattagcttaaaagtctcctcaggatgccagcacacactcatgccaggagaatgaagaacaaaatgagctgtttgcactccttccaagttccaaatcctgcaggtgtgatcgtcactcacacttgcaatttcttggccttctttgggatcaaacaccaaaccattaatgaaatcggtatggccctctaaaaccttatattcatttttatcctgaagatctgaagtaaataatctaattttcatatcagcagctgaagtacaaaatttgattactggaggcaatgaatcaagtctagtctctgggctccaagctatgccatcaaccctgactccatggtgaaatgttcgaagtgttttatactgaatgccttcaacgtctgcttcttcttcctgaaacgtacacgtgccaatgaccacataattattgccaccatatgcaattaggtttcctgaatccccattctcaaagggattaaattctaccacatgcacataatcttcacaatccacagtgtaggcagcatttcttgaggcatcttgcttcatcttgtatgtcaaaattcaagcagttgtgaaaattaaatagccttctactggacaagtgtcacgaaacgcagagcgccaggaaccgaccagaggcaggctggtcttcc

SEQ ID NO: 46195 - DNA, 3693 bp, Homo sapiens
  misc_feature (1)...(3693): n = a,t,c or g
gaattcggcgcagcggagcctggagagaaggcgctgggctgcgagggcgcgagggcgcgagggcagggggcaaccggaccccgcccgcacccatggcgcccgtcgccgtctgggccgcgctggccgtcggactggagctctgggctgcggcgcacgccttgcccgcccaggtggcatttacaccctacgccccggagcccgggagcacatgccggctcagagaatactatgaccagacagctcagatgtgctgcagcaagtgctcgccgggccaacatgcaaaagtcttctgtaccaagacctcggacaccgtgtgtgactcctgtgaggacagcacatacacccagctctggaactgggttcccgagtgcttgagctgtggctcccgctgtagctctgaccaggtggaaactcaagcctgcactcgggaacagaaccgcatctgcacctgcaggcccggctggtactgcgcgctgagcaagcaggaggggtgccggctgtgcgcgccgctgcgcaagtgccgcccgggcttcggcgtggccagaccaggaactgaaacatcagacgtggtgtgcaagccctgtgccccggggacgttctccaacacgacttcatccacggatatttgcaggccccaccagatctgtaacgtggtggccatccctgggaatgcaagcagggatgcagtctgcacgtccacgtcccccacccggagtatggccccaggggcagtacacttaccccagccagtgtccacacgatcccaacacacgcagccaactccagaacccagcactgctccaagcacctccttcctgctcccaatgggccccagccccccagctgaagggagcactggcgacttcgctcttccagttggactgattgtgggtgtgacagccttgggtctactaataataggagtggtgaactgtgtcatcatgacccaggtgaaaaagaagcccttgtgcctgcagagagaagccaaggtgcctcacttgcctgccgataaggcccggggtacacagggccccgagcagcagcacctgctgatcacagcgccgagctccagcagcagctccctggagagctcggccagtgcgttggacagaagggcgcccactcggaaccagccacaggcaccaggcgtggaggccagtggggccggggaggcccgggccagcaccgggagctcagattcttcccctggtggccatgggacccaggtcaatgtcacctgcatcgtgaacgtctgtagcagctctgaccacagctcacagtgctcctcccaagccagctccacaatgggagacacagattccagcccctcggagtccccgaaggacgagcaggtccccttctccaaggaggaatgtgcctttcggtcacagctggagacgccagagaccctgctggggagcaccgaagagaagcccctgccccttggagtgcctgatgctgggatgaagcccagttaaccaggccggtgtgggctgtgtcgtagccaaggtgggctgagccctggcaggatgaccctgcgaaggggccctggtccttccaggcccccaccactaggactctgaggctctttctgggccaagttcctctagtgccctccacagccgcagcctccctctgacctgcaggccaagagcagaggcagcgagttggggaaagcctctgctgccatggtgtgtccctctcggaaggctggctgggcatggacgttcggggcatgctggggcaagtccctgactctctgtgacctgccccgcccagctgcacctgccagcctggcttctggagcccttgggnnnnnnnnnnnnnnnnnnnnnnnnnnnnnnnnncctccccctgggctctgccccagctctggcttccagaaaaccccagcatccttttctgcagaggggctttctggagaggagggatgctgcctgagtcacccatgaagacaggacagtgcttcagcctgaggctgagactgcgggatggtcctggggctctgtgtagggaggaggtggcagccctgtagggaacggggtccttcaagttagctcaggaggcttggaaagcatcacctcnnnnnnnnnnnnnnnnnnnnnnnnnnnnnnnnnnnnnnnnnnnnnnnnnnnnnnnnnnnnnnnnnnnnnnnnnnnnnnnnnnnnnnnnnnnnnnnnnnnnnnnnnnnnnnnnnnnnnnnnnnnnnnnnnnnnnnnnnnnnnnnnnnnnnnnnnnnnnnnnnnnnnnnnnnnnnnnnnnnnnnnnnnnnnnnnnnnnnnnnnnnnnnnnnnnnnnnnnnnnnnnnnnnnnnnnnnnnnnnnnnnnnnnnnnnnnnnnnnnnnnnnnnnnnnnnnnnnnnnnnnnnnnnnnnnnnnnnnnnnncaccgcctccaaatgctaacttgtccttttgtaccatggtgtgaaagtcagatgcccagagggcccaggcaggccaccatattcagtgctgtggcctgggcaagataacgcacttctaactagaaatctgccaattttttaaaaaagtaagtaccactcaggccaacaagccaacgacaaagccaaactctgccagccacatccaaccccccacctgccatttgcaccctccgccttcactccggtgtgcctgcagccccgcgcctccttccttgctgtcctaggccacaccatctcctttcagggaatttcaggaactagagatgactgagtcctcgtagccatctctctactcctacctcagcctagaccctcctcctcccccagaggggtgggttcctcttccccactccccaccttcaattcctgggccccaaacgggctgccctgccactttggtacatggccagtgtgatcccaagtgccagtcttgtgtctgcgtctgtgttgcgtgtcgtgggtgtgtgtagccaaggtcggtaagttgaatggcctgccttgaagccactgaagctggggattcctccccattagagtcagccttccccctcccaggggccagggccctgcagagggggaaaccagtgtagccttgcccggattctgggaggaagcaggttgaggggctcctggaaaggctcagtctcaggagcatggggataaaggagaaggcatgaaattgtctagcagagcaggggcagggtgataaattgttgataaattccactggacttgagcttggcagctgaactattggagggtgggagagcccagccattaccatggagacaagaagggttttccaccctggaatcaagatgtcagactggctggctgcagtgacgtgcacctgtactcaggaggctgagggacggatcaactggancccaggagtnnnnnnnnnnnnnnnnnnnnnnnnnnnnnnnnnnnnnnnnnnnnnnnnnnnnnnnnnnnnnnnnnnnnnnnnnnnnnnnnnnnnngtcagactgctgggactggccaggtttctgcccacattggacccacatgaggacatgatggagcgcacctgccccctggtggacagtcctgggagaacctcaggcttccttggcatcacagggcagagccgggaagcgatgaatttggagactctgtggggccttggttcccttgtgtgtgtgtgttgatcccaagacaatgaaagtttgcactgtatgctggacggcattcctgcttatcaataaacctgtttgttttaaaaaaaaa

SEQ ID NO: 46196 - DNA, 783 bp, Homo sapiens
tggaattcgcggccgcgtcgacgaactcccataatgctggggttggacttcccgtaacacccaccacactgtgctgtaatttcctctttaagtttctctgtcttcccaagagctctttcagatatagagcaggtttttttttcctctatattttcaagtcaccagtggccaccacactgcttggttcatagttaacacaaactaaatggttctagagaatgtgattacatgaactctaacattattggaagaaaacaagatgaaaagaggtgagatgccttgtttaaagtcatacaactggttgacaggctggttcaagaacccaggtcttctgacttcaaatccagtgctctttctatgcagctacttctgtgccaagcacggatggtggtgagcagaactggcagcagcctgagtccccaggtaccctggccatccactgggcattggggaaaggacttgatcagtagattgagagtcctctcttctatcccttaccacccggccccatcccatcttctaaagcagtcatttctattccaagtcatccaggtgattcagccagggatcaagtccacatggtacttgggttgatatgagtcctgtacttagaggagagtaggtaactgctccttctcaggagctcagggagaaactggaccctcggccccagagcccaaagaagggaatgaccttcctagtgaaggaggcagtgaaggtgtagatgggctctcgggtgacagcgttggtgaaggtcacccagcccacctcatagtcaagagc

SEQ ID NO: 46197 - DNA, 2572 bp, Homo sapiens
gcgagcctgcacgttgcgccgggaccccggggctgtgcccagaaaaatcatttttcttctctgggaaggtgaacatttgtagcattgatttcccggatctggtaacatggcaaaagatgccggtctaattgaagccaacggagaactcaaggtcttcatagaccagaaccttagtcccgggaaaggcgtggtgtccctcgtggccgttcacccctccaccgtcaacccgctcgggaagcagctcttgccaaaaacctttggacagtccaatgtcaacattgcccagcaagtggtaattggtacgcctcagagaccggcagcgtcaaacaccctggtggtaggaagcccacacacccccagcactcactttgcctctcagaaccagccttccgactcctcaccttggtctgccgggaagcgcaacaggaaaggagagaagaatggcaagggcctacggcatttctcccatgaaggtctgcgagaaggtgcagaggaaagggaccacttcctacaacgaagtggcagacgagctggttgcggagttcagtgctgccgacaaccacatcttaccaaacgagtcagcttatgaccagaaaaacataagacggcgcgtctacgatgccttaaacgtgctaatggccatgaacatcatctccaaggagaagaaggagatcaagtggattggtctgcccaccaactcggctcaggaatgtcagaacttagaggtggaaagacagaggagacttgaaagaataaaacagaaacagtctcaacttcaagaacttattctacagcaaattgccttcaagaacctggtgcagagaaaccggcatgcggagcagcaggccagccggccaccgccacccaactcagtcatccacctgcccttcatcatcgtcaacaccagcaagaagacggtcatcgactgcagcatctccaatgacaaatttgagtatctgtttaattttgacaacacatttgaaatccacgatgacatagaagtgctgaagcggatggggcatggcttgcggggctggagtcggggagctggctctgccgaaggaccttaaaatggccagaagtctgggtccccaagggctctggagccatacgtgacagaaatggctcagggaactgttggaggcgtgttcatcacgacggcaggttccacgtctaacggcacaaggttctctgccagtgacctgaccaacggtgcagatgggatgctggccacaagctccaatgggtctcagtacagcggctccagggtggagactccggtgtcctacgtcggggaggacgacgaggaggacgatgacttcaacgagaatgacgaggacgactgacgtcctccccacttcagattcggctttcaggaaaacgtttagcgaaaagaaactttttttttaatgtgggttttctgtttccttttggcctactcccaagaagatattggtaagctattgaatttagatatgcacctctgataagcaaggattgtttcccgtaggattaggacgtgctgtggatgtgtgttttgataccagtgtgctgatgcagagcgtttatttacttgttaggattttgtgttttcatttgctatttttctttaagtgcagagttcatttttgcccctgaaaagtttttgctgagtttgctgaagaaattgtatttcaaccacatccatgaaaataaaacacctcctgttgtggatggtgagcccctgatgccgcttatttgccgtgagtttggacggcacccctgctggcggatagcaagactctgtggagtttgttcagtggtacggtgtccaagcaaacagcagaatgcaactttctaaacagccccaagcaaacagcagaattcaactttttaaacaataaacaccatcaaccttattgactttattgtcccttaaattatattgactgttgtgattccatcaagtttgtacactcttttctctccctgttttgcagcaacaaattgcgaagtgcttttgtttgtttgttttcgtttggttaaagcttattgccatgctggtgcggctatggagactgtctggaaggcttggaatggtttattgcttatggtaaaatttgcctgatttcttacaggcagcgtttggaaaccttttattatatagttgtttacatacttataagtctatcatttaaagacatgtactgaaacaaatgtatttgtttcataagcatcttcctgtaatctattataaaattgaaattaaatatagagaatgttttaacaattttttaactcaaaatttgtcaatcatttttaatagttctttttttataaaaagaaaaaggaatttaaggacaggcagtagtctcttttaaaatttattcacaaaacccattaactgcacagttgctattagctgcctgttctaaaacgatagtctttttattgaaacacaaataaacttttctgtaatattttatggtatataaagagactttaattgtttgacttgtttaacttggcactgttagtttttattaataaaacgcgcatgggcattttaaacaaaaaaaaaaaaaaaaaaaaa

SEQ ID NO: 46198 - DNA, 482 bp, Homo sapiens
  misc_feature (1)...(482): n = a,t,c or g
gnnnnnnnnnnnnnnnntttggnnnccttggananccgctatgacatgattacgaatttaatacgactcactatagggaatttggccctcgaggccaagaattcggcacgagacaaaacaatatttcctattttacttcattttattttagagacagggtcttgcctgttgctcagtctggaatgcagtggcacaatcatagctcactgcagcctcaatttcctgggctcaagggatcctcccaaagtgctgggattacaggtataagccaccatgcccggccaagatactctatttttaatttacagtttatatcaagacactgagccaggggaatttgaagtcacccatccagtggtcttagcatctttgctcacacactgaatgacttgatgtaaatgactgaatcagacttgtttgcttatagctgacaccaccgagcaaacatattctctctttctctgggacaacacctgatatgg

SEQ ID NO: 46199 - DNA, 951 bp, Homo sapiens
cccgggctgccatccagaatgggttttggttctttaagttcctgatcctggtgggcctcaccgtgggtgccttctacatccctgacggctccttcaccaacatctggttctacttcggcgtcgtgggctccttcctcttcatcctcatccagctggtgctgctcatcgactttgcgcactcctggaaccagcggtggctgggcaaggccgaggagtgcgattcccagtgcctggtacgcaggcctcttcttcttcactctcctcttctacttgctgtcgatcgcggccgtggcgctgatgttcatgtactacactgagcccagcggctgccacgagggcaaggtcttcatcagcctcaacctcaccttctgtgtctgcgtgtccatcgctgctgtcctgcccaaggtccaggacgcccagcccaactcgggtctgctgcaggcctcggtcatcaccctctacaccatgtttgtcacctggtcagccctatccagtatccctgaacagaaatgcaacccccatttgccaacccagctgggcaacgagacagttgtggcaggccccgagggctatgagacccagtggtgggatgccccgagcattgtgggcctcatcatcttcctcctgtgcaccctcttcatcagtctgcgctcctcagaccaccggcaggtgaacagcctgatgcagaccgaggagtgcccacctatgctagacgccacacagcagcagcagcagcaggtggcagcctgtgagggccgggcctttgacaacgagcaggacggcgtcacctacagctactccttcttccacttctgcctggtgctggcctcactgcacgtcatgatgacgctcaccaactggtacaagcccggtgaggacccggaagatgatcagcacgtgggaccgccgtgtgggtgaagattttgtgccagctgggcaagggcttgctcc

SEQ ID NO: 46200 - DNA, 707 bp, Homo sapiens
tctcgaggatccgaattcgcggccgcgtcgacctttcttcggggtcgaggagggtggctggctcttggcggggagcaggagagggtaggtgccaaaccgagaccctggcggggtcccttcgggtttgggcaggtcgatgggcaagggggtgcccactagtgaggagggacacccaccaattccaggcgatgctcccctgtgccgctcagcaaagctaggcccggggatcctgctcttctccggtctggttaagccagcaacctctgacacttaggagaaagttagtaaccgtgttacgagtcagtttttagtgaaaaaacattgagctaggagccaagacccatctcttcactattttggtattgtgcaagtcatcttacctctctggatctcagttgtctcatctgtaaaaaggagataaaaattatttacctgcctgaacatttctccttaaaaatatcagtcttggccgggcacggtggctcaggcctgtaatcccagcactttgggaggctgaggcgggcagatcacctgaggtcaggagttcaagaccagcctggccaacatgatgaggtggaggaccatcctgctacagtattgctttctcttgattacatgtttacttactgctcttgaagctgtgcctattgacatagacaagacaagtacaaaatattcaccctgtggaaagtgcgaagatagaaccc

SEQ ID NO: 46201 - DNA, 664 bp, Homo sapiens
ggtaagcacttctgaaaacagcacttcagctttagctgatgtatcatggacccaatttaacatcatcattttgacagtcatcatcattgttgtggtgctgctaatgggatttgtgggggctgtatatatgtaccgcgagtaccaaaaccggaaactcaatgcccccttttggaccatcgagctgaaagaagacaatatcagtttcagcagctaccatgacagcattcccaatgcagatgtttcgggattgttggaagatgatggcaatgaagtggctcccaatgggcagctgaccctgacgacgcccatacataactacaaagcctaaggagctagaactgttctgaattgttaaaccacagtgcttgctaagacagagtcagcccctgggccagacaaagcctggctagagtttgctgagaaagcaaaggcaaatagtgcatctgaaattttcaggtacaaatttgtaatgcgcttagcctatctattgctcttagttttcccatgaagatctgaagcgttcactgtcattaggacttgaagtaaagtatatttttgtaccaaaccacatgggagtatggaaaggctgaaccccatagtgcagcccaaaaccactttgacctccagatagactcctggggaagcattcaccaagccagtggta

SEQ ID NO: 46202 - DNA, 551 bp, Homo sapiens
gcaggcctggattcttttgagtggtgctactgcctaggaagtaacacgtggagaatttccatcttgggaccatgcacacagtgccttggggagtagattttgccctaatagcgatgaagaattttatcagtcagtggagttcctttttcagatcagggatgggaaagagccaaactgggtacctcccacgtgtgccccgtgaacagccctttgcagctgggctgtggggcttggctgctgccctgtcccatctggcagttaacgccttctccctgctctgccccccactccccaaaaccagttgcagcctcaacccacatggggatgtagaaagccgtaaagtccacgctactgttgaaaatgtttacatctccgctctcaacctgccttgggttcgtgttaaatggtgttaaattctgcaaatggaggggaaaaaaatcaaattctaaatttcaaagtagaatttaaagcaaatttgtaaaaaaattatcctaccaccccttttggtccacttaagatatgccacgctgaagcaaggtatttcctactgg

SEQ ID NO: 46203 - DNA, 1029 bp, Homo sapiens
aaatcacatgtggagtgtgctcgattttctccagatggtcagtatttggtcactgggtctgttgatggattcattgaagtatggaactttactactggaaaaatcagaaaggatcttaagtaccaggcccaagataactttatgatgatggatgatgctgtcctctgcatgtgtttcagcagagatacagaaatgttagcaactgggggcccaagatggaaaaatcaaggtgtggaagattcagagtggacaatgtttaaggagatttgagagggcacacagtaagggtgtcaacctgtctaagcttttctaaggatagcagtcagatccttagtgcttcttttgaccagacaattagaattcatggtttaaaatctgggaaaaccctgaaggaatttcgtggccattcctcctttgttaacgaagcaacatttacacaagatggacattacattattagtgcatcctctgatggcactgtaaagatctggaatatgaagaccacagaatgttcaaatacctttaaatccctgggcagcaccgcagggacagatattaccgtcaacagtgtgattctacttcctaaaaaccctgagcactttgtggtgtgcaacagatcaaacacggtggtcatcatgaacatgcaggggcagattgtcagaagcttcagttctggtaaaagagaaggtggggactttgtttgctgtgccctctctccccgtggtgaatggatctactgtgtaggggaggactttgtgctctactgtttcagtacagtcactggcaaactggagagaactttgacagtgcacgagaaggatgtgattggtattgcacatcaccctcatcagaacctgattgctacctacagtgaagatggactcctaaagctctggaaaccataattcaacttttctttttaaatcagctcgaaagcatgtacttaaatgaagcatattcatgtaatgtgcttttttttttttttgccagcttttctaagcaaatagattgtctgaattagtcacagaa

SEQ ID NO: 46204 - DNA, 385 bp, Homo sapiens
ctcatttctgaaaacctggattgtagctttccctgggctgactgtcaaaggaggtggttttaaaaagcaagccaaacaggtttccatcctttaggaagaccctggaacgtgccagttgattctgacaatttctcatgaacagaaacacctaggaagggagaactgggcccgcctggcaggacgactgagcaagtccttggaaaaccagagatattagagcggtgaatcgcgctggtcacgttggacacctgcgcgttaggagattctggagccagagggagagaccccagaaactccccggtcggcgacccagcccgagacgcctggggtcccaagggaagctgaacgcccggtgggctcccgggatggttcttccggttctttg

SEQ ID NO: 46205 - DNA, 2474 bp, Homo sapiens
gttcgtagcagaaatggcggctgcggcggctcgagtggtgttgtcatccgcggcggcggcggctctggggtttcagcgagagtcttctaatccgaggcgctgcgggacggtcattatattttggagagaacagattaagaagtacacaggctgctacccaagttgttctgaatgttcctgaaacaagagtaacatgtttagaaagtggactcagagtagcttcggaagactctgggctcctcaacatgcacagttggactctggattgatgctggaagtaagataccgaaaatgagaagaacaatggaacagcacactttctggaagcatatggctttcaaagggcaccaaagaagagattccagttagatcttggaacttgagattgaaaatatgggtgctcatctcaatgcctatacctcccagagagcagactgtatactatgccaaagcattctctaaagacttgccaagagctgtagaaattcttgctgatataatacaaaacagcacatttgggagaagcccagattgaacgtgagcgtggagtaatccttagagagatgcaggaagttgaaaccaatttacaagaagttgtttttgattatcttcatgccacagcttatcaaaatactgcacttggacggacaattttgggaccaactgaaaatatcaaatctataagtcgtaaggacttagtggattatataaccacacattataaggggccaagaatagtgcttgctgcctgcctggaggtgtttcccatgatgaattgcttgacttagcaaagtttcatttcggtgactcctttatgcacacacaaaaggagaaaataccaagctcctgccctcccctgcaaaattcacaggaagtgagattcgtgtgagggatgacaagatgcctttggcgcaccttgcaatagctgttgaagctgttggttgggcacatccagatacaatctttctcatggttgcaaacacgctgattggcaactgggatcgctcttttgggggaggaatgaatttatctagcaagctggcccagctcacttgtcatggcaatctttgccatagctttcagtctttcaacacttcctacacagatacaggattatggggactgtatatggtttgtgaatcatccactgttgcagacatgctacatgttgttcaaaaagaatggatgcgactctgtacaagtgtcacagaaagtgaggttgcacgagccagaaatcttctgaaaacaaacatgttgttgcagcttgatggttcaactccaatttgtgaagatattggtaggcaaatgttatgctataatagaaggattcccatccctgagcttgaagcaagaattgatgctgtgaatgctgagacaattcgagaagtatgtaccaaatacatttataataggagtccagctattgctgctgttggtcccattaagcaactaccagattttaaacagatacgcagtaacatgtgttggcttcgtgattaaaatgctcctaatcaagattgtttgaacacatgtatttataaaacagagctagagaaaaataaaaatgaacatgtatatacatttggaaatttgaattaaatactgtatcatactttcaaaggataaaaagactacccctctgaaggttgttttgtattaatggtcagtctttgttctctgagaaattatgttggaagcagcatactttcaaattattaccatgagtataattttaagaatgaaaatgtttacagtattttcagttttattataaaaatgcacacacaacaaagattgtcatttcttggctctacttgcattcagcacttgttcttgagcagctttctttgcttttaccatctcgacaagttcctaggaagggagaaaggtgtgatttaagaagttgcgatttaaaaacagacattttaatctagtgtttggtgtaaagaattcaagcaactaagatagatagtactaaatatactgatttcattatctgccagggcctagaaagtttctaaggttgctcatttcttcctcataatattgaccccataactactggttttgaaataagcactatattattaaccacttaatagacataaaatatgagctatatcacccaagctacaatttaaaatacaacaatctataaacggcttaagtctgcaaccttgtatcggtttcatgcagtccttctttgtcctgccaggcaccgcttctgctattttttcccatctttcaggtgtatttactgggtatgttttcaaagcttgttccaaaagcttctgttcttctgttgtccaaggggtgaagtctgtatatggacctgattaagaaaaatttttatttgaaaactgtctttgaacatgttctcagacaagtcttgtggtccacaagtattcgctaagtgcccatttcaatctgggatgtgtcattttgaaaataaacttgtagagatgagagataaa

SEQ ID NO: 46206 - DNA, 4015 bp, Homo sapiens
gcgcggccccgaaccgccgccaggccggcacgggggaaggagccggtgggggtagggggtgcggtggggggtggggaccctccggctcttgggggtcccagtccccgccggctgctgagcgggtggggtggtggaggagctgcagagatgtccggccagagcctgacggaccgaatcactgccgcccagcacagtgtcaccggctctgccgtatccaagacagtatgcaaggccacgacccacgagatcatggggcccaagaaaaagcacctggactacttaattcagtgcacaaatgagatgaatgtgaacatcccacagttggcagacagtttatttgaaagaactactaatagtagttgggtggtggtcttcaaatctctcattacaactcatcatttgatggtgtatggaaatgagcgttttattcagtatttggcttcaagaaacacgttgtttaacttaagcaattttttggataaaagtggattgcaaggatatgacatgtctacatttattaggcggtatagtagatatttaaatgagaaagcagtttcatacagacaagttgcatttgatttcacaaaagtgaagagaggggctgatggagttatgagaacaatgaacacagaaaaactcctaaaaactgtaccaattattcagaatcaaatggatgcacttcttgattttaatgttaatagcaatgaacttacaaatggggtaataaatgctgccttcatgctcctgttcaaagatgccattagactgtttgcagcataccatgaaggaattattaatttgttggaaaaatattttgatatgaaaaagaaccaatgcaaagaaggtcttgacatctataagaagttcctaactaggatgacaagaatctcagagttcctcaaagttgcagagcaagttggaattgacagaggtgatataccagacctttcacaggcccctagcagtcttcttgatgctttggaacaacatttagcttccttggaaggaaagaaaatcaaagattctacagctgcaagcagggcaactacactttccaatgcagtgtcttccctggcaagcactggtctatctctgaccaaagtggatgaaagggaaaagcaggcagcattagaggaagaacaggcacgtttgaaagctttaaaggaacagcgcctaaaagaacttgcaaagaaacctcatacctctttaacaactgcagcctctcctgtatccacctcagcaggagggataatgactgcaccagccattgacatattttctacccctagttcttctaacagcacatcaaagctgcccaatgatctgcttgatttgcagcagccaacttttcacccatctgtacatcctatgtcaactgcttctcaggtagcaagtacatggggagatcctttctctgctactgtagatgctgttgatgatgccattccaagcttaaatcctttcctcacaaaaagtagtggtgatgttcacctttccatttcttcagatgtatctacttttactactaggacacctactcatgaaatgtttgttggattcactccttctccagttgcacagccacacccttcagctggccttaatgttgactttgaatctgtgtttggaaataaatctacaaatgttattgtagattctgggggctttgatgaactaggtggacttctcaaaccaacagtggcctctcagaaccagaaccttcctgttgccaaactcccacctagcaagttagtatctgatgacttggattcatctttagccaaccttgtgggcaatcttggcatcggaaatggaaccactaagaatgatgtaaattggagtcaaccaggtgaaaagaagttaactgggggatctaactgggcaaccaaaggttgcaccaacaaccgcttggaatgcggcaacaatgaatggcatgcattttccacaatacgcaccccctgtaatggcctatcctgctactacaccaacaggcatgataggatatggaattcctccacaaatgggaagtgttcctgtaatgacgcaaccaaccttaatatacagccagcctgtcatgagacctccaaacccctttggccctgtatcaggagcacagatacagtttatgtaacttgatggaagaaaatggaattactccaaaaagacaagtggttcaagcagcaaaatccttacttccagcaaaatccaaactgctgtctcttaaatctcttaaactctcttcttccattagaatgctacaagtaactcagtgaaggcccatgaagggaattggggactagtttataggagaacgtatcaatacagtttataaagccaagaattgctatgatttaagactaagatctgtctttttggtgactaacccttcaattctttcaactcctgttaatacccataatcagtaacctatcaagaaaagcccttatttggaaagtgtgaaatttgtatttggaaaagctgcctggagagaagaactgtgtccttttactgtatttcaacaggactcttttgggggatcaaaattaaaattcctaattatgcattatctttcttttctccagtcctcacaaatacagaaacaataactgaaattaacttttctttttttaaaaaaaattatattcagtttgcagtagacattccttaagtatttgtatttatttatgattatcaattttacataacattaatattgtatcagacctccttatgaaaatgagtatggatgtgcacagtatgtttgatttttatccacaaggaatgaatctggattcaggaatgcttttctcagctgacatacagaggcactaaatattttaagggcaagtccataggtctggaatctcttaagaattctcggcctctgtgggatttagggaagcattataaatgcattaatccttatagtcaattctgtgcctaggattttgccagggaaccagttcactgactaggaaagcactacattttaaattcagcattagtgcattggggaaggatctttactgctttgtgcttggcatgtcattattttccatttgacattagggcctttccaaaatgaatgtgaggaattgctttcacttcaagactttccttcttttcactaaaactctagaaggtgttacaagggggagggaaggggggcaaagtccttgaacattttctttggctcgtgccatgttatgatcatataccttttaaataaggggaaatagtatctttaaagttaatgtctagccaagagtttagtaaacgaagaattaaactgcactgttgatcggtgctttgtgtaaatacatctttaacatttgggtggagaggggccttaagaaggacagttcattgtaggaaagcaattctgtacatgagtttaagcattcttgttgcattgtctctgcagattctatttttgtttacaatattaaaatgtatgttagcaaaatgggtggattttcaaataaaatgcagcttccacaaaagttttgttatggtattctggtctgagatgcattttcatttttcctttctctttttattatcaatattgtcatttttccctaataaaatatacccaggtgattatatttgttgatctaataacatggaaggtttgttttatatgaattttcaaaaagatgtctctttacactttttgttaccttgtagactcttattgataaatgcaactacttattaaaattgttcactttttgtcttttgatcagatgcctttagtcaggtaagtttaagggaaaatacgcagtttaatgttttggtacatataattatgtctgccaaagaaacctttgattgtatcatattgcctatttagtagtgcatagggttcagagtacatgataaaggatcaaaagctttgcattgataagtgtctcataatatttgctgtgattggagaaaaaatgtagtcgtagccaataaattttatcagcttttaagtttcagtattattaaaccattttcatataaaaaa

SEQ ID NO: 46207 - DNA, 1584 bp, Homo sapiens
tttttttttcttgcagtattattagagcaaaataaatgaccaacatccacaaatttaacatttgtcatcaactcacatccaaaaaattaaaggaaacataattaatcaaaacagcagcaaacttaaaagggatttatttgtgatttcctatatatatttagcttgtaaatacaagactgtaaatgtattaagagacaatttctgttaaagttttcattgtgtttcacttcaagtactgcacaagttaaaatctgataaaggatttacattcggttatctgaaactccccatctcagacttttgttttaatgtggtgggtaacttcatcatttccatagataccaccagcaggaaagtgtctcttttatggcttctaggactttcattagttagtgtgcatacagttttcattttctatatcattgtcattatcattgctatcttcatcactttctaatgggatgccagtggcagctgaagcacctttagtttctcggtcaagaggaaaaaagccagttccactgaaagtgtcttgtctctggtagaagagtacatatgctgctttggacacaatttggtcttcagatgcagtggagacactactgtcatcaaaatagtaccattttccatcatctttattttttgcaaaagcagtatagtgtcctcctcccatccctccatagtggttggaaacagcaatcagattatagcggcaaggacctgcatttggattaattaagaattccgacatatccaagtcattgataggaaaatcaactaaggtatccaacttgtctctcatgtatcgactgtaagaaaatcgcttgagatgtactacaagtactggaggcagggaccataaatccaatttctttgtggcttgctgatgttctttacaattcggacaataccagggatcttcagcacctagcttttcttttgttgtaaaaagttcaatgcaatcttttaatttcacaaagggttttttaggaggtttatactccacactttcatgtttttcaaagtcctcagcagcattttcatcaaaatatctttttttcaaatcaggatcccaatccaaagcaagaaaagatctttcatctagcctaagctgcctatcatcaaatcttatatgcctggtatcatctttgatgtagttgatatcagtattgcctaagttgttgaactggaatgtaaacaatcgttttttgtgtcccgtgagttgacctttgcaagtatcctcagtacataatccattttcagaatcattatctcctccaactgaatcttcagactgactgttttcattctctgagggaagttcttgatcctggctggattcatcatctggctcatctgtttccatttcacttggtgagccttcttcatgtatgccatttgggccattcccattaatattttggtccttacagcagtgtagggatccttcagtttcttcagtttcagtagatattttgacatatcggcacattctcaagagcaggagattataaagtttgtcttcagtattgtttcgtggtacagccataagaaagggctgaccaaaaagtgaagaaccagtat

SEQ ID NO: 46208 - DNA, 818 bp, Homo sapiens
ttggagggctgatgtatataactatctattcgatgatgaagataccccaccaaacccaaaaaaagagatctctcgaggatccgaattcgcggccgcgtcgacctttagctctgcatcctggacctccatctcagacttgtataggtcaggctcgaagggaccactggttatccgcatggggccattgggcatgagcagaactgtaaatttaaactgggcaacaaattcaccctccttctcatagagaacattaaatggttgcagcagttcatgtttggcgcactccaccacacccatccgagccttcttctcatcttcaaatgctcttaaagtaaacggcatggcatcaaaacgcctttccacctcactgaagaaggcacgtgaagttttcattttcagtccatactgtttagaggggtctcgtttgtaaatagtggttctctgtcctgcatccttggccttgccctctcctgagctgacgagaacatccacagcatatacttcatgtacctcaaattcagctttttcatggtccttcttctgctggtctgtgggattctggataatggttttttctccatcgatgacatgctgcttcaactggtgtgacagcataccttctattggcgtgcagttaaatgagtgggcaactttgttccaggcttctgtcacttgtgtgttctgatttccaggtttgaccaggcgtagggcagcttcagcacaaaggtgagctgccttaataacatctgctttcctccctgttacttgggtcccctgagctacatcaaccacaaaagtgtgagctctcgtgccgaatt

SEQ ID NO: 46209 - DNA, 2499 bp, Homo sapiens
ttttttttttcctaagccataaaataaattttattccaaaataacaaaataaataatctactgtacacaatctgaaaagaaagacgctctaactgctcagataggtgctgcggtccagcccccagctggaggagaccctgagtccaacccaggcctcccgagggggccagtgaagggatcccacacccaccgcccctatgtagggcagggaagaaattgcaaaggacttgggggatagatgggaatgggagggcaaactgcagcacttgttaaattaattaaagaaacaaaccagaagcacaaaaacggggaaggagaggggagaaggagcaggtccagtgttcccaggcccccaattctgggggcaaatgttgccacttttagctggaccttcccagggaagtccccctttcccccttgtccaaactgagtccaactgctcacaccactggtgcaaacctaaagagaatgggagtgtgttgtgtgagggaggggaaaaccccagatgccctggaggcagagtccttgccccctcgctctgggcaggggtgagggcaccacgcaccctccttgtgtcctctctccaggcctctgcttgttattgcttgaagccccacagtcttatgcccatggagcaggtggggaggcaggagaagggcagaggaaggatccagggttgtgactagattccggggatggagagcgtgggggtctgtgtgagccagaagtctgaggtcctgggtctgaagacaccagtccaaccctcactgccggctggcctcagcctccactttcacgctgctcctgcgaccctccaccagcgcgggatggggtcctggggcaggacatctgtccagcagcccttcctcgaactctgcgagaggtggcttcgcaggcacacaggggctgaggcggcccacgcggtcgtgggagacgaggcgggcgagccgcagcccctcgtccatcagtgtctgctgcaggatgtgtcggctccatagcccatgggctggcaatgccagaggcaggtcagcagggggcggcgtcagccttggacatgaccccacagcctgcaaatgtccatccagactctccccagacaggctggcgctgtcctcctccaggctggggcggtatgggggtacataggactcagggcctgggggaggctgctggatttcagggtgactctgttctccaacctcttgtttcagcttcttcagtggagggcctcccagttcttcagggtgaagcctggagcccttcaaggaggacaagtaggtgctctctcgggctacttggcgggacaaagagaagagctccactctccgtaataagagcgtgttgtccctcatgcagaactgggcagcagcctcgttgatggtgagctcgtgcaggctgagctgcttgccctcccgccgcttagagtcgaaacggccatagatgatgctgtatttgcggatctcctcttccttctggctgtcattatcatccatctcaaagatgtgcccaacgctccgtgccagcttcttattcagctttagcagggatgtgacctccccagcatccccccttgggaagctccggaagatcctctccacactttccaccaccatgcgtaccatctctggctccagtcggtctggaccacccccagtcccacctgctgccagccccccagccccagtcccctcagggactcctccccctgcagggggggagaaggggggcgagccagcctcctcttctcctcctgccccaacgtccgactctggagtgctccggcctggccagatccgggggtcccctgccccaggtcccccaggcagtggtgatagcttctctccaagttcaagggggctcttggggctaaaactgcgggcactgcctgccttttcccctgggctgccatgcccattgctcatgctccctttccgggtacccgcagtctcagagatcttgaagagcgggatgctggagacgggaacagcaggcactggttgactgaagagccctggattggtggcccactctctcagtgccttctgcaggcgccggacatggaggggcttggtggccatgcccacaagtgccatgatctccagaaactcctcctcacccgcctcacacagctgctgcacgtcgtcccctccctgctggatgaaggtctcatagtaggaaaggaggttggcgcgctgcaggacccggtacagctgcagctcccccagcgtccgaggcagtgccatggctcgggcactgggcttgagtctgggctgcagggtccggcgggcgctgtcccctccgcccggcggctgctcggctgtgggggaaggcgctctgtgcatggacggccggagatcacccgggctgcccttcccggtgcccggcgctcggcgcctgctgcgtgctgccctcttccccgcgcacgatgccgtgtccaccgctgtccaggctctgtccctccctccacgtcttctctctccgagcctccgcgcctctgtc

SEQ ID NO: 46210 - DNA, 424 bp, Homo sapiens
  misc_feature (1)...(424): n = a,t,c or g
acctttgaannaccagctatgacatgattacgaatttaatacgactcactatagggaatttggccctcgaggccaagaattcggcacgaggtctttatgagaagggcagaaagatggactggaagatgcctgagcctgagggccaaacaagtcccaagaatgcagctgtcttctcctcagtgctggcgctctgactacccttcccaaagaaccacggccctctccctttactgttctatagccccagaactgggagatggcttcctaagttggctataccttgtccacttccagtactggacgtgctcagggtctagggtcacagatggtgctattaattgaactggaacacagcagaattgttgcaaaggttctaggagccagattcattccttcttcattctttgcaaaacagtggtacaga

SEQ ID NO: 46211 - DNA, 2263 bp, Homo sapiens
aacaaagggaaacagatacttgatatgaaagccataatgacggtgacttgtgtcgtgggggaaaacataaggtcattttctccctctactcacaatactaaagggaaaaaaaatggattcaaagctaggatttcagggcccagcagtgttcctccatcagcatgttagacaactacacagtatgttgttagttttgaaagacattcactcaaggaaaacaccatctcaactttgcccgctcaccatgtcccttgcccccatgtagcccatttcccaggttatgctcttttctttctcagggtcctctttggtgggcagccactccccgagatgttgccatcagttttctgcagtccaaagagggtatggttaggtacgggtcttcctgcctcattcctcttcctctttgtgtaggtttcagccacaaaactgtcattcactctaggggacccctactaaagggtaacttcaggtgtgcagccctgagctccaaggctctgcaccatgccacacacttgctgtaaggctagaagtgaagaccttattaataggagcataattgcgagggagaatcatggttctgcagtctggtgtagacactgggaataacagcacagaaaaatctatgactcccaatatcttctagaataaagaattttccctctttaacacaagggccctccttgtcattgaccttagctaaaccatggcaattcataaatagaggaaacattaatgaattaaaagcattccttattttttaactaatatttgtacattttcttagtctctttccaagtctttgcctcttttttttctttatttttattttttcctttgacagatggtatcccttcctggatcattcatttcaccttggtttctaactttaggtttactttcacttgttatttgacttagcaggtgcaacaaaaacaagaaacaaatgtgcccaccccactttccgcttaactgaaaagcttaaaataaatttctgaattatgtatcctgaagctttgaaatttctttattaatcgatgaaatatgaattctaaattctagcattgaagcttttcaccaaaagaagtctctccaaaataaatcttttgcagcaaagtgatatttattgagttatgtggaaaagatggcttgtatttttcagattattacaacacactgtgcagaattagacagatgttccgtggtgtttggtttccctttcttctctctcctgctcactctggcattatagcagcagcttatttctctaaggctgggacagctgggctctcggcagtgacgtcctccccacacctgggtcacaagtagtagtgggctgtgctatacccaggcatcatgctttaacagcgttttttgcccttctgaggcctgttgtacttcacttgatctctttaaaaacaaaaaataggctcttgttaaaaggtcacaataactctatgcacctgatactgcagtggttcctaggccattcttcatctgctctggacatctcagtcatacccaatgctcagtggatcatgaccaaactcctgtcatgtggatgcacgtgagtggggtagcagggagtcaggatcctgccttgttccagcaaccccttactgctgtataacttggcataagcctccgctggtgactcttgcaggaaccactccattgccctccaggttccccagccttctcagttataaacatgctgggccagatctcttagcctgcaaagagaactttccccagtcaccatagaccattctccttcctgaaggcttggggcagaccattcgtttatttagagaagagctatacattcttctttctggtcccatcttaaacgtcttctgttgtgctgcaccccagatggtgtctcagatgctttggggaatctttaacagctgaatttgagtcagtcctcttaggctgcacctccagcctctgcagatcccccctcatttcccatggatggtgggaccccattattctctcatctcggcattcagggaacagtttccttagcggcccctggtcacatgtcatcgggctgggcaggaagcgtccctgattgcgtgctccacttctccctctcaggaagcccagtttcatccttagtaccccccctcgtgcccgctgtcggctggttatagcacttccactgctactgtcagataggaagtgatcgaagcagggggcaaagagaaagcccaatatttgttctaagcagaaaagcaggaaaaaaaaaaaaaaaaaa

SEQ ID NO: 46212 - DNA, 3663 bp, Homo sapiens
attgcaacacatgcagctgcctggagagagggagccggtgtcctacgtcagagccgccgccgccgccggagccgccgccggggaggagcagccgctgccgcccaggactgggcccttagggaggaggaggcgagaagatggcggacgaccccagtgctgccgacaggaacgtggagatctggaagatcaagaagctcattaagagcttggaggcggcccgcggcaatggcaccagcatgatatcattgatcattcctcccaaagaccagatttcacgagtggcaaaaatgttagcggatgagtttggaactgcatctaacattaagtcacgagtaaaccgcctttcagtcctgggagccattacatctgtacaacaaagactcaaactttataacaaagtacctccaaatggtctggttgtatactgtggaacaattgtaacagaagaaggaaaggaaaagaaagtcaacattgactttgaacctttcaaaccaattaatacgtcattgtatttgtgtgacaacaaattccatacagaggctcttacagcactactttcagatgatagcaagtttggattcattgtaatagatggtagtggtgcactttttggcacactccaaggaaacacaagagaagtcctgcacaaattcactgtggatctcccaaagaaacacggtagaggaggtcagtcagccttgcgttttgcccgtttaagaatggaaaagcgacataactatgttcggaaagtagcagagactgctgtgcagctgtttatttctggggacaaagtgaatgtggctggtctagttttagctggatccgctgactttaaaactgaactaagtcaatctgatatgtttgatcagaggttacaatcaaaagttttaaaattagttgatatatcctatggtggtgaaaatggattcaaccaagctattgagttatctactgaagtcctctccaacgtgaaattcattcaagagaagaaattaataggacgatactttgatgaaatcagccaggacacgggcaagtactgttttggcgttgaagatacactaaaggctttggaaatgggagctgtagaaattctaatagtctatgaaaatctggatataatgagatatgttcttcattgccaaggcacagaagaggagaaaattctctatctaactccagagcaagaaaaggataaatctcatttcacagacaaagagaccggacaggaacatgagcttatcgagagcatgcccctgttggaatggtttgctaacaactataaaaatttggagctacgttggaaattgtcacagataaatcacaagaagggtctcagtttgtgaaaggatttggtggaattggaggtatcttgcggtaccgagtagatttccagggaatggaataccaaggaggagacgatgaattttttgaccttgatgactactaggtagtcgacatgggtccggcaaaacgtgcctcaccctccagcatccaacccaaggagcatacccatggtggaatccaaacagatccctgccttacaattggaacatttccagaacttaatccatgagcattggatattgaaaagaaaaccgaaacaaaaccagacccagccctacactttggtttgtcatggtgtcagcgcagcagcctacaactaagttcctaaacgccactttggactaatttaaaaaagaatcccagtttttacttttactggatggtgaaattggttgctcttgtattttatgaaaaaaaatgatttttttaaccttcatacatagaagcaaaaatactttaactgctgtaaaccttcaaaagttaatagaagtgagatcatactggtttgtttcttattttgattggagaaaaattaaattgctgcatttcgcagtgacccatttacatggcattctcagcttagactgcgtaagaagaaatatatgtggtgaaatgttggaaccatttctctcttggtctctgtttaatgttgaaagggtgagctaataggaggcactttcaacttcactccctcacgctaccccgtccccctccagactggcagtttcaaggatgcaaattgcattgcaaaatcaaactgactcatgaagcatttgggccagtgcactgtttacttccatctgtttgcagacacatttgtgcccggcgtttgggagccctttgtatcaatgttctgacaagggtccctataaccttaacctactcgaaaccggtttgggatggatatgatggggcttctgtgctattgctgggattgggagaaataaaacatgcaatttaagtggaagcgaagaaatttaaagaggattttattttgcttgggtcaatccttgttaaaagggaggtggatgtgttttccttgtgttggatggcatgagattatgtgaatgttttgatttattaaaatgaactgtcaaggtttttcacaggaacgacagacatgtatgactgcatgtaattataaactcctgacctcctggtggggttggagcatctgtttcaaatgtgggacttacaagcacttctcacatgagaaattaggggcgggtgggaagggatgggacacagcttctggcaccatggatttaagaccatgttggatccaaaagttggcctgaaaccctgaagctgatgcttcacagctgggctgtaagtcagacttgaacccagctgatatgcaaggtcatggcgtgcccagggtggtgacagttgaacaaagtgtatagtacgtgcccagtggtagcgatggaaaaaagtataccaaatggactttgaaggaccaaaggttttaaaagtcaattggtatcacctccacactgactagggtagtggggtgcatttggttttcaaattgggtacttttaacactttagtgcctgactgctgttctttactgacttgattcagtcactcgtagctttattggtctgaaccagctccttggttcccaggttacagacctgcctatcgttccaataatcctggtttcacttgaatgaagggagtatgtcttaaatgtaaagtttctggttctcacactgtactctgaggtccaaatactgtctgtcaatgtgtaacctgatgtctcaaccccctgtgagaagagtccattatttggtgttcaccaacgtgggagacttcaccggaacaggcttttttgctttgggctctgctatttgtttgcagaacacccaagagcgagcaaacatgctctcttcacagcagtaccttagggttttgccattgtaaatgggtctgatgtgatatgacaagaccagagaaattggatgtaaatttacatttttgaatatgcttgttgtttcacatgatacatttagggtatgcagctccttttgtagtttttatttttactatttaagtttggaaatgatgccaaatttttgtatttctttaatcaatgtgttctcttcggtgatatatattgcattatatattgatgtgtgtatcaatatatattgatatgtattacacttacacatacaaacacatataagagggggtgaaaaccgtagcctttgcattctctatagcctctgcagagagatactaagcagcaaaatcttggtgttgtgatgtacagaaatggagaagagtattaaaccatatttaagaata

SEQ ID NO: 46213 - DNA, 707 bp, Homo sapiens
ttttttttcgctgacagatggatgcatgtctttatttaattcgttcattccaggttcatcccacatcttcacatctcaccctcccaccgtcaaaacaggtcccatgtaacaacagggggccaaaaacaacaggcttgcccacagtctccatcaccccctaccccacggaacactgtggggacaacggtaccttgcttgaaagccacaggtttcaaacacttttaggggcacaactctcttcaaactggaaaccacgagccactacgtagaacaggctgtcagggagtttcaacctgggcaacatttggggtacgtccctggagccccaagttccctcagagcaggtgaaaactgcttcagagcccttctttctatccaatcacttgaaacgttccatagaaagaagaaagaaaaaagaactcccttcttgaaatgcgaataccaagatttcgcacgaccaacacttccacctgttgaaataaacagtccacaaaattaaggcatttgggggcaattagagggaagtaaagcatttactaaagttacaatatcatatcaaaagtgttcattatgcttttgaaggctcttaactaggcacaagggcagaaacagtcccggtcccggccactgcaggcaaacacgtgttgattaccaaagcagaaagggaaacagagagctggtggtgagcattctcttcctcgtgccgc

SEQ ID NO: 46214 - DNA, 570 bp, Homo sapiens
tataaagagatttctagagtgtgcaggaagctgaagtggctggttctaggagattgacagaattagctgtaagaaatcagagcacaaatctgggcaagaggaagcaccccagcttggttactagagggagaagaggcttgccaccaggaggaataagtacaagaaggaaacagacagagaacagttcctagagatttattataatctgtttcttctttggctttttgctttgccccatatgcacacatagtagagatttctataatctgcattcttctttggcttttgttttgccacatacacacacatactcaaataatcaagtggcctaaacacagagattagaaaccaatcagtaagaaatcagaagccctaccagtctacccctccccgaccctgcatctgatgtggagccatagtcaagtgcctaggaggaagacaagcttgaaggacgacccttaataaagagcttctaggaaagttcagagatctcagaagaacttggtgcacagccaaagcgctgacaaaggcctaggcgctagctttctagaacaactggaaaatagccac

SEQ ID NO: 46215 - DNA, 1973 bp, Homo sapiens
ttttttttttgaaattcaggcgatttattgtaaacaggataaccctagcactccaccatactggctgtgtcacatgctccctctttcacatcaactggtcaaaaaagaagactttcttaagaagcctcaggtaactaataacttagttccacaaatctcatttactaagcactgcgtaaactgcagtatctggggtagtctgttattgctcatggactgcagcttggacccatctaaatgaatccattagtatgcctgagtgatcaacagcagctctagatccaacctggaaattggaaaatgctgacgcataccaaacaattgcaggttcatggaagactacatgagattgctctcagatctcttcatgtgtcattctcataaaaaaaacacttaaatttcacccattttttaaaaaagagctaaaagttactcaatagcacataattttccacataaaaggtaggtggatttttatttactagtacagtggtggatcggaacactcaggcctaatttcagatctgtcttgtatatacttgcagtttaatgaaaagctgcatagtctacaaattccattaaaacccaggaaggaagtgatggatttcacacaccttcctgatggataaaggacaggcttcatataaggaggttcttgaaggtagggataaaaagatggttacagcaccacattgatctgacagtagaaatggagccccgcttttgaaagcagccccatagttgtgactatatcgttcttgcccaaaattgagatttggaaaatggcaaatgtaaaaacttaagatgtgaaaaggtatgactttacagaagaaagtcctagccaatcaaatcatatggggaggtaaaatgtccttcaaaaatgccattctttactttgcctgagttagtggatgacagggccacttactgttactagtgcttgtatatggaaatatattcacaatttctcttgaagcaagttttaataacagtaaatatttcaaaacagctgttaaatctacagtaacaatttcacctaaaatagtatctcatgaaaaaaatatttttttaaaagtctactccagtcatcatctgtgtttatatgttttttatttatatattcaaaaaataacttaacatttaaggcaagattagactggtagcaacaagggattttagagttttatgaagacctgctatataagaatgcaaggctttactttttatatttccaaaaaggtggctttgtattggctgccttttaaattcataaaggggcaagatattttggttcacatactgactgcaatttcactgtaataaaaagttatacaggtggttacaaaaagctgatgttggaaaagcatgtcacacactcagtaggatctgaagttgaccctatttgtacgtgttaaataaatatgttgtgttaaagcaatatgttgatgaggaaaagtaaaactcatggaacactgcaaaccaactatgaagaagtaggtcaatataattcaatcagaatgaaagaaaccacagtaatcctgagaaattcggtttaggacaaaattgatgtaaggtaagtctgtatttctagcattgtaaataagtagggttttctagcattttacgagttggcataaaaaacatgttcaaattttataaaaagattaaaaccatgccttatataaccagcatttcactaataaaagatgacattgctttatcatctgccaaatgtaatgttttccactgatttacatgaaaccatcaagtagaaagcaaatttgaggatcaatttttaaaaagttattacctttctaaatgttgtgaagccttctatgtcaagctaggaggcttttagaaaagagctaacttttagctttcttcggacaagtgcctattttacagaatagggaaggaaggttctataggaatatcattcattcttaagcattgttatattgggggaatttctc

SEQ ID NO: 46216 - DNA, 2907 bp, Homo sapiens
gtgaattaataaccctggggccagcattctgctgcagatttagaggtggtagctgtgcttatcttagaaactacagaataggatgaaaaattatggtaaaacttaatcaattaccaagttttataaggcttaattatataccaaatatgtaataccttaggtataagacaatctcaagtgctacaaaatgttaaataagaatttattatttattaacctatgcatgttcaaatgagtctctgtcctcaagggggagaaaactggttcttttatgtacaaagcacagatgtaggtacagtatataaacagatacgtagtacatctgtagtattaaaatggcattgggaggaggcagttagaaaaaacatctaaaacagctccttagaaggccaataataaagttggaaaaaagggagtttccacgcagccagtggtgagctgcatgggataccagcaccattggcaggggaggccctcggggagtgatggcttggcgctggcgcaccactgggtaacctccaggcaggagccacaggctggaacaggcgaacactttcttcccatcacctaggtggaaattaattctgccaatacttttttttaaaggccagtcaatggttatgagtggataggttcaaagctgaatggagttcattagaccttttttattattctaccttttctgcatatgtttgcagttttccatcgacttcttcataaacaaacattttctagaaaccaaaatatgtagtggcccaaaggagctcttaagcaaagtacttggtacaaagagaccatattctataaacatgttaagtttgttctaagcattcagacttttagaataagaacttcatttcaactttttattataacatgagctaaactttaagaaacaaccctagtcttctatttcccagagctgttcaaagtctaaatgacaatataactcattatgaaaatatactgaaaagtacaagagctgatgtaaaacggtaatcaaggttccaggcatcatgggattagggtaactgaagaataaacccagccaggctgcaacagcaggcaggatgtgctggcttgatgaggtgctaaggccatcgaatgctcagaggaagccggattcacggtgatcatctcaacctgagaaatcgttccttggggtgatttctgcccttttttttttttttgtaagaaagaggttccttcattcagtaacttagttttcccttaataaatatttcaaaaataaaaccaatcatcatcaaacaaacaggagccacttttgtaggtaaggtaaatcacaggataatgtattgggataactctgtttttttaaaataaaaaagccttacatggtcagggattgatggagtggggatgacaaatgcacatttcagactttcatcaccaatgaaaaaataaagcattttcatagacttaaaactgtcattagtgcattcggcttttggagaagggatgaaaatgtaaaatacttctacaacaataaaatgttaatagaaatcgtcatgtgctgaggtcattttagtgagctaccattgtttgtttaaatacaagaaaagtaatttcttggtccaaattagtgaaatctttaaaaagattgcctttaaagaacattatttgagggacaatgttttttcagacacattctgatgatattcaaattcacttcataacaatcacagattaacctttaattacacctttcttaaaaagctgtcagatttccatttcttcgggagacattttcaccagtgtgttgttcgattccacaggttaagctttcttcattattattaagaacttcatacatattagagagattgccattcattgctttctcgtcttttcgaaaagacacaggcagacttgctagactaaagctgacgtctttaaaggcatgcaacaagaatatccccacaatgattgtaaagaagccactcaaagtaccaatgacatcgtcaacaggcatatcttgccactccttaaaaagaatagctgaacaagttaaaactgatgttgtaaagaatacataatatattggagtcacaatggaagtgttgaatatatcccagggccctatttaggtaattaatctgtgtgctcacacagacgatgaggctcagcagcagaatccaagcccaggggatgccgcagcacaggcttccctgcaaacagctccttgatagcaatgcccaggcccttcacacaggagactgaaaacgcgccgattacagagcagattgttatgtacacaagaatgtttgtctgtccatggcgaggacccaccacgaagattaatatcaaggccacaatgaccacaagggttgcaaagaccacaaaacctggatcacctagcttgtgagacatttcatttaaagtctcaatctcctcttcctttggagcatgaatgaccataactgtagatcctagaatacttagcaaacacccaattttcccatgaagattaagtctttcattgagaaagtatgaagaaagaatggcacttactagcacgctgagagctcctagtggagtccactagagtggctggtgcaaacgcatacgcagcgaagttggccacctcaccagctcccattgacagcagtccagcccaccacaaccattccttaagatatgcatggccaccttgacctgctctcatagagcctttcctggcaagtcgaaggaggcccttttttttcaaaatgaaacttcctccaatgaaaatgctggagctcatagccaatcccagaccaatatagaagtcatattttccacgcccctggctcatttcgtttgttacttaaggagttcctgtgaatcacattgatcacagaacagagaaaccgctggtactagaggcagaatgaagcagcctcgtgc

SEQ ID NO: 46217 - DNA, 2015 bp, Homo sapiens
tttttttttgcaactgaaactgtttattgaaacctcagttctacaaaagcgtgaaaaaccctgatacaaagcagtggccagagaggcctgggaagagaatacctgggagaagaaccagaagagagggaaacctaggagcaggacactaagagaagactggaagacaaaagatcagggttgaaggtcccagcagtccttggctccattagactaaagctaaggaatgggagtgaaaagggttccctgcctcacccagcagctcccacctgaacccatcagtccccggctcttctgcctcagggacatcacacaggcccatgccaacatttcctttctcctctcaccccacttcccttatctcccacctatactcttccatcctagggaaatcaaaagtaaaagtctaaaaaatcccagggaggcagagaggggcttctatgtccatctgggacatgtccctggtcaccaaggcggaagctctccctggtggcatcactgtcctggccaagcagccagccactgcgatctaggagtgaattaccttcagtccttctgccccaccaccccataagctcccacccaggaggacaggggacctgccaaggacccagcgaggcagacaggatctgaatcaagctttgctcctccaggttctcagaaactcccaaaccctcttaatgcattcctcacagccctacctagcctgggaaaacgaaagacttgaggcgagccagctccatgacactgaaaagggaacattgctgaggctgaggaagtgaaaggggcaccgggctccaaggccaggggggagccaggccataggtatggtaccaggggctggacagcgcagtggggactgtacggttggggtggaggcaggcatggcaggttggggagtctctctggagcttctggcaaaggtggcagttatgaagaagagtgggaggggcaggggggtctgggggaggcaatggtggaggagtcagtgaggccagaagactgccccagagtgaccgcagccccatgctgccttcccaggcagctggagacattagcgggagacggcaggcattgtggcacagaaggtatgcagggctccaggaggcaacgggaggtcagtccaaggtcaggcggcccaggtgtaggggtgcaggacagccccaaagactgatgtattacggccaccgatgccacagccagggccacactgctcacatatgccacagctaacaggcaagacagctttaccagccgctggcagagggagcccagggccaactgccaggtcggctgctccagcagcacacacaggtctgtgtaggtgtaccagcctcgccaccgtccctgctgctcagccacacagctctccaaccagctcagcacctcaaagatctcccgagggtcagtgtagagatgccaatccatggcactcaggaagcccctctccaaggcattgagagtgggcacggccacacccccagcagctccccattcgtcgttgaagacctcctcctcctccccttcatcatagaggtacttactggccaccatcatggagatcaggaacaagtcagaggatgacacatgctgcaagtagtctgggtttcggtgccggagccgttcaatgtacaccagagccagcatcatagcacatggggagatgcatgcctcccgggacacatgagctacatatttcttctggagtcggcgaatagggctgggggctgccttctggagcagttcgacagcaatgtctgccaccgggctggagagctcctccaggctacagtcggcttcccagtcccagccatagtagagccgtcgttcggatccgggcactcagcttctggtgtcctgggaggaacgtgaagtcctggaagccggcgagggagaaggtgccttcttcgtccagcaggagcccggtcaggtccatcgcgccgccagtcgccgccctgcgaaggtgaacggaaggaaacgagttgtagggggctcgcggagctgtccttgcccgcctg

SEQ ID NO: 46218 - DNA, 563 bp, Homo sapiens
attttagacaaaaatgcacactccagtattaatatttgtgctaccatctacttggagaagtttaatgagaaaattttagaagaaaagtattacaaacaatattttgactctattacctgttttgccttatacattttagaaactggaaattttttaaagaaaatgctttagttttcttctgttcttcactgtctacagtgtgcttttgtatatggatcaggactgagcaaagtaattacatgtatcagagatacttatctctatactaattcacagacagctcctgatgtaaggatttagagggccttctgccctctgaatatatggtgaggagaatggggtatctggaaaaggaaaatgatctggataaatctgagacctggggggaagtttgttttatatgttcattattggttgttacatatcaaggctgttttggttatgtatcaatattgtggtttatttgagctggaagtgattttttctgtgtatgtatatgtatacacttcaataggttttaattttgaagtgaatatttgccatgactccattttccccatacc

SEQ ID NO: 46219 - DNA, 1571 bp, Homo sapiens
  misc_feature (1)...(1571): n = a,t,c or g
aaactattattttcttgctaatgtaacatttgtctgttccagtgatgtaaggatattaagttattaagctaaatattaattttcaaaaatagtccttctttaacttagatatttcatagctggatttaggaagatctgttattctggaagtactaaaaagaataatacaacgtacaatgtctgcattcactaattcatgttccagaagaggaaataatgaagatatactcagtagagtactaggtgggaggatatggaaatttgctcataaaatctcttataaaacgtgcatataacaaaatgacacccagtaggcctgcattacatttacatgaccgtgtttatttgccatcaaataaactgagtactgacaccagacaaagactccaaagtcataaaatagcctatgaccaactgcagcaagacaggaggtcagctcgcctataatggtgcttaaagtgtgattgatgtaattttctgtactcaccatttgaagttagttaaggagaactttatttttttaaaaaaagtaaatggcaaccactagtgtgctcatcctgaactgttactccaaatccactccgtttttaaagcaaaattatcttgtgattttaagaaaagagttttctatttatttaagaaagtaacaatgcagtctgcaagctttcagtagttttctagtgctatattcatcctgtaaaactcttactacgtaaccagtaatcacaaggaaagtgtcccctttgcatatttctttaaaattctttctttggaaagtatgatgttgataattaacttacccttatctgccaaaaccagagcaaaatgctaaatacgttattgctaatcagtggtctcaaatcgatttgcctccctttgcctcgtctgaggggctgtaagcctgaagatagtggcaagcaccaagtcaggtttcccaaattggcccctcagctgctttaagtgacttcggcaccctgcctcagcttcagcaggcgtaggctcaccctgggcggagcaaagtatgggccagggagaactacagctacgaagacctgctgtcgagttgagaaaaggggagaatttatggtctgaattttctaactgtcctctttcttgggtctaaagctcataatacacaaaggcttccagacctgagcgacacccaggccctatcatgaacaggagactaaacagaggcaaatcaaccctaggaaatactttgcattctgccctacggttagtaccagggactgaggtcattctactggaaaagattgtgagattgacttatctgactgcttagaccgtantaggcaggagctangcactagaaattgcagttagagcaaagttttaaatagtctctgaaatctgtgagcgtgtgaatgggacactcagtnggttcttgtaaatcagttggggagaataccggtgtattaaaacaaacacatgtttttttgccgcgcattttttgtcttataaacaagggtgtaaacccgtcagacacattatgtgtttgggtgtccagatgcgaggcgcccgagtccttgacacgcaggagtggtacagta

SEQ ID NO: 46220 - DNA, 1110 bp, Homo sapiens
ggcgcgcgctctggagctggatgtccaggctgcgggcgctgctgggcctcgggctgctggttgcgggctcgcgcctgccgcgactcaaaagccagaccatcgcctgtcgctcgggacccacctggtggggaccgcagcggctgaactcgggtggccgctgggactcagaggtcatggcgagcacggtggtgaagtacctgagccaggaggaggcccaggccgtggaccaggagctatttaacgaataccagttcagcgtggaccaacttatggaactggccgggctgagctgtgctacagccatcgccaaggcatatccccccacgtccatgtccagggagcccccctactgtcctgggtcatcttgtgggcccggggaataatggaggggatggtctggtctgttgttcgacacctcaaactctttgggtaacgagccaaccatctatttaccccaaaaggcctaacaagcccctcttcactgcattggtgacccagtgtcagaaaatggacatccctttccttggggaaatgcccgcagagcccatgacgattgatgaactgtatgagctggtggtggatgccatctttggcttcagcttcaagggcgatgttcgggaaccgttccacagcatcctgagtgtcctgaagggactcactgtgcccattgccagcatcgacattccctcaggatgggacgtggagaagggaaatgctggagggatccagccagacttgctcatctccctcacagcccccaaaaaatctgcaacccagtttaccggtcgctaccattacctggggggtcgttttgtgccacctgctctggaaaagaagtaccagctgaacctgccaccctaccctgacactgagtgtgtctatcgtctgcagtgagggaaggtgggtgggtattctccccaataaagacttagagcccctctcttccagaactgtggattcctgggagctcctctggcaataaaagtcagtgaatggtggaagtcagagagcaaccctggggattgggtgccatctctctaggggtaacacaaagggcaagaggttgctatggtatttggaaacaatgaaaatggactgttagatgccaaa

SEQ ID NO: 46221 - DNA, 3018 bp, Homo sapiens
cctgaatccttggagactgacatttttcccccctaaaggcatagacaacaaaagaaattttattgagaggaaaacacaagtccttaaactgcaaagatgtttgccaggatgtctgatctccatgttctgctgttaatggctctggtgggaaagacagcctgtgggttctccctgatgtctttattggaaagcctggacccagactggacccctgaccagtatgattacagctacgaggattataatcaggaagagaacaccagtagcacacttacccatgctgagaatcctgactggtactacactgaggaccaagctgatccatgccagcccaacccctgtgaacacggtggggactgcctcgtccatgggagcaccttcacatgcagctgcctggctcctttctctgggaataagtgtcagaaagtgcaaaatacgtgcaaggacaacccatgtggccggggccaatgtctcattacccagagtcctccctactaccgctgtgtctgtaaacacccttacacaggtcccagctgctcccaagtggttcctgtatgcaggccaaacccctgccagaatggggctacctgctcccggcataagcggagatccaagttcacctgtgcctgtcccgaccagttcaaggggaaattctgtgaaataggttctgatgactgctatgttggcgatggctactcttaccgagggaaaatgaataggacagtcaaccagcatgcgtgcctttactggaactcccacctcctcttgcaggagaattacaacatgtttatggaggatgctgaaacccatgggattggggaacacaatttctgcagaaacccagatgcggacgaaaagccctggtgctttattaaagttaccaatgacaaggtgaaatgggaatactgtgatgtctcagcctgctcagcccaggacgttgcctacccagaggaaagccccactgagccatcaaccaagcttccggggtttgactcctgtggaaagactgagatagcagagaggaagatcaagagaatctatggaggctttaagagcacggcgggcaagcacccatggcaggcgtccctccagtcctcgctgcctctgaccatctccatgccccagggccacttctgtggtggggcgctgatccacccctgctgggtgctcactgctgcccactgcaccgacataaaaaccagacatctaaaggtggtgctaggggaccaggacctgaagaaagaagaatttcatgagcagagctttagggtggagaagatattcaagtacagccactacaatgaaagagatgagattccccacaatgatattgcattgctcaagttaaagccagtggatggtcactgtgctctagaatccaaatacgtgaagactgtgtgcttgcctgatgggtcctttccctctgggagtgagtgccacatctctggctggggtgttacagaaacaggaaaagggtcccgccagctcctggatgccaaagtcaagctgattgccaacactttgtgcaactcccgccaactctatgaccacatgattgatgacagtatgatctgtgcaggaaatcttcagaaacctgggcaagacacctgccagggtgactctggaggccccctgacctgtgagaaggacggcacctactacgtctatgggatagtgagctggggcctggagtgtgggaagaggccagggggtctacacccaagttaccaaattcctgaattggatcaaagccaccatcaaaagtgaaagtggcttctaaggtactgtcttctggacctcagagcccactctccttggcaccctgacaccgggaggccttcatggccaacaatggacacctccagagcctccaggggaccacacagtagactatccctactctaagcagagacaactgccacccagcctgggccttcccagaccagcatttgcacaatatcaccaggcttcttctgcctcccttggtaacccaaggaatgatggaatcaacacaacatagtatgtttgctttccttacccaattgtaccttctagaaaatcagtgttcacagagactgcctccaccacaggcatcctgcaaatgcagactccagaatccccagcatcagcgggaaccaccatcacatctttattcctcagcccagacactcgaggcactcaacagaatcagccatccacgtctaggtatcagagaggaccacaaatacaacattctccatctgctttcagagttattattttaataaaggaagatctgggatgggctggtgggccattccagcttgccgaaatcaaagccatctgaagcctgtctctggtgaacaaacttcctctctggcctctcaggaatcagggtgggcatggctcacaacagcagggccttcttctttttgacgtgcagaatctcagtggcatctgggttcacctccccactctgatgatctccagcctccactgcttctgccccccgctgctgaaatcaaacattaccccaagttaaaatgaagctcccccacccccactcccggccccgggttcccacaggacacgctaagaagcacagggagcatttaacaggctcaccctccctttccttttcccctcttctaccctccccaagaaaaagggccttcaaggcaggaatgagaaagcaaagccaatctctcatttagacctggcttctttcttctgaacaaagtagggttcaaaatgcagactgtcatatccagcgagtccctgaccctttctgcgaatgtaacgagcaagcagtcagcacagcctgggctgccctggcccgggattgatgtagccccggtaggtttgcctctgcagaactaatggctgtgacttcagagaaagccctgcaggaagtttaacctgcgtgtcatctgcctggtcatctcagacccatgaaattaggcgccttgtttgagctgcgtttcacacttctttagagctagctgacctttggccaaaaataaactttgaaaagaaaaa

SEQ ID NO: 46222 - DNA, 451 bp, Homo sapiens
aatggcccagccccacatggcctgcagacagtgctctgtaaatagttgttttaatttagctgaatgttagcattttagtctttggcattttagcgtttgggaggtagattaataaagtatattccttcaagcctgctgttgataccatgaagactgggcgcctcagtcccagccctgtagctgtgtgtcttgggccaccagtggcctgcaggacgaaggtactgttccatcacctgcggtgtgcctcaggatcaccaggtgcaggcccccaccctcggagatgctgctgcagtgagtggttccactgcctggataacccttgaggaacacgtcagttactgtcacgatggggcaggtggagctccttcctattttttggggtgctccctgtttgtaaaggggagtttgttcattgggaaagacctgggtcttgacacggccctgccactta

SEQ ID NO: 46223 - DNA, 4685 bp, Homo sapiens
ttttttttttttttcaagtattactatctttattatggtatacagcagtattttatacattagctcattttatagtaaaaacatttatgcacaactgtagagaaactgctgcacagatagctccaacttaaattagaaaatattttctttgtagaaaatagtaaaaattataacatttaccaagctaacccaacaagttcatttaaaccaaaaagtagctaaatacattatacatttataaatacaggttgaattctgggatccaggagaaactttagtcctttattgaaatagccatgttttaagttatgtgaagtgaaatttctattaatcttctctcttactcttaatttatgccagattatttttctttaggctaaatcccataatccacaacaaggttttagctgttcttttctaaaggacgggtaccatatccttttaatctgcttgataaggtacccatgcctatccaaataatgaaatggttcagttattattaaagcatgcccagtatttgggcaaaaccagaatctaataaattacactgtcacctaatacccatggcttgatgggaagccatgaggaacaagggtaaagtgataaaactggcaagtggatcaaggaataaaagccaagagaattctgagaccagagggcaagaaatatctagtcgggattcaaggacagaactgaagttcaaatagaaaaagaatgttgcctcaaggattaggagctgagctggctatcagagctcctagtacatggtgatcaaataaggggcagttagagataaagactggattaagcaagagaaatcaggaccaagaaagattccggggtattccacaataatttaaatggaaaacaagacagaccatgcagctttaaatttcctagcatagtagttcccaggattcctcagtacagaaataatctctggaaattaaggcgagaagataatgcccactcttaagctcctgtgctatgtagaatgtttcccagagaaattaatatcctgagaaatcaggcagttatctggccagggggctacatcaggttcttcagttccctcaaaacaacttaatcacatacagtttgtcttaaaaggaagcctccaagcagctaaaacaaactttcaacagacattcagtttaacagatcctatactgtggctttaggaactaggccactgactacctaaaaaccccagcttgcccacttgaagttaacctctagaaacattagtgatctgtgaagttttcaccattaaaacaatgctttatcatccaaatcatacttgttcttctctttgctttccagttatgaatttgttacctttttgcatttgattatttccagtggtttggttcttttttttttttttttttttacatactcttgagcaatgctaatctgcgccccttactcccttaagtccttcttggtaaataatgttaatcttccaataggaagaagtggagtacattaccatttaagcaccatttatccagcctacttacaaataaagctatggagccaccttatacatgtgaaattccttaaaaccctggctttctattaaaatgtacttttatatatactatctatgaagaattcactaaagcatgaatcaccttataatgagaagctaaaaatgtatcaaaacgaacataagtataggtaatccacatcaaacatactacatcttccaagtctagagcatacactggtataaactgtattacaacccagattagtttgaaatcttgtttcaaaacattgctcagtattaagtctcagtagacaaataataggaccacatgagaaactgttcggcaggtggctgaggaaaccttaacttccaaaggctcaaagtggtcctccagagactgttacactcccttaggtatttatttcagggaaggacactattaagggacacttttgagtataaagacaggtgaactcacaaagtataggcagatacatgcttgattttatcttctaatctacagataatacattagaataaaaatgtaatgaattcatacacctttcaaaaggaaaaactgatgaagtaacaataaagttataaatgataatgatcagatgaaataatttaaatgaagcttgtctgtgtctgaaagagacagggacttggcaagtggtcaaaaggaggcacaatgtgcttttaactttgcatgaaaaataatgttcagttctatattgccaaacatcattctctttttgctatataaatcttctatttctaattattgaccaaatgctttactgaaactccgcttctggcctttgttttgggatctgttacttttgttgccacctcctgatcgctgtcctctcgggcctctactgccttcccgctgtcctctgaatcttctgtttccgtcccgctgtcccctgaagcctcgactgccttcccgctgtcccctgaagcctccatatccttcccgtggtccttccagttctggttgctctgtggccacagagagctgccagcgtcgtgaatcatgccatttctcctgtatttctgttactgatgcggtaggtacatcaaagcaaacacccagctttcctttgagaaaaaccattcccttcactttggaatcaatctccttcgcccagctgcttctttaagttctttccaagcataactaatatttggcatttcaattgagcactgcaagatcatggtcacaaaacccacatttgagttgatcaaggagcgctggtctacggacgtggcacctgaaatatgggccagtgctgctgccagagcttccacagctcccttctcctctatcagcttctcagctgattgtttgaagtgactaatggcagtgggaggcacggaatccaaaagcctgatggcatctttgctggaagcttttattatttctgttgcagaaggaacacctattcgtttgaacttaattcccgctttttgctccacttgtactaactgatattcttccttgtgctgataaaagcagatgcacacccccgtccttccagctctgcctgtccgcccggatcgatgaatgtaggactctacatcctttggtggagagctttgtataaccaaatcaacctcagggatgtctaacccacgtgcagcaacattggttgccaccaaaactccaaaactaccatttctaaaacctttcagggtgatttccctttgcttctgtggaatgtctccatgcaaggactgagcatcctgctttatagctgaattctgggacagctcctgggcttctttcttggtttcacaaaagatgatagtgcgtccttgatgaccactatatactcggatgacatccccaataactgctgccctctgagtccagtggcacttaatagccagatgctccacagttattgccgttttctgagtctttttaccaatcaggtccacctgttcatatgtagatttcatgtatttcttggcaacattaaatacccaatgagggcaagttgcagaaaaaagcaatgtttggggattgtcttcagaatctttcttgtatgccacacttaaaatctcttccacttgatcagcaaatcccatatccaacatctggtccacttcatccaggacaacatgcttaagtttggtgagatctagtttgccattctgtatgtggtctttgatacgacctggtgttccaaccaggatatcaatcccattcctcatgcgttcaaattgacctccatagggagttccaccataaaaacaagccactgacagcttttttgtgatgtcactgaagtctttgcttacttgatttgccaactctcttgtaggtgcaagaaccagtacctgaggggcacggcctctcttcctgtcttgcagttccccatgaagtttctcaatcaaagggatggcaaaggagaatgtcttcccagttcctgtccgtgcctgtgcaattaagtccttcccgctgtaaacatgatggaatgtctttgcttgtataggaaataggaaggtcactcctcggcctttgagaagtttaatagtttcttcagatatgggaaaattagagaaagcgccttctttttgttccacaggtatttcctgctctatctcactgttactttcttcactggcagcttcactggggttacagtccggttcaggatgaggaaatccattcttcagtttggggcttttctctctagtttctccattcatttccttttctttcttcatcttcttgggcttaggagcatctatttcttcctcagaaggctcctcattttttgtcacttttttggttttagaagaaaccactttcttttcaatgggctcctttttctttctcaaacttttggttttaggagaaatgtcattttgagatggctcctctttctttttttgcctttttggatttaggagaattcatgtcaacttcagaaggctctgctttctttttaacttgtttagctttggggaaaacagtttcttcctcttctgctatctcttcagtcttatcagattttggcttctcttttttctctttctcctcgatttgctttcgcagtgtctccccttttttcattgcggtgtctgattccaaaccagcgtcactacggagttttcccggcatcttcagcgcaggttgcccaggccgaccggtcttctcaaccgcgtggagaggaag

SEQ ID NO: 46224 - DNA, 376 bp, Homo sapiens
gcggcccctggaggaggtcatgcagaaatacatcagatacgcggtgcagtatgacaaccactacaccaacaccaagtactgcttgtgccagatgctacgagaacagctggagtcgccccagggaaggttgctccatgctgcccagtcttcccgggaaatttgtgaggcctttggccttggtgccttctatgaggagaccacacaggagctggatgcccagcaggccaggctctcagccaagacttcagagcagacaggggagccagctgaagatacctctggtgtcattaagatggctgtcaagtttgaccggagagcatacccagcccagatcacccctaagatgtgcctactagagtggtgccggagggagaag

SEQ ID NO: 46225 - DNA, 899 bp, Homo sapiens
  misc_feature (1)...(899): n = a,t,c or g
ggcgtgagccaccgcccgggcaaatttttgtatttttagtagagatggggtttcaccgtgttggccaggatggtctcaatctgaccttgtgatctgcccacctcggcctcccaaagtgctaggattactggcgtgagccaccactcctagccttaatgcatattcttaaatatacaaaggtagatttgttatgaaaattgctttggggctctaataacctaccttttaagaatgagaaactgctgggcttaagggagttcagtatgaatcaagattgaaccattcaaatgtggctgtgatttctgcatatatcatagatgggatccttctgagaatactggaatagggaattaggacaccaagccaattcagctgtgaaccttattcttgtacttttctttcttgctggtaattttatggagcaggttaagaaggctgctctgtgttaggataaactgtataccaataatgttgacaacctgtaatgagtgttgcattttacttcttgtatcttttccttcctaccttgatgccagtaatctataagggatctttatagtttgaatgtatttgaataacttcagtatactttagttctacttttttatttgactcacaaccattcttaggtctcaagtattcccatgtgttttaaaagcctgaagtcagtgagatgaaattcaacatcaagaatttgaagtaacttgtaaggaaaaataatataaagataccattgggggcaaggtcgcacgcctgtaatcctcagcactttggggaggctgagggtggaagggatcacttgaagcccagagtttgaggaccagcctgtgccaacacaggcaaggaccccgtcttcttacaaaaactttaaaaaatttggctgggctgttgggtntttg

SEQ ID NO: 46226 - DNA, 1214 bp, Homo sapiens
  misc_feature (1)...(1214): n = a,t,c or g
tgtttttttttttttttttctaattgcatcactttatttcaccgacctccactctggctcccaccccacaagcctcagagcaggaaacaagcttggctgagatgcctcaggcctggtaacctgaggtgtagagcacccagaaggaagggtaaaagcagggggcaaagcggtggccctccctttctgggggtcacttctgggctggggccagctgaaacctgtgtccaagtagctttcagggctggccacaccctaagccttgcaaaagggcctcctgcaagggctggcccatggggtccccaccttcccagccagtgaggttagcatggttaggagtccacatgtgtgcaagtgcttgtgtggaggctcatgtatgcatgtgtgtatatgcaaagctgcacatgacaatgtgcatgccagtccagagttagatgtacctatgcagttgccctcaagcgaagggtcatatttggaaacaaggatggctctaaacatgtaagcgtgcatgtgggcatgtatgtatcctggggccctaaggaggtggggaagtgggtgttggggtaagggctggccttcagggcatttgcagaaggaggagtgggtgggagggaaaggctgggcagagcaggggaaggagtgaaagcccaggcaggaaagtggaagaacaggagaagctcatgtaatggattaccctccacaggattatgttccttgattcctgagagttttttctcttgattttaccccctcagtctatcactgcaagagaaagaggtagaaaagaccaaacgggaccacaaaagagacaagcccccagacattatagacagacgcaccttgttgcatgtgcatgagccagagcctgggagagaagagagagcgtgcaaaagagagctcagagcaggcaggcagcccaccccctgcagcagtgctgggcttcactggagcccctgcaggaagtccagcagccctgtatgccactcctctggtttgtccaggtaacaggggtgccccgcccccttcatgatcagcacccggtggttgggcagctgcttcaggtgctcaaagctggtctgacccatggggtcctggtctccatatacaatcagagctggagtcttcacactggcatagttggcagcattgattttgtcagtgcagatgggggccactggcaacaaagcccgggagctgggagccagggccgngtcgac

SEQ ID NO: 46227 - DNA, 983 bp, Homo sapiens
  misc_feature (1)...(983): n = a,t,c or g
caaggtcagaggagactatatattccatggctgccatctaagactaggaataggaatatctgaaaacagcatttctaagggtggtaaccacaggtcgattttaatacgagtcctttttcttgtagaggtaagtaaaatcttcctgacaaggtagtcctcttttcacggcacagacaatgggctttctgtttatgaggggtgagaagtgatgtttgttactatgttctccagcaagtaaacattcctctgctcacctcccaacaagactaacagtctttttagaagtaaatatattcaagacaaacgagaaaatcctggctacccaagtcgagtatatacaggaatacaaatcggtaaccagcagctgttcctcaggttgtgactcactgagcaccacttgtcctggaggctggatgatggaggacatctggttataggtactgtancagggataggtgccacaggaggataggaactacagcagatcgctgtttccagaacggggaggagtatctcattgtgaaacagactctagagtggttctatttggtcttcagtgttttagcctcattagttcatatttggcatgcagcttgtggtgagtactgttctaggactggccaaaaatgggcaaaatgtatcactccaaacactactgattcagcattgttttcatgtcttaaaattgccacctgcactttgtttctgcactattatgtagtgcattttaacttaaattttttccagcaacatgttacttatttaagatacattactgatatttcattataattagttcaccttccctgtgaaacaagagaattgtaaaatgttgtggaaaatgatacatatgtggatgctaatgaaatcatagtattttgtgtagcttctctgaagaccttagagacctgcagctttggtttataagtgtttggccttatcagcccatctgatccagatcaatatttttttgaaaaaaaaaa

SEQ ID NO: 46228 - DNA, 695 bp, Homo sapiens
ttttttttgaggttgatcaaaaacctttattctggtcctcatcattcaggaagccacttatgcagaacactttcttcatctctgctctaagcagcagcagctgcatccaggcttgatatggaagacagacagaaatagtggaagaccttgcagagaagagctaattgatgagatctctgcttatcccggcataggtgaaggcagaacaggaagagtgtgtgtaagtgcaaagactccgttcttcaaagctgaggcctgtgcagaggggtgaactgaaggcttcagatgaaggctcacaaaactgccccgctcggcaatcaatctaaagtaccttccagaaaagcaaattcatccacagcttctattgcattatccaagtctctcctctgaagggttttcctttttccctgctgagcgcaacagtaggcatcttttgcaatggtctccacaaacagttccgcggctcgtgccagaatgaagatggcttcctgtcccgctagcgtcacgtcgggatctgccttcaccaaggccttcactcgcgccagaggcaacctcgagagacgagccccaggcacactcgttggggcctggggctgcgaggccgctgcctccccagcaggtccctcctcctctcggggcgtcccgcttcctgccgccgccgccgccgccatcccggccttgagcgtgctgcgcgc

SEQ ID NO: 46229 - DNA, 891 bp, Homo sapiens
gcggccttcccaacatggcgcagtctattaacatcacggagctgaatctgccgcagctagaaatgctcaagaaccagctggaccaggaagtggagttcttgtccacgtccattgctcagctcaaagtggtacagaccaagtatgtggaagccaaggactgtctgaacgtgctgaacaagagcaacgagggtatggggtaggcgggtgagggtaacctaaagtggcgaacctgcttctctcgtcccacctcctaacccagtttttcttacctgaaacgagaaaatccattacatatcgtataccgcttcatgaaccctttgcatgttgcctgcctagaattgaaaagtacaggacattcctctgctcctattgcccctgtttccgttcttttcacactgtctgtgggtgctgtgccctgttggaactctctttaacgtcttacgttggagccgctaaccttccccaggtgtttgtcttcattgctttcacagggaaagaattactcgtcccactgacgagttctatgtatgtccctgggaagctgcatgatgtggaacacgtgctcatcgatgtgggaactgggtactatgtagagaagacagctgaggatgccaaggacttcttcaagaggaagatagattttctaaccaagcagatggagaaaatccaaccagctcttcaggagaagcacgccatgaaacaggccgtcatggaaatgatgagtcagaagattcagcagctcacagccctgggggcagctcaggctactgctaaggcctgagagtttttgcagaaatggggcagagggacaccctttgggcgtggcttcctggtgatgggaagggtcttgtgttttaatgccaataaatgtgccagctgggcagaaaaaaa

SEQ ID NO: 46230 - DNA, 714 bp, Homo sapiens
gggaactgctggacatgggcagtgggcagctgctggagaggaaggtcctaagtacagacagggtacatctgctagaaccgccagcccccggcatggaggatgaggaagagctggagacccgagggaatcttcgtctgctttcagccttgggtctgttttgtgtgggctgggaagccccacagggtgttgagttgccttcagccaaggatctggtgtttgaggaggcctgcgggtactaccagcggcggagcctgcggggtgcccagctcactccagaagaactgagacacagcagcacattccgggcacctcaggctctggcctccatcctccagggccacctgcccccatctgcactgctgaccatgttgaggaccgagcttcgggattaccgaggcttagaacagctgaaggcccagctggtggctggggatgatgaggaggctggttggactgagctggcggagcaggaagtggcacgcctgctgaggactgagttgataggagaccagctagcccagctcaacaccgttttccaagcccttcctacagcagcctggggtgccaccctcagggccctgcagctccagctagatgggaatggcaagctgaggtcccaagcaccccctgatgtgtggaagaaagtgttagggggaataaccgctggaaaggaaccccccaatgggaatacttgcccccctttgaactcctgtg

SEQ ID NO: 46231 - DNA, 985 bp, Homo sapiens
cgcgtccacagtgccaccctggccatcgcagagcagcacaagcgggtcctgctggaaatggagaagaacgtgaggctgctgaacaagggcacggaacattactcgtatccctgcacacccacgaccatgctgccgcggcgatcctactggcaccacatcactggttcccagaacatcgccgaagcctccagctatgctggtgaggggtatggggcagcccaggccagctcggaaacagacctcctcaacagattcatcctgctaaagccaaagcccagccagggggacagcagtgaggccaagaccccatcccagtgaccacagtgctggcgagcaccgatgactgctgggggctgcctgctgcggggctggctgcagtgtaccgtggacagcctcagggggctgtcggccaagagcctggagaaagggagcaagctgccccctccttgcccccaaggatgaggctggactgaggcaaagggctggccacaccacctgagcatgtgtgaggggttggagctaccgtgggactatatactgttaatgattttaatatatatggcttatgacatactctgtatcaatgagatcccctcaccctcaccccatccttccccaccaatacacacaaattttttaatcccatgaccaggccacggtcaaggctgtttttgagtatgagtgcagtcgtgtccatcctccatggcacagccctcctgctgccaggacctgcttgaactaccagggccacaggagggggataatcagagcttgaggctggcactctgactgctggcttttcccaaacagcccaagggccggaacagcaggtggcttctcagttcctctgggcctgggagtgacacaggaaggatctgcactttcctcttgtgctgcttgccagcctttgcagttgggagttttaaggcagaggtgacatctggttgacgccttcaggttgaaaatctggtttttaaaatgttaa

SEQ ID NO: 46232 - DNA, 1228 bp, Homo sapiens
  misc_feature (1)...(1228): n = a,t,c or g
ggatttgaacacccatttaatacgactcactataggggaatttggccctcgaggccaagaattcggcacgaggcatgttgactgttttttccacactcccagtccacaaaagttttctccacttatgaacaaataatgtgtgtgtgtgtttttttgtttttttgtttttttgtttttcctgagacagggtctcactctgtcatccaggctggggtgcagtggtgtgatcatggctcactgcagcttcaatctcccaggtccaagtgatccttctacctcagcctcccaagtagctgggaccacaggtgtgtgccaccatgcccagttaatttttaaatttttttgtagagacggggggtggggctcctgctgttgctgaggctgnnnnnnnnnnnnnnnnnnnnnnnnnnnnnnnnnnnnnnnnnnnnnnnnnnnnnnnnnnnnnnnnnnnnnnnnnnnnnnnnnnnnnnnnncaacaatttgtgttttgagaattaacctgagccatttcctgaagctacctacactgccattccacagttgggaatatcttcacggtatctaccggctagggaagaatctgggggcagaaatcaccttattccagagcagcaatttagacgacgtagtaggagtttgtagggagatgttaaccataaggaattttcctattaaaatgagatgaaaaaggggaatccctctgacttccacgattataggcatcagtgaccaaattttaacctggaaaaggcattcatggatcagttcatgctcctgggcagaattcaatattgaacatgattcctagctattgatttggtatctgttctgcagaaatgtttgaatttctcaaactcaatccaaagccattgcctgaagcaagcttcctatgtcagagactaagcacagatggtttccatcaacacacgtgatcattagtgctctccacaggtcacaggagagcaggactgcgctgggacacagggaatatcgaaatgaaaatctaggttagtgcatagttagtgctctcagtattccctggctcagtgctcctgtgccacctccagcggggccttcacgtctgctgcgcacttgtccggggtgggtttctttgagtaatcccgctctccaaaaatcgtgcttcctattcggacatttgtagatcctacttcaaccgcatgctggaaatccgcggacatgcccatgctcagctcaacctggtcagcag

SEQ ID NO: 46233 - DNA, 1144 bp, Homo sapiens
cggacgcgtggggttccgggctcttcgggatcttctaacacactacccacagcagatccttttacaggtgctggtcgttatgtaccaggttctgcaagtatgggaactaccatggccggagttgatccatttacagggaatagtgcctaccgatcagctgcatctaaaacaatgaatatttatttccctaaaaaagaggctgtcacatttgaccaagcaaaccctacacaaatattaggtaaactgaaggaacttaatggaactgcacctgaagagaagaagttaactgaggatgacttgatacttcttgagaagatactgtctctaatatgtaatagttcttcagaaaaacccacagtccagcaacttcagattttgtggaaagctattaactgtcctgaagatattgtctttcctgcacttgacattcttcggttgtcaattaaacaccccagtgtgaatgagaacttctgcaatgaaaaggaaggggctcagttcagcagtcatcttatcaatcttctgaaccctaaaggaaagccagcaaaccagctgcttgctctcaggactttttgcaattgttttgttggccaggcaggacaaaaactcatgatgtcccagagggaatcactgatgtcccatgcaatagaactgaaatcagggagcaataagaacattcacattgctctggctacattggccctgaactattctgtttgttttcataaagaccataacattgaagggaaagcccaatgtttgtcactaattagcacaatcttggaagtagtacaagacctagaagccacttttagacttcttgtggctcttggaacacttatcagtgatgattcaaatgctgtacaattagccaagtctttaggtgttgattctcaaataaaaaagtattcctcagtatcagaaccagctaaagtaagtgaatgctgtagatttatcctaaatttgctgtagcagtggggaagagggacggatatttttaattgattagtgtttttttcctcacatttgacatgactgataacagataattaaaaaaagagaatacggtggattaagtaaaattttacatcttgtaaagtggtggggaggggaaacagaaataaaatttttgcactgctgaaaaaaa

SEQ ID NO: 46234 - DNA, 1985 bp, Homo sapiens
cgggttctgacaagatggccgggctgccccgcaggatcatcaaggaaacccagcgtttgctggcagaaccagttcctggcatcaaagccgaaccagatgagagcaacgcccgttattttcatgtggtcattgctggccctcaggattccccctttgagggagggacttttaaacttgaactattccttccagaagaatacccaatggcagcccctaaagtacgtttcatgaccaaaatttatcatcctaatgtagacaagttgggaagaatatgtttagatattttgaaagataagtggtccccagcactgcagatccgcacagttctgctatcgatccaggccttgttaagtgctcccaatccagatgatccattagcaaatgatgtagcggagcagtggaagaccaacgaagcccaagccatagaaacagctagagcatggactaggctatatgccatgaataatatttaaattgatacgatcatcaagtgtgcatcacttctcctgttctgccaagacttcctcctctttgtttgcatttaatggacacagtcttagaaacattacagaataaaaaagcccagacatcttcagtcctttggtgattaaatgcacattagcaaatctatgtcttgtcctgattcactgtcataaagcatgagcagaggctagaagtatcatctggattgttgtgaaacgtttaaaaagcagtggcccctccctgcttttattcatttcccccatcctggtttaagtataaagcactgtgaatgaaggtagttgtcaggttagctgcaggggtgtgggtgtttttattttattttattttattttatttttgaggggggaggtagtttaattttatgggctcctttcccccttttttggtgatctaattgcattggttaaaagcagctaaccaggtctttagaatatgctctagccaagtctaactttatttagacgctgtagatggacaagcttgattgttggaaccaaaatgggaacattaaacaaacatcacagccctcactaataacattgctgtcaagtgtagattccccccttcaaaaaaagcttgtgaccattttgtatggcttgtctggaaacttctgtaaatcttatgttttagtaaaatattttttgttattctactttgcctttgtacagtttattttactgtgtttatttcattttcccaatttgacaatcgtattttaaaattgaaactgatggaacattctttcttggtcttcaccatctgacaaattgaatggcaagaggtggattttgccagtttcttttcactgatgcagatttgtgttaagatagtactgaatggagtatttataaactggccctgagcatgcataaagcatcagtatctgacctttttttaaccttctaggaatttgaaataaatgtgtttgtgttgtctgattagatgatcattggtgtcttgccacaatgtttaaaaattactgtacaggaaagtcacagcaaagatagcagttgtgactgacatgtaggactttcacagttgtgccacatttttgcctaaaatttgggttatgacatttttcttggttcttatctgaaaatttcatctgtaacctttcatgtgtgttaagaaacactgatctgatcatttgggatttgctgaggcatttgtgagtcttccttataaacctgatgagcagatctcaactatctagcttgtgtgtcatcagaaaggtttatccctttgagagtatcaagtactcagttaatgattcttgctttcataactccagtatttgctgtgggagctcgttttattacttaatttggaattcagtagtgttgctgctgtattgacggattctgccctcacaaaactgttactgtcccagctctactccatatctaattacggattcttgttaattttgagtcgagaatgtaggcggtcatgaatgcgtagaggttaaccttcgggttgca

SEQ ID NO: 46235 - DNA, 1580 bp, Homo sapiens
gtgagttgaccagagaaggatgagagaattgccaagttgtactgaacgccaagctgagaatggtgattctgaagatagaatgcgtttgcaatggctgctactgtgaacttggaacttgatcccatttttttgaaagcactaggtttcttgcattcaaagagtaaagattctgctgaaaagctaaaagcactgcttgatgaatctttggctcggggcattgattccagttacccgtccatctcaaaaggatgtggagccacccaaaatttcaagcacaaaaaacatttccattaagcaagagcccaaaatatcatccagtcttccttctggtaataataatggcaaggtcctcacaactgaaaaggtaaagaaggaagctgaaaagagacctgctgataaaatgaaatcagacatcactgaaggagttgatattccaaagaaacctagattggagaaaccagaaacacagtcatctcccattactgtccaaagtagcaaggatttacctatggctgacctttccagttttgaggagaccagtgctgatgattttgccatggagatgggattggcctgcgttgtttgtaggcaaatgatggtggcatctggcaatcaattagtagaatgtcaggagtgccataatctctaccaccgagattgtcataaaccccaggtgacagacaaggaagcgaatgaccctcgcctggtgtggtattgtgcccgatgtaccagacaaatgaaaagaatggctcaaaaaactcagaaaccaccgcagaaaccagcccctgcagttgtttctgtaactccagctgtcaaagatccattggttaagaaaccagaaactaaactgaaacaagagacaacttttctagcgtttaagagaacagaagtcaagacatccacagttatttcaggaaattcttctagtgccagcgtttcctcgtcagtaactagtggcttaactggatgggcagcttttgcagccaaaacttcctctgctggtccttcaacagcaaaattgagttcaacaacacaaaacaatactggggaaacctgctacttcgtcagctaaccagaaacctgtgggtttgactggtctggcaacatcatccaaaggtggaataggttccaaaataggttccaataacagcactacgcccactgtacctttaaaaccacctccacctctaaccttgggtaaaactggccttagtcgctcagttagttgtgacaatgtcagcaaagtaggtcttcctagtccaagtagtttagttccaggaagcagcagccaactaagtgggaatggaaatagtggaacatcaggacctagtggaagtactaccagcaaaactacttcagaatccagcagctctccctcagcatcccttaaaggcccaacttcacaagaatcacagctcaatgctatgaagcgattacagatggtcaagaagaaagctgcccaaaagaaactcaagaagtaatgtggccaagtaggtttttgtatcatattagcctaaagatgaaaggcttattattatgatataatctgtaatacactgtaatttaataaaagtcttcat

SEQ ID NO: 46236 - DNA, 842 bp, Homo sapiens
agttaacaatggttacttcaattctgacattccattttatacatatatacctactgtatatctctctcaaatgtcagctagaagcaactttttcagttttctatctaatgaaaacggatatattctgaatgtttttgttacctgaaatttatttttgagtaggttgaaaggaccaagatacttgagtgattaaaggactgtaagtgttctgcttatatgcaggagttacatgattttaaaagtcataataggggaagtagttttatcatctgattactcctattaacctaaaaagtatttctaacataacagattgagcagtggttttgttacacttaggcaagaatttattttcccattaaaatttgaaaaatacacttttctttgcttctacccttgcagtttcccttagttcccctaatttccaagtgatctgaactaaaattaatattacacttactaagaaactatttttgttaattatactgagcaaagtttgctccaaatgaaaagtcattacgaactatgtatagtacccaagaaaaggtcaaattgagtcagaagactcgtaagtaccacttttggcgctccagagataaaccttgtacacactgcagtagaacagtgagtagaaaatatgagctataaatagatattatttttagttttgatagctctgtgttgaaatacttttttaatgcagataaaaattatcaggaaattaaccttatggcacagaccaaatacttagtgcatggctgagtttctacaattcaaggagccaagaaaataggttcaagatggaatatagtacatgcatataaggcagatgcacacatgct

SEQ ID NO: 46237 - DNA, 2495 bp, Homo sapiens
gagcttctgaatttgatcctcagtataataaagatgccacaagcagaccaacggataatattctaataccacagctaatcagagaaattggcagcattaatttaaagaagaatgagcctccacttacctgcccatatagcctgaaggccagagttcttttactgtctcatcttgctagaatgaaaattcctgagacccttgaagaagatcagcaattcatgctaaaaaagtgtcctgccctacttcaagaaatggttaatgtaatctgccaactaatagtaatggcccggaaccgtgaagaaagggagtttcgtgctccaactttggcatccctagaaaactgcatgaagctttctcagatggccgttcagggacttcagcaatttaagtctccccttctgcagctccctcatattgaagaggacaatcttagacgggtttctaatcataagaagtataaaattaaaactatccaggatttggtgagtttaaaagaatcagatcgtcacactctactgcacttccttgaagatgaaaaatatgaagaggttatggctgtccttgggagttttccatatgtgaccatggatataaaatcacaggtgttagatgatgaagatagcaacaacatcacagtaggatccttagttacagtgttggttaagttgacaaggcaaacaatggctgaagtatttgaaaaggagcagtccatctgtgctgcagaggaacagccagcagaagatgggcagggtgaaactaacaagaacaggacaaaaggaggatggcaacagaagagtaaaggacccaagaaaactgctaaatcaaaaaaaaagaaacctttaaaaaaaaaacctacacctgtgctattaccacagtcaaagcaacagaaacaaaagcaggcaaatggagtcgttgggaatgaagctgcagtaaaggaagatgaagaagaagtttcagataagggcagtgattctgaagaagaagaaaccaatagagattcccaaagtgagaaagatgatggtagtgacagagactctgatagagagcaagatgaaaaacaaaacaaagatgatgaagcagagtggcaagaattacaacaaagcatacagcgaaaagagagagctctattggaaaccaaatcaaaaataacacatcctgtgtatagcctttactttcctgaggaaaaacaagaatggtggtggctttacattgcagataggaaggagcagacattaatatccatgccatatcatgtgtgtacgctgaaagatacagaggaggtagagctgaagtttcctgcaccaggcaagcctggaaattatcagtatactgtgtttctgagatcagactcctatatgggtttggatcagattaaaccattgaagttggaagttcatgaggctaagcctgtgccagaaaatcacccacagtgggatacagcaatagagggggatgaagaccaggaggacagtgagggctttgaagatagctttgaggaagaagaggaggaagaagaagatgatgactaagcagtactctgaatggaccacagtgtttgcacatatttgcaattttttgctgttttggaagtgtatcataaaccagaaacagtacagaactgatgttgagggaggtgtagtttttttactctagaaatgggtgcataatataactagggcagtggcggtgccttggtacaacctgaaaaatgttaaggcttattgaaacctttcaagtaggggatggtacatttatttcatctgcaaatgataataaatcctttgttattataactgtccagaagtgtgggctatgtattatctgatcagtctatggtcccagtaaaagtaaagatgcagggaaacacagtctgtaaatggagcgacttttctttgttcagctttagttttagcaaacaccacaaatatgttttaagtaacatcgctcaagtttaagtaacatcgctcaagttgataatctcttgataagctctgttgttgacattttgcagtgatacaacagctccactcatagatttaaacttttatttttacttatcttggtcataagttggcattctctcacattccacatgatatagagggctacgttttggaattttccttttcttaattgcccagagttatcagacagattataaaaatggcttttaatggcttaaaccatttctaaacctctatcttagcagatcaatgcaggatctaattcttttgataagttctagctctaaaagtgatagtgggactgtatgttttctgatactggtggcttatgttattaaaccttttttaaaaaaggttcactctaaaagctgaactacatccttagttttcagtctacttgactctatcaggagctttttaaggaaagtaagtataacatgcaaaggaagctttttttgtattcattttggactcctgtcaataaaaatagaagtttgttgactcgtaaaaaaaaaaaaaaaaaaaaaaaaa

SEQ ID NO: 46238 - DNA, 699 bp, Homo sapiens
cgctatgacatgattacgaatttaatacgactcactatagggaatttggccctcgaggccaagaattcggcacgagggaaagatgatatgtaaaagcaaaaacctgttaatggcatctgttcatatagttccatgtgcctttttacttaactgcactgataggcaatgtaatgaagaagtttccttttaaaacgtaaaatgtaattaaacagagtttatcttaaattggctggacccgcacagcttgactgagacatacacagctgtcttcattttgaagcacctacactagtcaagcttctttctaacccgcccttagggtttgcctgttggtctgtcttccctactgggctgttaatcccttggaggcagattgtcttgtttcccagagtttttccagcatataccatggcagacaattttctccttatctattctaactcgtaagcctcagctagtgcctccatcctcgggtgcatagcccagtgacaggcatggtaacagactttgcctacaagcagttgctgatccataaatgacgttggcaaccttcttgtggcagtgagtaacatatttctttcctcctgataggcttggaatcctcatccccatctggcaattttctttccatctttcctacactcacaatggagcccacacgcctcacaacccccttgactaaaccagatgacagcaaga

SEQ ID NO: 46239 - DNA, 1428 bp, Homo sapiens
  misc_feature (1)...(1428): n = a,t,c or g
gaaggctttcgggagtgtgaggctgcatctgctggagcaaagggaaaccgtgggcttttccggccagatactcttgagctctgtgaccctgctcctgtcaccccaatttctccaagccagaggtagctttctcagagccccttggtggttctgtcctccaaatgctgctgttgggagcgggcttccagctctcagtgggcagtgcacctcctcctaaatgcaggcacttgctaggaagagtgtgagctgggcgtcttctgtttcaccctgcctagcagttgtcaccattcacaagtggcattatttatgttgtgctgctgtccagctgctaagatcccttcatctgcacaagccctggctagatatgtgtgaatgtgtggcatcatttcacttcagccgcccaattccatctctcctctgcagccagattcactggctgatgctcactgctcactgtctatccccacgaaatttagttttatcagtagtcttaaagtgttgatctcaaacaagtacattagaaaaatcatgtttcttctctctcatcttacttttctcttctcagatttctcccttcctagaacattctctctgtttagcactaatgttcacctcgtattttttggaagtgcaaaaatctcaatttgtgtctgtttacagctctctctcctcactgctcacagcaaggggttctgtatcagtggatttcattttgtagctgctgagatgttaaggcaagcctcagcatctgcccccgctgggtgcacaatgctgcttcctcgaagagaagacacagagtccaagtggcaggacttgaggttggcttccactctgccttagaagttaattttccaaagtacattacaaatctctgaggccattaggggaaaaggaaggggtgtggtttgtctttgaaattacggttaatacttttagacagtaagtccggctggttgcagggctatttgccccgacagcatcagcctgtaacatttcttctctttcctttgtgccactgagtcgttccctggccagaggacataaatggtgctggtaggaggttatcagagtaaggaaggtagcagatataggtgcagggtgcctgtcattcactgtgttatttggtttaaatcaaagtgattctgggggaagcctatgctctttcagtggataataaaattgggtaacctcctattgtaaaacatgtcaatggtgtgtgaagaaaaatcaacccaatctgtaggtgttgataactagacagtactgtgtatgttacgtgcctgtgtggatgtgcacttccagcatggtatgtgtagcgatgtggatcatgccagagttcgtagatcctgttttggggtttgcacatggatcgtatgttaagctttttcttttcaataaatgaattttatttttatttttgattnaaaa

SEQ ID NO: 46240 - DNA, 876 bp, Homo sapiens
aacccacgaggggacgcggccgaggagggtcgctgtccacccgggggcgtgggagtgaggtaccagattcagcccatttggccccgacgcctctgttctcggaatccgggtgctgcggattgaggtcccggttcctaacggtgggatcggtgtcctcgggatgagatttggcgtttcctcggggctttggtgggatcggtgtcctcaggatgagatttagggtttcctcggggctttcgggatcttcacctaatatccggactgcaagatggaggaaggcgggaacctaggaggcctgattaagatggtccatctactggtcttgtcaggtgcctggggcatgcaaatgtgggtgaccttcgtctcaggcttcctgcttttccgaagccttccccgacataccttcggactagtgcagagaaactcttccccttctacttccacatctccatgggctgtgccttcatcaacctctgcatcttggcttcacagcatgcttgggctcagctcacattctgggaggccagccagctttacctgctgttcctgagccttacgctggccactgtcaacgcccgctggctggaaccccgcaccacagctgccatgtgggccctgcaaaccgtggagaaggagcgaggcctgggtggggaggtaccaggcagccaccagggtcccgatccctaccgccagctgcgagagaaggaccccaagtacagtgctctccgccagaatttcttccgctaccatgggctgtcctctctttgcaatctgggctgcgtcctgagcaatgggctctgtctcgctggccttgccctggaaataaggagcctctagcatgggccctgcatgctaataaatgcttcttcagaaatg

SEQ ID NO: 46241 - DNA, 1740 bp, Homo sapiens
  misc_feature (1)...(1740): n = a,t,c or g
ccggagcaaagtttcacttatagaagggagaggagcgaacatggcagcgcgttggcggttttggtgtgtctctgtgaccatggtggtggcgctgctcatcgtttgcgacgttccctcagcctctgcccaaagaaagaaggagatggtgttatctgaaaaggttagtcagctgatggaatggactaacaaaagacctgtaataagaatgaatggagacaagttccgtcgccttgtgaaagccccaccgagaaattactccgttatccgtcatgttcactgctctccaactgcatagacagtgtgtcgtttgcaagcaagctgatgaagaattcccagatcctgggcaaactcctgggcgatactccagtgcattcacccaacaggatatttttttgccatggtgggatttttgattgaaggctcttgatgtatttccagatgctaaaacattgaatttcagctcccaactttcatcaactttcctgcaaaagggaaacccaaacggggtgatacatatnatttacaggtgcggggtttttnagctgagcagattgcccggtggatcgccgacagaactgatgtcaatattagagtgattagacccccaaattatgctggtccccttatgttgggattgcttttggctgttattggtggacttgtgtatcttcgaagagtaatatggaatttctctttaataaaactggatgggcttttgcagctttgtgttttgtgcttgctatgacatctggtcaaatgtgggaccatattaagaggaccaccatatgcccataagaatccccacacgggacatgtgaattatatccatggaagcagtcaagcccagtttgtagctgaaacacacattgttcttctgtttaatggtggagttaccttaggaatggtgcttttatgtgaagctgctacctctgacatggatattggaaagcgaaagataatgtgtgtggctggtattggacttgttgtattattcttcagttggatgctctctatttttagatctaaatatcatggctacccatacagctttctgatgagttaaaaaggtcccagagatatatagacactggagtactggaaattgaaaaacgaaaatcgtgtgtgtttgaaaagaagaatgcaacttgtatattttgtattacctctttttttcaagtgatttaaatagttaatcatttaaccaaagaagatgtgtagtgccttaacaagcaatcctctgtcaaaatctgaggtatttgaaaataattatcctcttaaccttctcttcccagtgaactttatggaacatttaatttagtacaattaagtatattataaaaattgtaaaactactactttgttttagttagaacaaagctcaaaactactttagttaacttggtcatctgattttatattgccttatccaaagatggggaaagtaagtcctgaccaggtgttcccacatatgcctgttacagataactacattaggaattcattcttagcttcttcatctttgtgtggatgtgtatactttacgcatctttccttttgagtagagaaattatgtgtgtcatgtggtcttctgaaaatggaacaccattcttcagagcacacgtctagccctcagcaagacagttgtttctcctcctccttgcatatttcctactgaaatacagtgctgtctatgattggtttttgntttgttggttttttttgagatcacggttactgcgg

SEQ ID NO: 46242 - DNA, 2161 bp, Homo sapiens
gaaacatgtatataaaagtatatttattgaaccatccatatacacatatccatgctgattccaatggaaaaaaattaaagttttctgaaattttctgtggttaactcataattattactatttaaccaactttatatgcaagaacttccaattaccccagggagaaacctatgtatgacctggaaaacatctcactttagacaaggctttatgtcgagaaatgagaattcatttgttcattcaagaagtatttattgataggtgctaggcaagatacaaagatgactcagacacagatcctgcccataaggagcttacagtctaataggggagagagaacacatacatggaatacatggtcagaactatgtttcagtaagatgaatctaacattgtgtataaagtaggctggagtaagaggttaagtgaagctgagagactactgaaattacataggtgaggaagaaagacgggaaagacttgaggtagaactgacaggacttagctgaagactggatgtggggaataacaaaaatggaagcagatgactcagactttagcatggatgatgtcatgaactgaaagaaggaacaagtttttgcaaagaaatgaaaatttcatataaaattcttctgcatagaaacaaactgtctgggatatactaggcacaatcaggaagaaatggctagttacccagaccaatggaagcacctcaaactggccagtgacttcctcccccttatatatccatcccccccaaatttcccaacaattttctccactgaaatggtatagtgcctaaaatttattaaattcaaggtctatctccagacatggcctcccttgggaatgaaaacagaaatatattaagttattcaactcagtaagtttcatctaaagactctagttatgagtcactgtaccttctggtggaatacagagatgaactccctagtccttatcttctaggagcttacagtctagtaaagtagtaaaacagataatgtaattctaattctagactgaaggggtaagttatgaactacgagaaagacaaagtgctctagaacagtttcagaaatgaaggttggaacaggacctcaaacaagagggaaaatgtggaaagtagatgagaatggatttgttcctcactccaaattctggacagatcagccccaaaacggggctactccccattcctgttgaaattttttcttaggaaaaaatatagctcttgtactgatcttttaaaaaattacttacatggcaagagatcagaggaaaggggggattgtagatctcagtggaccttcggggaagacagaaggcacttgaagccaaggaatcacaatgcctggcttatcgggaggaccctcagtgttttagcaaggctggagcatcacttccatgaagagtgggagaaataactcaaaagtaatattaagaccttgatataaacatggcattgccaggcactaaacagggtacacgcctaagaccaaattgctgccccctaggagcttacagttacaacaatacaaggtggaaaaagcaccacaatgtacagaatgcaaaatgctgaagtatttaggagaaattacagctgagtttcagctattaacacattaggatacccaatagctttctgcacagctagtagtaaacccatccctgaggggagcacaagttaatgtccttagacaacaagccctggtagagctgggccattaaagacagttcctaagaaaattgagaaaacaggggtatgaaaactacagaagcaactgggtgaacatacaaaaagtgataccttccctttttctcctgacaaactttaacagggctgcccttcctacagtgaatctaaactgatgatcaccatattacttctaaaagcagatttgggactctactaaccaattctctctgatcctttgtaaaatgaaggggttgtacaagtcacttcctagtcctttccagcactaacattctatgattcaaagaattctgagagtttctctgttccttttggtaataaccaaaatagaagaaaaaaatttaagtctgatgcttctctcgtgccgaattcttggcctcgagggccaaattccctatagtgagtcgtattaaattcgtaatcatgtcatagcgggtcaacaaa

SEQ ID NO: 46243 - DNA, 1665 bp, Homo sapiens
cattggagtcaagatggaggagtacgcgcgagagccttgcccatggcgaattgtggatgactgtggtggggcctttacgatgggtaccattcggtggtggtatctttcaagcaatcaaaggttttcgcaattctccagtgggagtaaaccacagactacgagggagtttgacagctattaaaaccagggctccacagttaggaggtagctttgcagtttggggagggctgttttccatgattgactgtagtatggttcaagtcagaggaaaggaagatccctgggaactccatcaaaaagtggtgccttaacgggaagccatactggcaagcaagaaattggaccagtggcccatgattgggtcagccgcaaatgggtggcattctcctagctttaattgaaggagctggtatcttgttgacaagatttgcctctgcacagtttcccaatggtcctcagtttgcagaagacccctcccagttgccttcaactcagttaccttcctcaccttttggagactatcgacaatatcagtaggacttctttcctagggatttctttaacagaacgagttgtggttcgagaaggatttcagaagatcaagttacagtctgtttttaaaaccataggtgggacagctatggccaataggctataaagagacatttagcacttttttctatttaaaggaacaagcggggaagggtgctaaaagataatacgtttatttattcacacttgaattgcatttgtgatcaaaataaatgtttaaatcgctaaaggaaaatacagtaagtgcttgaaagatgaaggaccaaaaggccaaaaaacagtgaaatatgatcatcatctccttgcggacttctctgcctggttttgtgtgttctgttattcaaacaataaaaagctggtggaacttactctttcttttaagataagttgtagacttcgatgtttcatgctcatgtacttcaaataatgcatgttttatagttagtccctcatcacttgaagtgacttctgagaattatgcagagtcaacatggatcatttcacagtgagatgctttatggattgaaggatatggtaaaatgtttatagtttactttgaaagtaaaatatactatgtcttggttttgaggatattggatacaaaactctcttcctttagggctactgagtcttgattcctgatcatcagaaatttcaccagaaacaacttgcttccaatatacccaattctatatgaagaattcatggagagtgtactggcactggaagagtttagtgtttcttgtatgcttgaaaataaagtatgtactgttttgaatgtgttccaagtccctctgccataaacgatgtattttggggtcctggttggccccggaaaatggatgagcacttcagaacaggtcattttccctgatattggaagtgacatgtggccctataggaggcatgatgttagttaattacacatttgcctacatctgtgggaaatggagaacaaagccatgtgggtactgtaaacacacgtttatcttttggcccaatgccatacatatggtaggcatttaattactgattgtgtttggataatttgggaatttttgactgtggtaaaatatacataaaataatactttttaaaaaaaaaaaaaaaaaa

SEQ ID NO: 46244 - DNA, 799 bp, Homo sapiens
ccagtctccatatgcagctctctcttataccctcgggttcctcccaggagctctggaggtacaggatttccacaggccttttttcttaaatggaaggaattggaactgaaagggaaaggaaatggaaggaaggggaatttggaggagagaacacgcccacccttgggaagctgcctgtccccagaggagccccaccagggagcagctgccccctcatcagagacctgcagagtcaaccaagcacaggttagagtcccaggaccggaaaccaactgtgggctttctgtacttctcatagcttttggagtctggctgtccatcaggaggtcccgagggctctctggggcctgaggctcccacaccagctctcccctggcctcaataaaaccaggtgcatgcctgttcttccatccacactccagggctgcccaccagctgacaggcaccatcaactggcagcaacagagcaggcgcaggtacaaagaaggcagctcactcctgctcttaggagatccaatcagatctgccctgtacagccatgtaggctgtgcgctgcataactccagggacatgagtcacacagacacaatgtgagtgtgctcccccgtcatgcaacatctggacacaactaacagagcatggtgaatacatgctgaattgcattcagtatggctgtgaactaggcctggggacaagaatgaattttacatggaaagaatttcctgtagcaggaacagaggggataacaacagcaataaataataataagaagaagctaccacttcttgagcatgtacca

SEQ ID NO: 46245 - DNA, 1723 bp, Homo sapiens
gaggatggggaagagatagagccggagcatgagggcaggaaggtggtggttttcttcactcggaatggcaagatcattgggaagaaggatgctgttgttccttctggaggcttcttccccaccattggaatgctgagctgcggggagaaagtcaaagtagatctgcaccccttgagtggctagggcctccccatccagacctgctccttctccctgctcaccctctgctgggccaggcacccagttcctgacttcccagaggcttcgtttacccagcaggcccctggaggtgtgtagtcactctgcccccactgggctcaggcccctgtcacgcttctctgtgcccacgtttctgacctggtgctgccactgttgtcagtccctgggcctgagtccctggttggacaggaatggacccaaagaatggtgttggtatgtggggtggtcccactcgctttggtcagtgggcttctgggtccccctttccctcaccggccctgtgtgggtggagaggcgtgagcacgcctatctcagctgctattcgggcatgatgctttgtagagggtagagtagacagccccctcccctaactcaccatggtatttctccttgaattcctctttcttgttttctttcctggttgtgtgaaccagttgctgctgtcatacccctggcagggccaggggacctgctctttggtcatctctgtcctttcactggctgctgccccaggaagactcctgttaggctctccatctttcccttgagagctggctccccaccccaacctgctcaggcaccacagaggatctaggtctctggctccccatacctgggacccacatgggtgggtgcctgttgcatgtttaagagagaggggctgtgaggtgacagggcactagggccttcactcctttctccccttccatcctttctttaccagtgccacccatgtccctagctcccgggtattggggctgaggctctggggcctgtttccctgccagcgtgagggcaagaccccagagccttaagctgagcaaagcccagaggggcagcgtggcccctccctccccttttcctgccccgtcccatgcctcagcttgctgcttgtgccagttgcctgtttcgcttcagtgtttgattctagcacttacatgtgtcctccccaccaagccctctatctccttctaatccttcaacccctggccccctccccgtaacagtgacttttccagggaggaagaggcagcaggagctgttggccttggtttgcacagagcgggtagggctgtagggaaagcgggtgagctgttgtgctgctgggcctccctttggccctcgcttcccaccctacgatgtatgaaatgtatgtacagaccagagatgtttatacagccgataaagatggagtttccgtatttatcagtatggccggaaccaggagcctttctagtccactgggctaggaacaggactgctggatgggggcagccgaaggcagcttgctcatggggagatgtggaccaatgttgggccagggatgggaatcatatgttccatgggcctggctacaggcctgagcacagatacgtcccctgggagatgaggctttgaccttcctgtgaataagtgttgactccaatttcggctaaagtttatagaaattctttattattagacaaaaatagactctcttttttcccctaaaaaaaaaaaaaaa

SEQ ID NO: 46246 - DNA, 3193 bp, Homo sapiens
ttttttttttttttagaaagaggaaacattttgattattttattttttaatcttcaaaattttctgccatgagacaggaatgcatgatagcaatggctcaacatcttcacatgaaacacttggattcattttcattcacaagtttttctaaaaacatctacaatttcataaccccacccacttccaaccattatcacagatttaactgaccattaaacagtagttgccagcattaaatagctggaacgcttcctgcgtattagtagtgtcttttgaaactaccaccgaagagtatcatgattataaatctcattgtacatggcaaccccaaaggtgactgatgtcctcaaataaactccctgctgatcactgagagctgtattccccaggtacttaaagaaatgctctttcttctccaagaactgcctgttcatgtcagtatatttcttgcagggagtatagcacatgctgatctgatgatgtaataatcattgctaacagacagatatatatgcctgatacttactggcgcgctccgataagtatgtacagaacatacatactgaagaaagatgggttgcttggaatctctcttcttttgaagagaactattttgaggttttttaacagttgtaaacaaaaggaaagatatacagatacctatacacatagagatctacactgagtattttcaacgtggtgcatatcttcttatctagagatacacacagtgtctccactcgccccttcacacacacccacacccttccatacagcgtgtgaatataaatgttgtaaatgtccttgggagttcactggagttttcatattaccaaatgatgatgaaatacctgatttgtattactcctgagaagatattagaagggaatgacagttctgatgcactttggaatggcacaatcacgtaaacgcctgcatacttaagacttcttaactcatccaaagtttctaaacatgatttgaccaaaaaaatagaaagtatcaaaacaatgcagcaagttaaaaaatcaaaacaaaatacttttttataatcaaagtataaacatataggaaatacatatttgtcagtaattactcttaaagtaggaaatgtactgaaaaccatagctagccaacagaacttaaaaaaaatacctttccaatgcataatacatgcattgcccaaaagagtaggatagccacattagacttacaagacttacagcaactccaccagaaaaaaactgctacacagcaagtctgttaagtatgctgttggtaaaaaaaactgctgtgactgttacccacacttctgtaaaaaaaagaatttgcaatttgatgagtatcttatccctcatataatctgtataaaattacaacaaaaccaataaatttcaagcaccaattcaataatctaaacttactgtatttatatttctcctattactgaagggaacaaattatgatgaaggcttagctgaaattagcccaggtaattattacagtttagttttaaaggcatgtggttttccttccattcacttgaatcctcaaacatttgagaatgtttaggctagtaaaggactccttggaggaatccatcatttctgagtattgaaggttttaatatacattgaaagctctttaacaaaccaatgctctcttagttctaggataaaacagagttgcacacaagaaattaagggactgttcctcattatgacttagaaaaggcagcacctctctagtagactaagagcatgtctggacatccactggtagtgtaagaaaacggcattttttaaagaaggcaacaccattgcacttggcaaaactgaagtttttcttaattaaaaattttccattacacatttggggtgagagggtatctcagtaagagtacatttttttctggtttctttttcaggaaaaaaaaaaaaaaaagtagtacagtctgagccagtagatgagtaacagtgtttgtgatacctctggttgttcctgaagaaaacatgttcagataacaagggggtttgttttcaaaatcaatgcaactgctgtttttgtttccagtatttacatcacaccacttaggtacacagtaatttgtgagacatcattaatgattcagtcttctcctagtattaagtttggttaattttcaataaacaccaaactaaaactttaagttggctgtatttgagagactgaaaataagactattgaagaaaacaaatcacatgggaaaccaaaatctcaatcaacagtgattctccatcactgcccatcctgttacctgaactttatcacaaaatcacatgcagctgaaggaaaagagttgcactgaagccagggtgttaggacgagggcgaagggtcttgctggtcctccagaagggtggctttggcctgctccttgcttatctcgttgcatggctcttcataaagaggctcaccaaggtctccgctgccctcttcactctcctcctcgctgtggtcttcacttggctccacagtttgttccaggctgttctccagaagtgtgggagaactgcttattctactttcctcttcagctgtctcatttaagggctgagaaggaggcggtgtgggagtattagattggatgacactttcagtggaagagacgggggctttggttagagtagtatccgctacagtctcattctgaggcaaagataacttttccacaagtttccactgaatgatgctcatgtcttttccaccagttgatatcaggtgactgtcattgtgagtaaaactgacattggtgacatggctgctgtgggcactgtacttgtgactgggagcctttgcctgtggagcagggatactgaaacagatggactttacaaaagtcatcggcaacagctatcacctttctattgtgggatcgcaccagtgcattgatatctgtcccatcagatccttctggccagacaccaaatacttgaaatcctagcacacaggtatatgtcgtccaatcaatgtccttacaatccgatcgattcctgattagtttgcagccatttggaatgtcccagtacaatatttcatagtctcccgagttagacattatatatttgttgtctggggaccagtcaaggtgtgtgatgtagctggaatgtccagtgcaccttccatatctgctatattttctctcgtgccgaatt

SEQ ID NO: 46247 - DNA, 371 bp, Homo sapiens
ctgtgccgtctgcctttctagttaaagttgattttaaattaatttgggaaaaacggtgaacaagtggggaaaaacatcaccaaagactccaaacaggtggaacgatgaacttaatgttccctgcaccctccttacagatgcctggactttggcctgtgaatgagccccggggggctgggacagtaggggttttcatggaatggacatggggtagcaggaagtctcagccccagagggcttggcaggagccgccctctctgcggagttcttcccagcgggtgtgcgttggtggctggcggggaccccccacaggaactaggtctcaggctgtggaaagggagctgccccagggcccaggagggccggctctg

SEQ ID NO: 46248 - DNA, 2084 bp, Homo sapiens
  misc_feature (1)...(2084): n = a,t,c or g
gatgatgagtgctccagcgccagcgccagctcagccggggcaggcagcaactttggggctgggcctggtggggcgctggggagccctaagtccaatgcactgtatggtgctcctggaaacctggatgctctgctggaagagctacgggagatcaaggagggacagtctcacctggaggactccatggaagacctgaagactcagctgcagagggactacacctacatgacccagtgcctgcaggaggagcgctacaggtacgagcggctggaggagcagctcaacgacctgactgagcttcatcagaacgagatgacgaacctgaagcaggagctggccagcatggaggagaaggtggcctaccagtcctatgagagggcacgggacatccaggaggccgtggagtcctgcctgacccgggtcaccaagctggagctgcagcagcaacagcagcaggtggtacagctggagggcgtggagaatgccaacgcgcgggcgctgctgggcaagttcatcaacgtgatcctggcgctcatggccgtgctgctggtgttcgtgtccaccatcgccaacttcatcacgcccctcatgaagacacgcctgcgcatcaccagcaccaccctcctggtcctcgtcctgttcctcctctggaagcactgggactccctcacctacctcctggagcacgtgttgctgcccagctgagtggccagccacaccaaccctgtgctctctggcccccagctggccacacttctccaggagggacccttggacttctttgtgtgtccagtttggcctcctgcccaaactgtccattccagcagctcctgcccccttctctgtacttgcttctgtctgacaccttctccctgttggcctgaagggagcttagaatgcagccctacctgggagatagtgcgggcacctgtggccaagtggagcagaggttggacatggggttggattgttttgattatttatagttacacaaggacttctcccagctgaccctcaggatgccccaagtcaggaagaccattaagaataggaggagagggctctgcctcaactttcctaggaaagagcccacctcggagatagctacggtttcctctggtggagatggtgaggatgaaggctggagagtgagggaggaggctctgctgggccgcagagaacacagggatgggagggtccctagccttcgggcacctccagggccagagagcaggctcagagcagctagtgtggagctcagcatccccaccccacccctcctccctgtagagctgatttgaggcctccttctggggctgggctctgcaggccaggtgggtgtggcctgtgttttcccttctgttctttctgcctgtactggatctgttattttcagggaaacaggccccagggcccccctgagcctcaccctaagcccttaggcctctgagagtgctgttgggttctatttatttatttatttgttcctttggttccctacccgtgccccccagtgtcttccctgctgagtaccaggagaggtcctgccccatcctctctctgaaagccagggcccttccattccatttagcctttggatcatcctggctgggagaagtgggaccgagccacccagccccactatccccaagcagccctacagccgggatgggaggcacgtggcctctcttttatccgtctatttattttgtaagtgtattcgtgtggaggaggttgttgctttatttttttaaggctctggagtgttgtgtatggtttcttttcacatcccagcctcccatgggcacttctaagaagagaggggatttcttggaaaaggagagaggaatcccctagagcagaaacatgctgcactgtgtccctcgtggaatattctctaattcagnaaaaaaaaagtgtatacgcgactagccctggtagtttactgcatcggggttaacagggagaagggctcaagtgacctccgcggaagacgcggctctatctggagacgccccgacgcgatgtcggaatcacgttcttctagccaaagtggttctaaggcggaatcgagtcacaggccg

SEQ ID NO: 46249 - DNA, 1565 bp, Homo sapiens
  misc_feature (1)...(1565): n = a,t,c or g
ttttttttttttttcctatgaaaatgtttttaattttcatcttttggaaatacatttttcatttttatttccaccatacaaaaatgtgaaatatctaacaatgatctatctgaagcgggtggagcaaagcagcgccatgagcgtttgtccgttgctgtgatctcgtttcaacggagaatgggctgggacatgttgtagatttgcacgatnnnnnnnnnnnnnnnnnnnnnnnnnnnnnnnnnnnnnnnnnnnnnnnnnnnnncgtacgcacacacgctgccgtaccccgagaccgccatccaaacaaacgaacagagactctggaaagtgaacacagcgccacgcataagaacagaagttaacctttttactcgtacatcccccatgagaaactcacgtcttaggagaaaggaactctacataaatatgcccaaaggccagggcatacggcaagccctctcatgggtgggcatgagtggacatcttcctgaaggaaggacaagcttgagagcgtcatgttttcaggcagctatggtgggaagcagggaggcacaaccgatttttccactgggagactaaccgagggctgcaactgcctcaaaatctcagtgcgagaagatgcacaggcaggacagtacacccccaaattcatgatcacagcagctggaatgtcagctctttttgcagatttcacagccgacactccccatcaggcaggttcttaagcacactgggtcatgacaggaaaggcctcacaagagcaacacggaattcactggttaagcacgtacacattcatgacagcctacaaccgtgatgagtgtcaatgtcaacaggcagttagattaaaaaggggaaaaaaccacagccacaaaaataaaacctgttttctcccccccaggagacaacttggtttccaacccctcccataccacatttgattaagttaaaatacaagtgcggtttccaaatgtgccagccggctcttgctcacagcgacagcaccagcggtttgctgccctcaggtcttggttaccatgtgtcaggaacttcaaagatgtgtggcagggctgttcttcgagatgcttcctgctggagaaagctccttcttcattctttttaatttcttggcctttttccttccctctgagatggggtctgcacaggaatcggtctgctcaagctcagtgtcggaaatctcccctgacactccgtcctccaggccagcttcctcttgactaggactcaaatttctctttcctactgtgctgggagctgtaaaactattgttgcggtaatagtgattctgcagggtgtagggtatgcactgggggtttaaccgtttgctgtcagcctccttccagctatcttcagtccactttcttttgatctgcttctcttcctgttttctccccatatattcagcataggtttggatccgatagctttctgcatatttgctggtattgacagcaatctttacttgctcgggctggctaagggaaacaaatgctgatgtgtcatcaatccaggatatctgaatgttaccaaaggcactgaaaagc

SEQ ID NO: 46250 - DNA, 653 bp, Homo sapiens
gtatttcagactttctaggatgaactaaatgtgccagtacctaagattccaggaaagactaaaaatttgttttttgcaattagctgggcatgtaacccagtctctcaatgtcacttcatgttatgtatgtggagaagctgtaataagagatcaatggccttgggaagcccgagagttggtgcctactgatccagttcctgatgaattcccagcccaaaagaaccaccctgacaatttttaggttctaaaagtctcaattattagacaatattgcatagctagagaagggaaagactttatcatccctgtaggatgacttagttgtcttgggcaaaagctgtataatggtaccacaaaaacagttacatggtggagttccaattacacagaaagaaatccattcagtaaatttccaaagttgcagactgtttaggcccacccagaattccaccagggctgggacagcccccaccaggttatactggatatgtgggacacagagcttatgacagattactgaccagtagggcaggtagttgtgttattgggcactatttaaaccatctttcttcctactgcccataaaaacaggcaaactccttggcttccctgtctacgcttcccgtgaaaagagaatcatagctataagaaat

SEQ ID NO: 46251 - DNA, 348 bp, Homo sapiens
ggagagagctacaccatgagcttcaataccctgaacactacctcttctcttccccagatctctgctggtaaacttctaagagtgctcaaatctcattttctcaacaaggcctatatgacttccctattcaacctccaatctccccagccctaagttcctgactccacttgctactctgctcatgttagagtcccatgcaggttggcagaagggctgtgctccatccatgcaggtgcccagcctcctccatctgaggacttctgcctcagccagttcctttggagaccattctatttggtcaatgtatatcggcagtggggggtaaagacagaggcacacctgcttcat

SEQ ID NO: 46252 - DNA, 787 bp, Homo sapiens
  misc_feature (1)...(787): n = a,t,c or g
tttgaaanccgctatgacatgattacgaatttaatacgactcactatagggaatttggccctcgaggccaagaattcggcacgagaattctacaacctgtagattaactggtaaaattaaccatattcaaccaaaattgtataacccagcaagaatggaagaatgggtaaagtctacagtccatttctagaactggtcatgagaactcatgtttatgatgatggacttttgatcaggtggagggacccaaaccttcagttctgaagctcattagtggtcctacctgtgtgacaggcatttactattggactggcagtcccaggacaaactccaggaatccccccatgtccatctctactcctgccctcttttacgtagcagcaatcatattttcccttgatagggttcatcattctagatactccgatgacttctttataatgagcctgaagtggcctggtggctgcctcagcttccagttcagttgaatagctactacgtctttgaggatgtgctccttgctgggggactaaactctccacgccagcccagtcccaaacctaaacctcgggtatgagaaaagcattgagatctagcaatagcagggccatgtccacactgcgtcctatccctgaaggagaaacagcgccaggtatggttgccggctccaagcgcatgctgcctcctgcaggcctgacccagcctctcggggtgttgtttctggtgccatagttgaattttcaacaaaccatttcaccaccctctcaagacagctgctgctggtttg

SEQ ID NO: 46253 - DNA, 897 bp, Homo sapiens
tttttttttttttttttttgataacaattgtggttttattgtgtccaaccaatgcatcaataaatgaacttgaagcccaagcctgtgtgtgtcctaattccactcacccagccccgggcacctgccccactcacctctggctttgagaaggggcgtgtgtcggtggttgcctggctgcagtgtctcacctaggctaggtgtgcaccttagaagcacaaagcgggcacagttgtgggtaataagcttactctgcaggccgctgggtgtgtgcccaccctcctgagccccgaaagaggacctgtcagctcctgagaggctgctacgggtttgccttgttctgttcaggcatctgaggtaagaaggaggggccagaggagcaccttgtccagccttcaccatgagagcgggcatataaatataaatacaggtaacttataaatagaagtccagctctgagctgaaaaccacaggcaggataaagagcagcctccaagagcgaggctggcgggctgggcactgagcggccactctggtgactgacagcaggtagtgcactcctgccccctggtggctggagggagcggcagatcccagcctccagggctggttggcatagcaccttaaagagggagaagccattggctttacgaaatcaagagaactggaaaggatctaggagatcatctaagcaactctggtcatcttacagatgagaaactgatgcccagagaggggaaaggtcttgctgggtcacaaagtgggctggtgactcatagcccagttattctattccatctcaaccagtgaggcccaatctgctccctgagcaggaagaggaagtaaaacaattggtaggggtggggaattttttttcggacgcgtgggcggacgcgtggg

SEQ ID NO: 46254 - DNA, 515 bp, Homo sapiens
cgagggggatgtgttcaaggcaagaccgaattcagaaggatatcgacgtcgtgatccagaagtccagagctgaggactgcctgtttgcagggcggtggtcgggtcgtggggcggtagggcgggagccaggggaagggagaaggaaaggctggaaaagaagcaggggagttgtgaaccagacatccagacctcctgaagggctcgtgcagacgtacaggcgggatcttctggaagtgagaattgtttttgtttgtttatctattgtagcagaatggggaaatggagagagaacctgaaagagccccaaactcgaggacctattgctccccaagaataacatcttccagaagaactagacagaaaactaggcgtctgggaactctgaaatccttggaggagtagcatcatcatgaccctctgtgttccttttggcaaaggacttgctcccattgtttgcttgttccattgtctgtctgttaaataaataaaacccttttcatatatctttaaaaaaa

SEQ ID NO: 46255 - DNA, 404 bp, Homo sapiens
ggagacgaggttttaccatgttgcttaggctggtcttgaactcctgagctcaggcaatctgcctgccttggcctcccaaagtgctgaggttacagatgtgagccactgtgcccagcctattctttagcttttataaatagattcataaagtatatactgtttggttttggtttctttcattcaacataatgttttttagatttatacatgatggtgagtttattcttttttattgctgtatagcatttcattgtgtaactatattatgctttatttttaccatttgttcgtgatcatttgggttgttcctagtttttggttataaatacattcttgtacatgtcttttggtagacatatacatgcatttactttgaagagcatacttaggagtataattgagta

SEQ ID NO: 46256 - DNA, 1110 bp, Homo sapiens
ttttttttttttttttggcagaattattctttatttctggagacatttaatcagatgcagtaacactgattccaggcgagggcagggggcatgggtacccctgaagcaaccagtatcctgtggcccaaggtgtcccccatccccagacctgggatccccctcagttacagttaaatagagagaggaagatctccccagggggctttggggggagggtctgcctcctgcacccaccctctccacgcagaggagtctgagcacaagctatttacagtattcacatccactgtaccccaccaaatcaaggcaaatactacaggtggcccctccccaagggaagaggccagagaggctgtgagtgtatatgtgtgtatgggggagaagggatgtctgcgcgtgcgagcacacgaatgcactgaggggcagatctggctccggccaaagagacatcagtctataaggtgcagattaaaaacaacagagaggacccacccccaggggcccaggccacttccatctttggttctgtccttttctcctccagacatcctgggtaagtgatgcagaggagccctcacaactgtgcccggatccaaggcaaaccctcttaaaggacttctgtgacctgcggggactgcagccacagctttcttgaggaaggcttctgcctctgcaaagggcaggagtgtctctggtgttcggctcagactcttgtccccagagggtccgttggtggagaagccattctcctggtgtgctgggagaggctgcaggccattcaccagggacgctggcaactccttgcttgggagactccactgaggctcctgtgggatgggctcctctttctgcacagcctccttctgcagccctggggaccgagcctccacagctttcacaggctctgggctggaaccgttggcgttggcctccttgctgtcctgcttcttggtttcagaaacttctgacttccgagtcctcttcatgatctcctccagacgctgtttggaggccgcagatcagttaggctcgagccccgcccctaatcctaaacctcccaccagccagacccggcctcggagtcttagggcctcccagctcatagcagcc

SEQ ID NO: 46257 - DNA, 533 bp, Homo sapiens
actgtaagcaattaaacttcttttctatataaattacctggtttggtgctgttctctatagcagtgtgagaatggacttactacatacaccattaggggattgcaaatttaaacaataatgaaatatcactacacacctattagaatggcccaaatccagaacactgaaaacaccaaatgctggtgaagatgtggagcaacaggaactctcattcattgctggtgcaatcacaaaatggtaccgccactttgggagacagtttaacactttcttactaaaactaaacatactctcatcatataatccagctatcacaccgcttggtgtttacccaaatgaattgaaaatttatgtccacacaaaaacctccacagatgtttatagcagctttattcataatcatcaaaacttgaaagcaactaagatgtccttcagtaggtaactggataaacaaactgttgtccattcatacagtggaatgttatttagcaataaaaagaaatgatcagtgaagccatgaaaagacatagag

SEQ ID NO: 46258 - DNA, 1059 bp, Homo sapiens
ttttttttttttttttaagccacatacttagtttattataggcatgtctaattgaaatccatgaaaacagttacatttaaaacattctttatgcactatacttgaaaatgtaaaatataataccacttaagtacttcccacattaaactgatttttctttttttaaaaaaatttttcctagtcgttatttagctttcggacaccataatacaatagaacagaaagagtatgttaaaagaaaaatattaggtagaatgttgtaaaacttttaatttacccatcatatttaacatttccaagactattttcctgcgcctcatctgccctcagagagaatgatccccacagtgatgaggggtcagcactctgaaagccagttgacgccagacaagctgctggaacagctggggcacagtccgcctctcctccagcccctcggtcccatgaggccaaacaatgaggacagaggggctgaggggtgtgtccagggcccagtcccacctcagcaggaaggtggcgtcagcactcgcagtcccagcctcacgccgcatcgcagtcccaggggatcttcacacagggagggtgagctggttaagaaggcgggtgatcctcccccccggatgcttcgatacttagccatgtcttccggaaatactttagaaagttcttgaatcaacaggcttttaaatttcttcaatggtgtcgatcttgcctttaacttgctcatttttagctagagccctctccaggcactctttggtgtagagctggggatttcgaccttgatctatatattcaaaaacttctaacggtacagtaatatcatgaagctgctgtctgcacttgtcaatatcctgtaagccagtaacaataaaattcagcttttggttgagcccggcctggctgctgggctggaagtcactgacgatgatgccgagctgccgaatgttctccacgaacttctccaggtgctcctctaggtggtcaaacttctccgccatcgcctcgggcccgtcccccacccacacagcctcaaccagcagcgccgcaggcgtggcc

SEQ ID NO: 46259 - DNA, 1594 bp, Homo sapiens
aaaaggaccgcccattgaagatgccattgcttcttccgatgttcttgagactgcttctaaatctgctaatccaccccacacgattcaagcatcagaagagcagagttcaaccccagcaccggagaaaaagtctggcaagctgaggcagcaaatagatgtgaaggcggaactggagaagcggcatggagggaagcagctactcaacttagtggtcattggtcatgttgatgctgggaaaagtactctgatgggccatatgctttatcttctgggtaatataaacaaaagaactatgcataagtatgaacaggagtctaaaaaggctggcaaagcttcgtttgcatatgcatgggtcttggatgaaactggcgaagaaagggaaaggggagtaaccatggatgttggtatgacaaagtttgaaaccacaaccaaagttattacattaatggatgctccaggtcataaggacttcattccaaatatgattacaggagcagcccaggcggatgtagctgttttagttgtagatgccagcaggggagagtttgaagctggatttgagactggaggacaaacacgagagcatggactcttggtccgttctctgggagtgacgcagcttgcagttgcagttaataaaatggatcaggttaattggcaacaagaaaggtttcaagagattactggaaaacttgggcactttcttaagcaagcaggttttaaggagagtgatgtaggttttattcctacaagtggtctcagtggtgaaaatctaatcacaagatctcagtcaagtgaactcacaaaatggtataaaggactatgtttattagaacaaattgattcctttaagcctccccagcgatctattgacaaaccttttagattatgtgtgtccgatgttttcaaagatcaaggatctggattttgcataactggtaaaatagaagctggttatatccaaactggtgaccgactactggcaatgcctcctaatgaaacttgtaccgtgaaaggaatcactctgcatgatgaacctgtcgactgggcggcagcaggcgatcatgttagtcttactttggttgggatggatatcatcaaaatcaatgttggctgcatattttgtggccccaaagtacccattaaagcttgcactcgtttcagagcccgaatcctcatctttaatattgaaattcctatcactaaaggatttcctgtgctgttacactaccaaactgtcagtgaacccgccgttattaaacgattgattagtgtcttaaacaaaagcacgggtgaagtcacaaagaaaaagcctaagtttttgactaaaggccagaatgcattggtagagctacagacacaaagaccaatagctcttgagctatataaagacttcaaagagctggggaggttcatgctacgttacggtggttctacaatagctgctggtgttgtcactgagataaaagaatgatgggtcagaatttctaccacgtttctggatacagtgaaatagctaacctctgtttcaagaatgcagttattaagtcaattcctagaagttgagagagcaaataaagacctgagaaccttc

SEQ ID NO: 46260 - DNA, 1185 bp, Homo sapiens
  misc_feature (1)...(1185): n = a,t,c or g
ttttttttttttttctgttcctaacacaaatgtgaatttattggttgatttgatatttaaaatagtacttttacaaaatcatctcagaaaatatactacatttattaaaattcctacaaaccattgcagaaaatattaaaccctctaaccaacctaacactcgctttcagaggcacttgtgatgattttcacagcttccatagttgcaaagaacaaagaaatcatcttccaacaggggtggaattagataagaataatccaaaaaatatttatttctttacagactcacagattgcttgatgtttaggggctcttaccctaggatacctaattattcaaggttttcctaatttagtagactttttcattgcctacaatctacaatattcagcaaagtattaaggaaaatgaacccaagaaccttaaccacctcaaatagttttatggatatactaaactgtcaagtacaatctttatcttaagacttgagaactggaatgcaggaaaacaaactttggtggaatactggaataaaagacataaagctgggcagaactaggtgtggcaaccttgtatgttaattctgaaagccagaccagtgacgctaagaataacaaatagattcagatttgtttttcagaaacttgagctatttcnnnnnnnnnnnnnnnnnnnnnnnnnnnnnnnnnnnnnnnnnnnnnnnnnnnnnnnnnnnnnnnnnnnnnnnnnnnnnnnnnnnnnnnnnnnnnnnnnnnnnnnnnnnnnnnnnnnnnnnnnnnnnncnnnnnnnnnnnnnnnnnnnnnnnnnnnnnnnnnnnnnnnnnnnnnnnnnnnnnncttagcattttaaatgtaaaactgaagctttaaattctttgagccattcagctcttaactgccagctcacactatttcacagcatatccatagatatgagggcgcaccaactcccaggacagtggggcctggatgtgctgcagcttcagcttagagaagctggcccgctccagggctttccagctctctctggtcaggttgcacccatcaaacagaaggtgccagggcaggatccaggacttgttgccagaagtaattccaagtcgaacacttcagcttgccacatgcttccatgaaataggaaagcccctcccggtcttcaggcattcttgcacacctcgcgggaga

SEQ ID NO: 46261 - DNA, 3076 bp, Homo sapiens
  misc_feature (1)...(3076): n = a,t,c or g
agagaactagtcttgagttttttttttttttttttttattttctagtaagactagatttattcaataccctagtaaaagttttgattataagtatccaacagtataaaaagtacaaaacagatctgtagatttctaatatattaatacaaagtgcatgactacatacagtacatcctacaggcaaagagaggtggaaggggaaaaagaagactgtggttgaggtctagtaataaataaataaatacagaagtagagatgatccatattatagtatattctaccaccaatactgcagccaaaatgtacaaaaaaaatcatttcaaataactcaggaggatgataatggctggacttttgtaattcacctcaaagactgtgggagagccaactcaactcactgtatagtctgtgcatatggtggcttgtagcatgtaggttttttccaaaagaaggaaatataaaatgtttagattaagaactataaaactacagggtgcctataaaaggtggcttactccttattgttattatactatccaatttttaaaatgcagtttaaaaaataagcactgagtcttgttattacaaggcaggcaaatgtttctccctcattttgaaaagactgaactggcaatgcttttcctgaacatttagaaaagaggcagtaagagtactctggtttgggttcaagtgagaggcttttcatgaaaatcttaggattgaagagctctaagttcaggatatctcaatgttcagaaagcctgactaaaagaagccaaaccaaaaccatttaatgtgaacacaaacctcttttcttttagtaagttttacttttaatacagagtgaaagaaaataaaaatttaataggctaaaacaagtcaaacacccattctacacagataaaaaccttcacaaaggtcaactgaagtaatccagagctgaaactgaattgtgcagattttcaatgaagtcacagaagtcatgtaacacaaacaaaagtcgattatatttacacactcagcaagccctctaagaaatgtgccccaagaagcattaacctttgttttgtgccatcctgaagacttgcacattttatttttcagatagcttaacatttttaatcgagtgtgttctctaccatgcggtaatgctttggtactattcatacagggtcttgcctatcctaaagacttgccatttccccaagaggagctttgattctgctttagaagttttacataaattaaaatctttatcaaatattaatatgaagggaggcacaggatgcaacatatatagtcaagttacctctctgtatatttagaaattactttctcctccaaggtatttgcaacagaaagctcagtctgtcctgcttaataatcagtagtacaggtgtgaatcatcagaagcttggcaagaccttaatatttcaaaattattaacaactacctctaggggcaagttcatgttactgagttatgacaaatttattatcatgagggaaaacaagagtagccagccatcttaaaaatgccccaaccactgcttctcaaaacagaaagactaaaaactacatacagtttatcatacaacaaatcccatctctgtcccctgaaattcccctagtttcattcattagaaggggattaaaaaaaaaaaagacttaaagagcactttacagcagcattcagctttcctatgaaatactcagcatcttaaatattatatacaactctttttttagtaagctagacactggcttcagagtttgtgggagtgggggaaatcaacccattcaaaactactctagaaattgtcttttggcagaatagcaggtatccaagttaaaaataagagggtcatttaagaccagcnnnnnnnnnnnnnnnnnnnnnnnnnnnnnnnnnnnnnnnnnnnnnnnnnnnnnnnnnnnnnnnnnnnnnnnnnnnnnnnnnnnnnnnnnnnnnnnnnnnnnnnnnnnnnnnnnnnnnnnnnnnnnnnnnnnnnnnnnnnnnnnnnnnnnnnnnnnnnnnnnnnnnnnnnnnnnnnnnnnnnnnnnnnnnnnnnnnnnnnnnnnngagggtcagtttgtagctttgtggtttttcaaaattcagatatttttttttgttccccttctacataaaaacctcagtcaccactcctgagtggagatgggcagaggctctggcccctgctcctctggcttctcagcagctgctttcttattgctgcagcaaggcttgaagagatgtgtgtcaatgaggacttccccaaaacggcctttatagatgatcccacaacatatcttctgtcttttccagtaagtgagatctaaaaaggaaaaaactggtgttctgttagaaccagaagccatctctgtatctgagccgtcatctgactggttactgtaacaaggagattgagctggggaggcacttgaggtggtactgtgagcatcagaattatgacgtttaaattccttctgcagtttactgatctggttgctttttatcctgttcccagatagagttttcactttctttggtttcaatgtagtctttagactgggtccagcccttgcatctaccacatgattccagtttttttttgatcctgctggcaacttcttccatcttttcacaagcaggacacaggcattgcagatgtctcctgaacgagtctcatgcaatccaaaacagctctggaagtccttttcatagcgtttactgtcagtgaatcgagaactggaggacttagctctgcaaatacagcagccctctatacttcggtacatctttggcttgtgaaaaccaaacatcttttcttctgggcaatagtaggcctggtctgaagtcttaggtcaattagctgtccactcagatgttgtcaacttctcgtcctggtttcaggggttgaagctgtttggtgaatcagagacagggatctttggtgggagtcatggtccattcaggaagttgtgccttccaaaagcagccgttccacgcgcaataatgtccccgaggtgcggagtgcacgccaggccagtccccctcaagcgctccctcctc

SEQ ID NO: 46262 - DNA, 333 bp, Homo sapiens
gaactgaagtaaaaggttaatcttaggcagtatagcatggtcattaagaatacagattccatagccagactatgcttcaatctcagctctgctaataatgtgaatttgggcaaattgtttaatctctgttccttggccttgtcattataatagtacctacctctaatgaattttgaggatcaaatgaatcaatacctgaaaaatgcctggtgcacagtcagtgctcaataagagttaactataattattgtgttgcagaggttgtggggggccttttctgagtcctccaaaaggatggctttattggggccatattaagactatgaaaacaga

SEQ ID NO: 46263 - DNA, 1039 bp, Homo sapiens
ctgaacttggccctgtgtttaagcagcaggagccaatccagattttgttaattttcctacaaaaaatggatttgctactaaccaaaacccctcctgatgagataaagaacagtgttctacccatggtttacagagcactagaagctccttccattcagatccaggagctctgtctaaacatcattccaacctttgcaaatcttatagactacccatccatgaaaaacgctttgataccaagaattaaaaatgcttgtctacaaacatcttcccttgcggttcgtgtaaattcattagtgtgcttaggaaagattttggaatacttggataagtggtttgtacttgatgatatcctacccttcttacaacaaattccatccaaggaacctgcggtcctcatgggaattttaggaaactgaggctcagagaggtaaaataagtgattcaagatcatataagtggtatttacaaatgtacttttactcataagaagttgggaatcaccaaagagcagctggccggaaaagtgttgcctcatcttattcccctgagtattgaaaacaatcttaatcttaatcagttcaattctttcatttccgtcataaaagaaatgcttaatagattggagtctgaacataagactaaactggagcaacttcatataatgcaagaacagcagaaatctttggatataggaaatcaaatgaatgtttctgaggagatgaaagttacaaatattgggaatcagcaaattgacaaagtttttaacaacattggagcagaccttctgactggcagtgagtccgaaaataaagaggacgggttacagaataaacataaaagagcatcacttacacttgaagaaaaacaaaaattagcaaaagaacaagagcaggcacagaagctgaaaagccagcagcctcttaaaccccaagtgcacacacctgttgctactgttaaacagactaaggacttgacagacacattgatggataatatgtcatccttgaccagcctttctgttagtacccctaaatct

SEQ ID NO: 46264 - DNA, 1578 bp, Homo sapiens
  misc_feature (1)...(1578): n = a,t,c or g
gtgagtgacatcaaggcagtgaaagccaactggagcaaatggaatgatgactttgaaaaccactggcttacgcccaccatttccgaggtcctgtccacggcggggcctcagcagaactctctgactggggcccctgcgtgccccacccagccgacatgttttctttggcctgggtggtttataccctgagccaacctttaaaaattggtagatttcacataaaagtccagatccacagcttctcttgaagaatgaccacctggctacgccggctcttcggtggcaacactacctgggacactgcctccccagtcaccaagggccccagcctggcccgttctactcacctaagtgccgcctgacccttgtacactaggagctggcctcccacctctgcagggttatttcctgcacctcgaggccgctgcgggccaatctggagtgaaacacggggacctgaaggatggagaggctgggaccccgctttgaagagggtgcagcctgggaagggcgggccttgctggggactgcggtgggagtagagtgcccaggagagggtctgaggggtgggatgggggtcaggacaattttgcaaaagaagtagctggaagccatgggactggcgggagcctgtttgggggatctggatggttgactcctaggagtcaagttcagcatcttcgccgtggctgcagagctgcctgatgggcactagagggcacgccagccccacactccctgggtctggcttcctcccgcaacctcactctagtagagcctgtgcctgcctactagcgctctggggttcggagagtttgggaatttctcagagccaactggctcaggcttgggaaggctggctgctgccctcagctccgcctcatcagctatgtgaaggggtgtgtatggagtgatcctgccgccccctccctgggctggtccagagatctcaaactccgatgcccctggggccacgtatgttgtgtaaatggatgaaacaggcccttgagttgggagcctgcttcactttgacttttccactgtttgctggagacaaagacatcgtgntgagagaaagttcgcacaatctagtcggtaacagccactttcctttagaccaagagagtgcggtggggatgggggggagagcacgggtccccgtctgacagtggccgctgccatattcaggtgtagctaattgcctctggtgtgggaatgcaggcctaatgacagaaatctggagaagccagaaatacagatttgtatgtgagatgtcctgattttttaagttgttggcagaaattaattcagaaatcaaatctgcaggccaaacaaggtgcaggacccagctttggccccatgcccctgtaggtcctctgggacagtcaccgctggggtcctggctgctctgtcattgagggatgctgggcactgctgccgggtggccagggtatggggcatgtgcccagcaatgtggctccttggccccgctggccagtgtcctgggcccctgacaggcgctggctgtgagtggtttgtacatgctacaataaatgcagctggcagcaaaaaaaaaaa

SEQ ID NO: 46265 - DNA, 3311 bp, Homo sapiens
cggaattcgcggccgcgtttaaatgagctggggctggccgggccggagccgctacagggggggcctgaggcactgcagaaagtgggcctgagcctcgaggatgacggtgctgcaggaacccgtccaggctgctatatggcaagcactaaaccactatgcttaccgagatgcggttttcctcgcagaacgcctttatgcagaagtacactcagaagaagccttgtttttactggcaacctgttattaccgctcaggaaaggcatataaagcatatagactcttgaaaggacacagttgtactacaccgcaatgcaaatacctgccttgcaaaatgttgtgttgatctcagcaagcttgcagaaggggaacaaatcttatctggtggagtgtttaataagcagaaaagccatgatgatattgttactgagtttggtgattcagcttgctttactctttcattgttgggacatgtatattgcaagacagatcggcttgccaaaggatcagaatgttaccaaaagagccttagtttaaatcctttcctctggtctccctttgaatcattatgtgaaataggtgaaaagccagatcctggaccaaacatttaaattcacatctttacagaactttagcaactgtctgcccaactcttgcacaacacaagtacctaatcatagtttatctcacagacagcctgagacagttcttacggaaacaccccaggacacaattgaattaaacagattgaatttagaatcttccaattcaaagtactccttgaatacagattcctcagtgtcttatattgattcagctgtaatttcacctgatactgtcccactgggaacaggaacttccatattatctaaacaggttcaaaataaaccaaaaactggtcgaagtttattaggaggaccagcagctcttagtccattaaccccaagttttgggattttgccattagaaaccccaagtcctggagatggatcctatttacaaaactacactaatacacctcctgtaattgatgtgccatccaccggagccccttcaaaaaagtctgttgccagaatcggccaaactggaacaaagtctgtcttctcacagagtggaaatagccgagaggtaactccaattcttgcacaaacacaaagttctggtccacaaacaagtacaacacctcaggtattgagccccactattacatctcccccaaacgcactgcctcgaagaagttcacgactctttactagtgacagctccacaaccaaggagaatagcaaaaaattaaaaatgaagtttccacctaaaatcccaaacagaaaaacaaaaagtaaaactaataaaggaggaataactcaacctaacataaatgatagcctggaaattacaaaattggactcttccatcatttcagaagggaaaatatccacaatcacacctcagattcaggcctttaatctacaaaaagcagcagcagaaggtttgatgagccttcttcgtgaaatggggaaaggttatttagctttgtgttcatacaactgcaaagaagctataaatattttgagccatctaccttctcaccactacaatactggttgggtactgtgccaaattggaagggcctattttgaactttcagagtacatgcaagctgaaagaatattctcagaggttagaaggattgagaattatagagttgaaggcatggagatctactctacaacactttggcatcttcaaaaagatgttgctctttcagttctgtcaaaagacttaacagacatggataaaaattcgccagaggcctggtgtgctgcagggaactgtttcagtctgcaacgggaacatgatattgcaattaaattcttccagagagctatccaagttgatccaaattacgcttatgcctatactctattagggcatgagtttgtcttaactgaagaattggacaaagcattagcttgttttcgaaatgctatcagagtcaatcctagacattataatgcatggtatggtttaggaatgatttattacaagcaagaaaaattcagccttgcagaaatgcatttccaaaaagcgcttgatatcaaccctcaaagttcagttttactttgccacattggagtagttcaacatgcactgaaaaaatcagagaaggctttggataccctaaacaaagccattgtcattgatcccaagaaccctctatgcaaatttcacagagcctcagttttatttgcaaatgaaaaatataagtctgctttacaagaacttgaagaattgaaacaaattgttcccaaagaatccctcgtttacttcttaataggaaaggtttacaagaagttaggtcaaacgcacctcgccctgatgaatttctcttgggctatggatttagatcctaaaggagccaataaccagattaaagaggcaattgataagcgttatcttccagatgatgaggagccaataacccaagaagaacagatcatgggaacagatgaatcccaggagagcagcatgacagatgcggatgacacacaacttcatgcagctgaaagtgatgaattttaacttctggaaatcagacttttacaactggatgtgtgactagtgctgacgtgtttcttgtccctctgtatactgagtctttactcttgagctggcggtgtcatcgtccgtcacttataccatgagtgtgccactttcattggaccctgactgtatacagaatgaaaggcagtgcaatatttagctgctaacaagactggctcttttaccagtatgaatgacaatttatggggggtagggtggggaactttcttttctgtttttctttaatctccctttgttggaaagtatcatgaaaggaagagttatgctttatcttgaaggaaccattagatatggaaaatagtgatgaaccagagtttcttggttgctttttcaaaaatttgtttttatttggttctgttcctgataaacagagtaactgaccttcatttctaggttcttcaagaatggtgtttgcaagtgccagatggaacaataaaagacgttgcctataacagtgacttgattgccaaggaatgtaaattaccttaaacttgcagtatctcccataaacaaatgtaatgggcatattgggactcgtatgtaggaatcaaatatccctccatacagtgtactcttattcttggcaagaatgctttaatgtctaaccaagaattttaatttattcatcttgcttcaaagtgttgatcattgttgtcttggtattgcaaactttaaaattgtttcttaccaaa

SEQ ID NO: 46266 - DNA, 478 bp, Homo sapiens
gggattgtcagaatgaataaaaaagcaagacttcctatatgctgcctacaagaaacacgctttaaacataaagacacaaatagcttaacccttttcctgtttaggaaaaaaaattgcagctcactgccagcgctcatttaattttacataaacacgctttttgaggctgaagcaaatctgactgattttcaatgtgaaaataaaatataaaaactattcttggcgttatttctaaacagaactaacatcagaatcatctgaatcatcagaatcatctacttcagaaaaatcagattcatcaaatgaatcttcggccaacaactgttcgagaatgatgttaacatcatgtataggcatgctacgttttctaggatttgacattttcagtaatcaagagttactatattttgtaaatggaaataccgctactaaaaccagaatgctataaatagaacaatgtcttttgtttccaaagtcc

SEQ ID NO: 46267 - DNA, 2058 bp, Homo sapiens
  misc_feature (1)...(2058): n = a,t,c or g
gcgtaccgcccacgtctcagcttggagaaagacactcaaagacccccacgctcagctctcgggggctggcttcctgggccctttgtgctggctgctttcccggtggcttctcagcaccttgagcctctgatgccccgcctctgacctcaggtccaactacagcaggtggctgcttcggtgatcaaatccctccgtggcagccaaggacaccggccctccacaccagctaccaagagggctggtgcccacagggaggaccgggcgccaggagggcttcgctgaaatctcggtcccatcctgttctgcaagtggctgagtccctagggtgggacgagcacaggggctgaagggcccaggctgctccaggagtgctgcagacggcgaccgggaagtggggtgaccagggagcatggccaaggccagagtgatgagcatggtggcagggaggagagcacctcacgtacaaactgcacgagcttcgggcgcatgcatggctggccaagactgagggtcacacagggcagacaagggagacgagtcacacgtggcagcacatcatccagtcctcggggaggtgagggttggcatgtggcgggcaccggtgtgcagggcagccccatcctggggctggagcttccctagacccaggcaccacgcacaggcatcccctgctcagctcctgaaacccggcccctcctgcctggcccacgtccgctatcgcaccctccctgccattccagccgagggccccaccctgcgctcctttttcttcccagggtgttcccaggatggtcaagttcccagcactgagaacagctcaggtgtgggtgtggctattgtggaggccgtgtctggtgaacctggtgaacttggtggtgggacggtgctgatgcaggggagccacagagggttacgaccgacgcgggtctgacagcacaggcccaggcaggcgtggactcgggagccgagggtggtcggatggcagcgtgagcgccagtatcatttccagcatttccatctttaccactccagtcactctcttcaaaaagaaagaactagagcaaaaccaaagttaaatatctcaacgagaagggacacctcacgtcgctgacagctcggcacgtggctggtcccaggccccagagatactgcgtagtgaactggccgctggaacgcagtcacaggcctctgtgctgcagcccacctcccagcaagccacgcagagccccggccttgagtccaagaatgcccaggggagtgtgggacgggacggcccccacacaggctggacagcaagccgcccccacgcaccgaagactccccacgcgcaggcggcgcacacccgggtctccctagggtcctgcctcccgagacgctgtcctcacactgcagttgctgattcttgggtcaaatggaaggaggaggaacgacgagggcagagtgcaaacacgaagtcgcccgggggcgctggggacgggggcgcagtgggccctaccagttctggttgtcccagccatcatcagtgggcacggccggcggcactgccttcttggtgccctccccgccctccccgccgtcgctgttgctgttcctgttggtggaggccgagccccacacctcccagctgtccgagctcctcctctcggtggaggtgtccgcgcacgtccagctgtcgctgctcggggacttgcgggtcttggtgggctcagcacttccaaaggtctcccagaagctctgggtctatgttgctgttttggaagtggtccagaccgctgttctgataactgtggccctccgaggggctgtccaaggggccctctgctttccccgaaaaaaaggtggtgacgtcccgccatcccttactaccgactccctggacctggaaggagacgggaagagaggttaggcaggccctgtcgcggcacaggcagcttcaggaggcccccacacgcaagccggcacgcgccgtcccggtgagaagacccaggcaaaatccagaaacaaggggtgcctcgccggcgcttggaaggttttaaaattcnggnntttcaaaggttt

SEQ ID NO: 46268 - DNA, 490 bp, Homo sapiens
  misc_feature (1)...(490): n = a,t,c or g
gnnnnnnnnnnnnttnnnnnnnnnnntntgganancnctatgactgattacgaatttaatacgactcactatagggaatttggccctcgaggccaagaattcggcacgaggtgacatcacattcatcccctgggcgatggagcttgtcactgggaaggaatactcagtcggagaatagccaacaagatgggttactgggagaatctcttcagtggcactgagtggaggcatcagggggttggagccttgtgaacagggaacctgccccccaacacttggaaggacctgggtttcagtgatgagacatggggtatgatgtaacccgtttccagggggatgttgacgaagatcttatctgccctatttgcagtggagtcttggaggagccagtacaggtgagttggtctgatggcaggtttggtggggcaacaggtagcagtggaactagtagaaaatattcatgggcagcgggacccatggtgaagtcact

SEQ ID NO: 46269 - DNA, 524 bp, Homo sapiens; identical to SEQ ID NO: 19624

SEQ ID NO: 46270 - DNA, 1245 bp, Homo sapiens
  misc_feature (1)...(1245): n = a,t,c or g
cggcgtcactcagacaagggggcgggtggaggaggaaccggccaagtccacagtcctgctccggtgccgccgagcagcccacctcagctgaccagccctgtccgctactaggcctcgcctagaggagggaaaggccgtggcgtccgctccctccgcggctcatggcgacgacgcttggcacatccgggaccctcaggccgctgcagtcgcgtcgccggctgctcgggccccacccggccgctgtggtgactccgccgcgcctcgccgtcgcccccgtcccgcccgccgccccagccgccaggagcatgtctaacctcggaggccgtaggaacgggcctgtcgaagtgcgcctgacagggacatgccacccccgttttaggagaacttgtatttggtttgagaaggaattggaatcacggcgttatcctaccttcaccatttacccctgataaattgtccacgtttatatttgggaatcatattgacaggtcatgaaaatgagaccaaaagatctctggaagcgattaatgataaaatttcatggagaagaaggccttgactacggaggggttgccagggtgatgacaactccgtgagggtggagattatacatctctcatcatttcagcaacaaggaaataaattagtggcagagtaagggtgacttgtgggattaacttggttttatttcacagagatctcttggaagcgaggatcctttaaaaatcctggaatatacactgcagtaaaagaacaaagcatacctcagccttaaacgactgaagaagaatgtcaagtggggaagtggctttggttttcagtttgtgggttctgaatccacacaaagacaggattgctttctgaaaacctgaattaattattgtccttacctcaataaaacaaaaaattataatcaaaattattagtattacagtcacagatattgcgaagatgagtttgttcttatagtcatatcctggaacttctttcatgagctcacttgacttctgctctttctgttcattctgttccatgttctcattaatataatttgttttttgttggtccgtatccccattcctaccattcaatggcctttgcttcctgctggctcggctggggaagctttcatcagggagggcctgtttcggcaacatggaggcttggggnacaggntcccttggcacaagggggtttccggaacatcccatttncaaggncccggntaacaaggagacaggaact

SEQ ID NO: 46271 - DNA, 437 bp, Homo sapiens; identical to SEQ ID NO: 230

SEQ ID NO: 46272 - DNA, 1608 bp, Homo sapiens
aactgaaaacgcattgacataatcatttttatttgatttaattgataaataaatacaagagaactgttgtgaaaccactggcaatatagtaaattttaaagattttatttcaacttcactcacttatatttcttggaatggggatatatacattattcaccaataaatcgctaatgctttaaatttacaattaccctatttgtagaaacctgaagatcattccaattaaatcgaaaaaaaattgtacaaaaacgttcttttgctcttacaattcaaaatacattcaaattcacattcttacagcagccaaaacctttaacccaaaattcagaactgcagtcctacaagtgaacaaactagtgttttaatttaattatcatgattgttgttaacactgaaaaaaaaacatggtggctcctgaaacaagacaggttagcaactggtacagctttcccttctgggcactcaaagctttgcccttgattattatttttatttcatcttttcaaacacagacaattgctccaacttgaaagtttcaatggaattttggcatttaatattgctaatgcttgctaagatttaagatctcccaatgatgagaatcagaaaatgacgcacgactaaattaaaatcatcctaaaagacttactacatagtggtatctggtattcaatatcaatagtgtttttgaattacatgatatgtttttcacaaacatagcacctcatcaaatatctggtaaacactttgcaatcacaataagtgttgggagaccaagttccaaagacaattatgtgattcacttaaaggtaacattgtaagacaagtctcaggcataatgaagattaggaatgcagtctgctggttcccatgatctaaagggatgctcacctatatgggcaccatcctattaagacgtggtaatatgtttccaaaccaaaaaaagtcggtaagtgttaaaatggactcctgctttataaatgatctgttaaatgtacttgtaaaattaaaaaaatttccaaaatgtcaaaagagatatgattattgtatctcattattccaagtaattctgttaaaaagatactaaatgaagtccaattttatcttgtaaagttttagtgtaaaaactaatgtactgaaattcagtaaagtttaactttcatctaaatgtaacgaaacaactattcattttggtgagttttcacaagctgtactcctgacctgaagaatcactttttttatgccgaggagatggagtagtctttgtaggagatggggacgcagtaccaggtgagtcagttcctccatcgggaagtacttggtgatgacgccagatagggaactttctttcttccaaggaatcctcccccttcaaatcctcctttcttcctaaactctattttattttcattttcatcttctgatgaccttttcttggattctgaaaaaccttcagctattttatgcacttccaatccactatccaattctctcaaactttttatttctactccaggagactttctctcagatatattacattcccctgttgcccctttcacttcagcttgtattggacccaagttaccattttcagggacagct

SEQ ID NO: 46273 - DNA, 1218 bp, Homo sapiens
agctgccgacgccgagagcgggacccgaaaccggcagctgcagcagctcatctccttttccatggcctgggcgaaccacgtcttcctcgggtgccgataccctcaaaaagttatggataaaatacttagtatggctgaaggcatcaaagtgacagatgctccaacctatacaacaagagaaaaactggttgccaaggtgaagaaaagagggatatcgagtagcaatgaaggggtagaagagccatccaaaaaacgagttatagaaggaaaaaacagttctgcagttgagcaagatcacgcaaaaacctctgccaagacagaacgtgcatcagctcagcaggaaaacagttcaacgtgtatagggtcggccatcaaatcagagagtgggaactcagctcggagctctggcatctccagtcagaatagctctacaagtgatggagatcgatctgtttccagccaaagcagcagcagcgtttcctctcaggtaacaacggcaggatctgggaaagcttctgaagcagaagctccagataaacacggttctgcatcatttgtttccttgctgaaatccagtgtgaatagtcacatgacccaatccactgattctagacaacaaagtggatcacctaaaaagagtgctttggaaggctcttcagcctcagcttctcaaagcagctcagagatcgaggtgcccttgttgggctcctcaggaagctcagaggtagaattgccactattgtcttccaaacctagttcagagacagcttcaagtgggttaacttccaaaactagttgcagaggcaagtgtttcatcatcagttgctaaaaacagttcctcatcaggcacatccttactgactcccaagagcagctcttcaacaaatacatcgctgctaacttccaagagcacttcccaggtagctgcattcacttactagctttccaaggagcaggttcccagaccagtgggattttctggttttccaaaaggcatttccttaggcaagtgtgttcccagttggcttctaagagtagttctcagactagcacctcacagttgccttctaaaagtacttcacagtcaagtgagagttctgtcaaattctcttgcaagttaaccaatgaagatgtgaaacacgaagcaaccttttttcaatacgactatataaaacggtggcatggaagttggtagctgttggtggctttagtcccaat

SEQ ID NO: 46274 - DNA, 1474 bp, Homo sapiens
aatgggcccaagaattactccaaacatgaggagttaactgtgagcccagctcctgctgtgcctaagggaagggaatcagaaggtggagagacttgaagttgcactcaaggaggccaaagaaagagtttcagattttgaaaagaaaacaagtaatcgttctgagattgaaacccagacagaggggagcacagagaaagagaatgatgaagagaaaggcccggagactgttggaagcgaagtggaagcactgaacctccaggtgacatctctgtttaaggagcttcaagaggctcatacaaaactcagcgaagctgagctaatgaagaagagacttcaagaaaagtgtcaggcccttgaaaggaaaaattctgcaattccatcagagttgaatgaaaagcaagagcttgtttatactaacaaaaagttagagctacaagtggaaagcatgctatcagaaatcaaaatggaacaggctaaaacagaggatgaaaagtccaaattaactgtgctacagatgacacacaacaagcttcttcaagaacataataatgcattgaaaacaattgaggaactaacaagaaaagagtcagaaaaagtggacagggcagtgctgaaggaactgagtgaaaaactggaactggcagagaaggctctggcttccaaacagctgcaaatggatgaaatgaagcaaaccattgccaagcaggaagaggacctggaaaccatgaccatcctcagggctcagatgggaagtttactgttctgattttcatgctgaaagagcagcgagagagaaaattcatgaggaaaaggagcaactggcattgcagctggcagttctgctgaaagagaatgatgctttcgaagacggaggcaggcagtccttgatggagatgcagagtcgtcatggggcgagaacaagtgactctgaccagcaggcttaccttgttcaaagaggagctgaggacagggactggcggcaacagcggaatattccgattcattcctgccccaagtgtggagaggttctgcctgacatagacacgttacagattcacgtgatggattgcatcatttaagtgttgatgtatcacctccccaaaactgttggtaaatgtcagattttttcctccaagagttgtgcttttgtgttatttgttttcactcaaatattttgcctcattattcttgttttaaaagaaagaaaacagggccggggcacagtgggctcatgcctgtaatcccagcactttgggaggtcgaggtgggtggatcacttggggtcagggtttgagaccagcctggccaacatggcggaaccctgtctctaccaaaattacaaaaattagccgagcatggtgggcgcatgcctgtagtcgcagctactcgcgaggttgaggcaggagaattgcttgaacccaggaagtggcagttgcagtgagccgagacgacaccactgcactccagcctgggt

SEQ ID NO: 46275 - DNA, 1429 bp, Homo sapiens
tttttcacggtgccttcaagctttattgccacacacactcccccagcccttcctgaatggccctgtgcatgggaacaccagcttagagaagcaattcagggctaggcaagggccagaggactggatttgggactggggtgggtaggggggatctggagaaggaaagtgctaagaccaaagcccacccccaccccaggtttccctgagtggtgtccacccccagggtcttgggggctggcttgtgcattggggggagggggctcatcccaaatggatcctcccctggggtctccaggctcatggagggaagagaagccccactgagcccctcgcaccccccatgaagccctcaatgtgcagggagcaggaagaagagctgcacacaaacgcatacacatgcttgtctccaagagagctcctggcccctggggctgcccaacccaggggctcaacagtccagaccgatggacacgagcaggtcctcgagtgcccgcagacgctgctgcgcctcctctatggcgctgtaggtctgcaccgtgctggccacgtggaagcggatgtcgtccaccagcgggatagagtccgtctcctgccgggctgccacagccgctgcctcctccttcaccgcctccacgaagtcctcccgctccaccagcttctcaatgaccttggccatgtactcagtgcactggtcctcaagccgcgccaggcggaagagcttggccacgcgccacacacccaccacagtgtcctcgtctagcatctgagccaggctgcggccgcacagcctcttcaggcctggcagcaggtacatgtcggcgacgctcagcacatcataggctgcctcgggggacagctcagtgtggtcgctgtacatgtagtagagcacgtgagtgaagacgtcgggtgagatgccatgcagggtgacggctggggggccccctgaggtcgctggctcctcgctctctcggaagtggtcatccagcagggctcggaagtagtcactgcggccacagaaaaaggccttgtggcagaggaagctgcagccagccactcggaagcagatgtcagggcagctgttgaagccgtcaggacaagggaagggcagctcccaaagatcaccttcggagctcggggggcagggcacaatcggccagcagcgcccatgtcctcccggaggcgggggtctgcaggtgggggctcgatggtcagcaccttcacacacgtgccctggcttagacgccacaaactcagacaccttctcgcacttggcctccaggtcgctgagcaggtcccacagctggcattgcttggccaggcgctcacagtcactcacatgctctacgccaatgtccaggcggcctgtgtacaggtactgcagcaggccccaaaggccacggggttgatcagtgggtgcctgagaaccacc

SEQ ID NO: 46276 - DNA, 708 bp, Homo sapiens
ctgttttacaagatccaccggaaccgctatcctgtctgcaccaaagcctatgcttttgatcacttccccaagaagttcactcccaaaaaagatttctcgtctcattacgtcccagacaactacaagaggaatggaggacgatcatcctggaagtctgagcgctcaaagccacccctaaaagacttgggccaggaggatgatgctctacccttgattgaagaggttctagccagtcaagagcaagcagccaatgagatacccagcctggaggagccagaacgggaaggggccactgctaacgtcagtgagggtgaaaaaaaaacagaggaaagtagtcaagaacccccagtcaacctgtacccctgaggaacgacggcataaccaacgggaacgactcaaccagatcttgctcaatctccttgaaaaaatccctggaaaaaatgcccattgatgtgacctacttgctggaggaaggatcaggcaggaaactgcgaaggcgtactttgtttatcccagaaaacagctttcgaaagtgaccctcaaagaatgagaacctcaagcatctgggatccagtggagctaatcagtcctgcctcctgctctctgggtatagacaggggtgggaagggtccatctgggcaaggggaatggggccatgttgttgacattaggtacttaataagccttggagctagtggagagggagag

SEQ ID NO: 46277 - DNA, 2235 bp, Homo sapiens
ggtgcccgcagcctcctgccaggaccgcaggctggagacccctggatggacgcagggtccagggggaaagtacgggaggccccgagtgggagtcatagcagggacccgtagccccaccctatccccatccctgaacccgggatcagcgcctccctctggcccagggctggacatcgacgggctgtaccgcatcagtggaaacctggccaccatccagaagctacgctataaggtggaccacgatgagcgccttgacctggatgacgggcgctgggaggacgtccacgttatcaccggagccctgaagctcttctttcgggagctgcccgagcccctcttccccttctcgcacttccgccagttcattgcggccatcaagttgcaggaccaaggccgcgcgcagccgctgtgtgcgtgacttggtgcgcatgctgcccgctcccaaccacgacactctgcggatgctcttccagcacctctgccgggtgatcgagcacggcgagcagaaccgcatgtcggtgcagagcgtggccattgtgttcgggcccacgctgctgcggcccgaggtggaagagaccagcatgcccatgaccatggtgttccagaaccaggtggtggagctcatcctgcagcagtgcgcggacatcttcccgccgcactgactgctggcctgtgactggggcggcggccgcggtcctgccacacaagctgggcggcggaggccacgcagccgggccttcttctctctgggaccctccgccagcgcatagccgcacggcggtgtgacttctgcaccctcggttctgagggtacggtgacccctagtgggcagtttgcaaaatgtgattccttcttcccaactccccatccccccttcccttcccgtcacgtcctgtttgggggttaattcggttttttctctgttgcatcgcgcctactgtgcgtgtgcgatagcgtgtgtgggggtgagagtttgctttctggaatggtaggtgctgggaggaggagtttgatggagggcttcctggctgcttctggccctcacctcgtggaggccttcacagagaccctgtgggccctggccctgtgctggcactgtgccagtcatgaggcagctctgatcacttccccactgtggaaacaggactgacccagccttcagtgtgggctgctgaagctatcctcctcaggcctcagggatgacctcctgcctgagcctctcacaggctggctgtgggccagtttcatctgctttcctgttgggggtcccgggcctctgctgtccttgacccactggtgttctgtgcaaggcttcttcccattcaccaagtgcacaccttgcatctgccgctcggcatgcaccagttccacacaccatcccattttacagacaaggacgctgaggcctgcagcagcagtgtgacttgctcaaggtccagtgagtgacctcattccccagaaaaggctcctcccacaccagagtacagcctgggtagggggaaaatcagttctttcagctaccacccatccaacctttgggcctatgtgaaaagaaaggaactaagctgggtgtgttctgtctggacctggggaggcccctgaaggcaaagagggaaactgtcccagctgttctgtcctaggggagggggacatagccctagcaggagcttcccagcccctcttgggcactcttgacacacaagtacacccatctgggggcccgcttttgccacgaagagctgggcaggcctgcagggtgtggggaaggaggacacaacctcaagaaaggaagcgtgaaccccagggaacagcgggtcccttccctcctcagacacaagccacctcagcttgtggctcttggcccccagccccaccaacccacctgttcatttattcaacagacaatgacagctgatatttattggacatttgcaccatgccaagcattcggcttggattatcccatttgtttctcacagccggtatttattgtctgctcctctgtgccaggtgctgtgctctgggcaggggcactgcatgggctgcctgccctggtggagcttgtggtctgatgggtgaggctgacccaagcccaccccattgccaacagggccagggcaagagtacacacaggggcctcataccatatgtctaaatatttaaaagttatcaatcaagctaacaactgttaaataaaatatgttctattctcctactttgaaaaaaaaaaaaaaa

SEQ ID NO: 46278 - DNA, 1628 bp, Homo sapiens
tttcccattttgaatcctaacttcctagatgatctgtattttgaccttcaaaggggcccaaaatatttaaatcatgggtgaagctcatgttccattacctgtaaaggtctaatgcaacagaaaaatggtcattttacattggttagaatttttaactaggtctttcatattattttgtttagcacatgacagacttatacacatattttaaaaaatcaaacatggaatttctatatacatcaaacctttaacaatgtctgtctctgaattgctattatagtgttcaaaattatacaaacaaacatccagtaaacagcattttattttatgacactctgtgttaatacaataaatatacaaaacttccaacccactgaaacatgcaacattagagggacacatggagggcatttctgtagaaccatgacagtcaccatgatggcagcgcagtattagttactgacaaaatatacaaacatctctagataaataatccaagtcccaaattacaaatcactgagtaatgactttccggtgttcaaactttagtttgaaataaaattgccataatttaatattacaaaatgataaatgacacggatgactgctgtgtgaagaccattttatgactatgatttcatgactgtgattttagtactaaatatagaacacttaacaaatgccaatcttttgctgagtgaaaatttaacaatttactgagagaaaagtaaatataagaatttaaagttcctttcatacttgatcgtactataagcattgccatcatttcaatgcacatatatttttaaaaaacaattttctctctcaaactcatattaaataactggattttaaaacattttccccatccacacaaaaaaagatatgtgggttctaattattctttgctatttaataatgctacctttgaagatttctacataatataaacattccaattctgaagcaaagtatttcagcatttttcaaaagtctctaatatatcttttgtttgtagtgtacaggaaaaaatggacttgggatataagttaatggtgaatataggtgcacttgctgtattttgtggttaatgttttgaatgtatgcaaaatccacactcaataaagcacactgataaaatagatttccaataagactacaggctctgaaaaacaaactggctaagttggttgagaacataggtagaaattatcgctgattagaaatatttacaaaaaatagctttaaattcatacgctgaagaataaaagaaatgtcttccaagtatacctgatgtcaataagatcccaaataaatcaaatgtaaacaccatctggatggatctgtgttacctagtgacatgcagcgctgcttcatggatagtgaaaacttggcatcccacctctagcataaaactttttctgtaactacaggtttggggagaatgaaagtgatttaactatttatgcctatctgattttttaaaaaataaggatttccagcctctaatatcacaatccttacttaaaatctaattgaataatcactatcattctgcaatcttaatttagttaaagactttcaaaacacagcagcatgacttacagatgtctttgagtcatttattt

SEQ ID NO: 46279 - DNA, 4162 bp, Homo sapiens
  misc_feature (1)...(4162): n = a,t,c or g
ctgaggagaggagcgtcaacagcagcaccatggatttcttctgttggaatctggaacactggaatgatggaaatgtgttctttacaaagtagctcaacagaagaaccttgaaggctatgtgggatttgccaatctcccaaatcaagtatacagaaaatcggtgaagagaggttttgaattcacgcttatggtagtgggtgaatctggattgggaaagtcgacattaatcaactcattattcctcacagatttgtattctccagagtatccaggtccttctcatagaattaaaaagactgtacaggtggaacaatccaaagtttttaatcaaagaaggtggtgttccagttgctgctcacaatagttgataccccaggatttggagatgcagtggataatagtaattgctggcagcctgttatcgactacattgatagtaaatttgaggactacctaaatgcagaatcacggagtggaccagacgtcagatgcctgataacaggggtgcagtgttgtttatacttcattgctccttcaggacatggacttaaaccattggatattgagtttatgaagcgtttgcatgaaaaagtgaatatcatcccacttattgccaaagcagacacactcacaccagaggaatgccaacagtttaaaaaacagataatgaaagaaatccaagaacataaaattaaaatatacgaatttccagaaacagatgatgaagaagaaaataaacttgttaaaaagataaaggaccgtttacctcttgctgtggtaggtagtaatactatcattgaagttaatggcaaaagggtcagaggaaggcagtatccttggggtgttgctgaagttgaaaatggtgaacattgtgattttacaatcctaagaaatatgttgataagaacacacatgcaggacttgaaagatgttactaataatgtccactatgagaactacagaagcagaaaacttgcagctgtgacttataatggagttgataacaacaagaataaagggcagctgactaagagccctctggcacaaatggaagaagaaagaagggagcatgtagctaaaatgaagaagatggagatggagatggagcaggtgtttgagatgaaggtcaaagaaaaagttcaaaaactgaaggactctgaagctgagctccagcggcgccatgagcaaatgaaaaagaatttggaagcacagcacaaagaattggaggaaaaacgtcgtcagttcgaggatgagaaagcaaactgggaagctcaacaacgtattttagaacaacagaactcttcaagaaccttggaaaagaacaagaagaaagggaagatcttttaaactctctattgaccaccagttaacgtattagttgccaatatgccagcttggcacatcagtgtttgttggatccgtttgaccaatttgcaccagttttatccataatgatggatttaacagcatgacaaaaattatttttttttttgttcttgatggagattaagatgccttgaattgtctagggtgttctgtacttagaaagtaagagctctaagtacctttcctacattttctttttttattaaacagatatcttcagtttaatgcaagagaacattttactgttgtacaatcatgttctggtggtttgattgtttacaggatattccaaaataaaaggactctgggaaggattttcattgagggataaattgccataatatgatgcaaactgtgcttctctatggataattacaatacaaaggttcccttcagtgcagcatatacaataatgtaatttagtctaacacagttgaccctattttttgacacttccattgtttaaaaatacacatggaaaaaaaaaaaccctatatgcttactgtgcacctagagcttttttataacaacgtctttttgtttgtttgttttggattctttaaatatatattattctcatttagtgccctctttagccagaatctcattactgcttcatttttgtaataacatttaatttagatattttccatatattgggcactgctaaaatagaatatagcatctttcatatggtaggaaccaacaaggaaactttcctttaactccctttttacactttatggtaagtagcaggggggggaaatggcattttatagatcatttctaggcaaaattgtgaagctaatgaccaacctgtttctacctatatgcagtctctttattttactagaaatgggaatcatggcctcttgaagagaaaaaagtcaccattctgcatttagctgtattcatatattgcatttctgtattttttgtttgtattgtaaaaaattcacataataaacgatgttgtgatgtaatattgtgtgaggtcttaaatatcctacagtcgatgtacaagagtagagtatgtttgggaagaaacttttcagcttaagtttgcctcctctacaatgacatcttttatatgcttgtctcatttagaatgcatatgtgctgattttctaatttaagagataccatatctctctattcatttctatctctcatttgtatgcttatttttctgagaacattttttttttcccccnnnnnnnnnnnnnnnnnnnnnnnnnnnnnnnnnnnnnnnnnnnaaacacgactcgnnnnnnnnnnnnnnnnnnnnnnnnnnnnnnnnnnnnnnnnnnnnnnnnnnnnnnnnnnnnnnnnnnnnnnnnnnnnnnnnnnngtgctaatttttgtattttttgnnnnnnnnnnnnnnnnnnnnnnnnnnnnnnnnnnnntcatgctggcctctgagaacagtttctgactcattcagattaggtatactctcaagtccctggaaactgaaattttttttaactgtaaagagggtagtgcccatttcttttcttaaggtcaagtgacatagattttaatgtaatgcataatttaggtaagaaattaattaatgtagcctagtttattatcttgaaatgttttaccctatttactttttaaaattaatgacctaagcggagggaataattataagtcaatagcagagagattgttgtttgggtgtttatttttttcagtttttgttttgagagattgggttaacacctctagccaaaattgtttggttttagggaggctaacaataacctactgaatttggaaaatgcaaaggtaaaaaatgtatatagactgcctgctgaactggttaagtactactgcttctgggaaatactatttcaaaattctatgtattataataataaatttgtaagacattcattattctaccatcctaatgaaaactttcagaagtctttctttatccatggcatgcccagggttttacctgaatctgatacaggatctatataactttactaggacttttgattgttgactccaggcttaggtatatcagaaggttctttttgccatttggcctgtggatgtctgagaagatcattcacaatacatgtaaaattcaggtaggcctaaggaaaggccagcctgtagaaagcaaaatggcagtgtctgttctccactgttggagggcattatgtaatttaagtatcctgttagccactgtctttctgctaattaagtggggctgaacaagtaagcactaataataccagtgaaccacttgggcaccttgtgggtagagttttgctgcacctagtggaatgggatatcattgcttccatatcaggttcacaagcaagttaagtgggcacagtttatttctgtgtagctcaggctgtaatcttgaaagctgaggagatacccatgcctctcagactcattagctgggtgtcacattaccacctgcacattctgacccaccgcatcttaatatgttttgtcctcttggagaaactaggagtagaagtcaggatatggtaggtaagggggaaaaaggaaagacggcttgatagctatgaatgcatgaggagcgaaatgttgactcagttatctagatcatggtctccaaacctgatgctatttccttacaaaaatatttgttgagcatgtgtccataattatatgtattgaacaatgaaaatatgtgtcaacaaatgtactgctacactaatgtgaacattatggaacaaaatttgaaagagtgaaataaaaggtttacactttc

SEQ ID NO: 46280 - DNA, 1905 bp, Homo sapiens
tttttttttttttttttattgaaaaaaaattatattttggaagaactcactacataaggtgacagaattccaaaatcaaattacatgaaaatatacatcgcaatttctttgtacaataggtgagaaaaatctgcagtatagaagaatagaggcagagaaatatgaaggactaaggagaagggtatgagagtaaataggatttgtaatagcaaacccagaagttaagtagaaagcctgtagctgtgcatgcttcatttatccaaccttaataccaggcaactgaagagggaaaagtcagatttgctattgtttggggaaattttcagtaagttgaattaagaaccatctatttttagttctcaggggtaatgactgggatcaagagctcacaacggccaataaatgttattgctatatccaatccaagaggtgggtgcaactagaatacaaaaaggacaaagcacctagtgatgactccttcgaagtcatcattaaaaatcaagtaattgctcattaagtatttcagtatttgaactaaatcatttgagaacattctggcaggtaagagataaaagcaaaggggagtgtgtcaaaacaaagaagatacaaaagtttagtaagtgaaaagagtttaatgaagcctcaagggtttaagggaaattaaatggaaacttttaatcctaattgcttttcatctgacatgcttaaaggaatccttttaaactgataagaaacaatgaataggaaagaaaacctgctaaaatctcttagaatttacacgattcttattctactacaagaaagcattatttggtacaaggtgtatttgtggatgtacatgaacagtatatatattatccggatcatgttgtgctatgtacaggtctttacaattcttcctgaaggttaaaacagttcattagaattcaaaatgcgtaatcatctgtaagttggcacttgttaggctcttgtcagcattgataactggcatgttttattgcagcccagttccagccagtgtttgccaacttgtacaacagaagtccagcaataggtgggtagagtgcaggaaaaacagtgccatgtttctcaattggagaccctgaaataagtgaagttactagctgctaaataaatgtcactcaaaagcagtctcttggctttttcttacacagcgggcaacttttcttttaaattctccatttctatcttccctccattctttcgcagcatcaacattagcaggtgagtctccattagggtctgccagcatagaaatgacactaatcatgatggtttccacagtgtggatagggagccagcgttcctctggcttttcataaccatacttatcttccccaggctcatgaagaatagaaatgcacacatcaccatttttatcaacgatttgggtgccagatttctgtaatgaatttcattttaggaggtcggaggggataatcttttgggaaagtaagatgagccttaaaaacaccaccttcataaagtgtatctggagggccaataataaggacttcccatcggtagagatcattgtcatctattaaacctgcagaaaagccttccactggatttttgttgagttctgccagctgtcttcgcagtagcagtgccgactgcagctccgtcatcctccctgccgaggcgcccggtggcgccggggcttccgagggctgggacaggctctgggggcggctggagcgggtgtgccgaggaacccggcccccgacgagcccggaccgaggaaggccgggctgaggcgcggacgccctcgctgccggtcgagtccgctgttcagctcttttcacaggatcacgcgggaaggggagggtgcccggctgcggcgcgcactgggacttgctcgccgcctccttcaacccgccg

SEQ ID NO: 46281 - DNA, 1083 bp, Homo sapiens; identical to SEQ ID NO: 16581

SEQ ID NO: 46282 - DNA, 317 bp, Homo sapiens
ggattacaggcatgaaccaccatgcccggcctgaactatcttaaacatcccagggggtttcctcaaaatccaggtttccagctgctcatggaaagaaatgaagctctcacaaccttcaacctcagtttgcccccccagtcccctcatttataggagtcttcaacctacatcacccaaaaatcccaccgcaccccccgaaccgccttcaagcatagccacccaagaaccaggcccgactgctcagaggagaagggatgccccatccctgaaatgtcagaacccctccccagacattgctgcactctcccgttgggcct

SEQ ID NO: 46283 - DNA, 350 bp, Homo sapiens
gcggcacgagggaggttcttttgtatgtacctgtagaatacatcccagtaagggtcctatggagaaagacctgttgtcatcaataaccttcattattctaactgtgaaacgttcattaatgcgaataatatcctcaaagattttctacaatgagaatcatccagtaaagctttttaactgagaatttaaaagttgtaaaattgttagttaaatgtgtataattatcaaaagaggttgactttggaaaacaaacaatttgctaagggaaggaaaacttgaaaataatcaccttagatggggcatacaatttgacctaagcaattgtttcaaaactgtcttcagtttcttga

SEQ ID NO: 46284 - DNA, 1253 bp, Homo sapiens
gccgcccccttggctggtttggatccgggtcagtcgggtgcccgagatttgggagagacgctctgaactgactgccccgcatcaccggagcgtcccagctgcgaggagtgtaaacaggaacatcgataagtagtgtaaaaacttgcacaatgaaatccgaagccaaggatggagaggaggagagtctacagactgctttcaaaaaattaagagtggatgcatcagggtctgtagcatctctgtctgttggagaaggcacaggtgtcagagcaccagtcagaacagcaacagatgataccaaacctaaaaccacatgtgcatcttaaagacagttgggcacgggtctacaagggaagtcttcacgagggagcagtgaggaacttcagcgttcgttcgacgtttcttaagttctcctgttcctttcattccttcccaaagttttattacatttgcagtacaatagcgtcttcttccagcagtcaactcaagcacaaaagccagactgactcacctgatggcaggcagtgggctgggaatttcatcccctaaagagttcagtgcaggagaaagctctacttctctcgatgctaatcacacaggggcagtcgttgagcctttgagaacttctgttccaaggctcccatcagagagtaagaaggaagactcctctgacgctacccaagtcccccaagcaagtctcaaagccagtgatctctctgactttcaatcagtttccaagctaaaccaggggcaagccatgcacatgcataggcaaggaatgccagtgtaagagatggcatgatatggaagtatattccttttcaggcctgcagagtgtccctcccttggctccagaacgaagatccacacttgaggactactctcagtcgctgcacgccagaactctgtctggctctccccgatcctgttctgagcaagctcgagtcttcgtggatgatgtgaccattgaggacctgtcaggctacatggagtattacttgtatattcccaagaaaatgtcccacatggcagaaatgatgtacacctgatagcaagaagctaattcatatgctttaaaccaatgaaggcttgtcaaagagatttagttaatggcagaccttgtggccactttgtgtgagaagacatctctttctgctcactgtgcttgcaataaaaacttttcttggcatctcagttaatcttcattctttcaacttactctcctgagttcttacatacacttcaaggcgagc

SEQ ID NO: 46285 - DNA, 1380 bp, Homo sapiens
  misc_feature (1)...(1380): n = a,t,c or g
ggatggggaagctttttatatatgcatacattacatacctatatataaacttgtggtataaccatagaccatagctgcaggttaaccaattagttactatcgtagagtaatatatattcagaataataaactcaagctggagaaatgagtcctgatagactgaaaattgagcaaatggaagaagatacagtattgtttagatcagaatcattaaaaaatatttttgtttagtaagtttgaagatttctggcttttaggccttttctattttgttccatttatttttgcaggcaatcttttccatggagggcagggtatccattctttaccatgggtgtacctgcttaggttaaaaatcataccaaggcctcatacttccaggtttcatgttgcgtcttgttggagggaggggagagcaggttacttgggcaaccatattggcaccctggtacctggtcaacaccatcttgggaaaaattaaaacgggttattggaactagtgactaattttcccttacagttcctgcttgggtcccacccactgaagtagctcatccgtagtgcgggccgtattagaagcaagtggggtacgttagactccagatggaaaaagtattctaggtgccagtgttaggatgtcagttttacaaaataatgaagcaattagctatgtgattgagagttattgtttggggatgtgtgttgtggttttgctttttttttttagactgtattaataaacatacaacacaagctggccttgtgttgctggttcctattcagtatttcctggggattgtttgctttttaagtaaaacacttctgacccatagctcagtatgtctgaattccagaggtcacatcagcatctttctgctttgaaaactctcacagctgtggctgcttcacttagatgcagtgagacacatagttggtgttccgattttcacatccttccatgtatttatcttgaagagataagcacagaagagaaggtgctcactaacagaggtacattactgcaatgttctcttaacagttaaacaagctgtttacagtttaaactgctgaatattatttgagctatttaaagcttattatattttagtatgaactaaatgaaggttaaaacatgcttaagaaaaatgcactgatttctgcattatgtgtacagtattggacaaaggattttattcattttgttgcattattttgaatattgtcttttcattttaataaagttataatacttatttatgataccattagtaatgtttcttgcctaaagtcttataaagtgtatgaagcaatttgacagcattatttttaagcacaagcgaagattctttgaagtttaatggtattcntggaaactcctaa

SEQ ID NO: 46286 - DNA, 937 bp, Homo sapiens
cccacgcgtccgagcctgtctgtgctcagacatagagaagtactacctgacttgagtcaatgcacccaagaagaaaagcttggagtagagcagaagggagggcttgggactcctgtctttccagcatgccctggggtgcagtggtcagccacctgaagagagagccaatagcatggggtttacaaggcaaagatagtcattcattcaacacatattcatagagctccttctctgtgccagacactgttctggaagatagctagatgaaaatctttgcactcacagagcttacatgccagtgagtgaagatcgatgataaataaagcaaatgcatcatatgttcacatttgataagtatatgccaaaaaatgaagccgggaaggaggacaaggcccatgggtgggtgttgaggtttttaaagtgtggtcaggaaaggccccactgataaggtaacatttgagcaagtctgaaaaaggcaaggggatctttggggctaacttcgggatccctgcactttatgtaagaatgtaaacctggagtctcatttaagaatgatcagcaatacgtttagaacatatgaactgaatgaaatggacattttttcttaatttacgtataaatccatatgattatacataaagttctgatgcattaataaaagcagccaaatagggccaaagagaaaaataacaggactctgtactggacctaactttatcattaattaggtaatattttcctcatttctttactgctgccattttcctcaccagtattccagagatggtcatagctcattactctaccaccaagaacctaaaaggaattagaatacagcagaattggcctcagtgaagagcttaaaattgttctcctcgtagaactggactattgatcattaccacgtgacgttggctctattactttctgttcccaa

SEQ ID NO: 46287 - DNA, 2636 bp, Homo sapiens
gtttgcccttctcggagggtacctcctgttccctgtctgagcatcctgcatggaagtcaaaggaaatccctttcttggtgacgacttaaatctgggttccctcagacattgggttgcaccccaacaaatattaaatggcttcttcttaaagcccagagaaagaggttttttaaaagactgtcgccaaatagctgagccaaaaggctgatcagaattcactttttggaatgtggcagttaaacactaccttgatcattctctcctctttcctcgaggaactcctggagggtttgagcgtctggaaactctctgctctgacccgaggaagcaccctcctgacgccgccttcctccggttattgaaaggacgcctcagaaatgctttgttttcttttacgatgtattcagaagcctttactgattaaagttttcttttatttgggtggccgggagagacccagggaggttctggaggttctggaggttcctttctgtctcctggccccaccaggggatttccccatttctgtttgctgcctgaaagcaggatgaggaaggccaaggagagtccttgcacccgtgagcgtcaggatgaaggaaaatgacagggaggaagacgtgggtttgggttaagtggctgctggcgttttggcccttggtgtttctggagcctccaggggatctaggggagcctgggctgcgtgcatgtcgataagcagagctgttcttggggagaaggagggaggtctcgggagtgtagcaccatgccaaccagccctgcgcgaagacagagtgagccacgcccggatggcagggcatgtttctgttttggtgtctcactttcctcccagcgtgacttatttggggattcctcagggcctactggaatgtgactgcccactgcccagctgcctcgggtacaagtcctggccctatgtcccagctgtcaggggctcagggaatcctacccagccacctgtcctgggatggagtgtcagcatccaccccttggttgtcatcgaggccgccctcccagtcctgggtgaagatatttgggccaccagggctcccttggccccttcacgtaggaaatagacacgtgctttttaatgcaggacactttgagtgttacaaaatctgtagacctggcagtagggtcatgatgttgggaagggtgtagtgccctaggttggtgacagaagggacagacacttgtgcacaggtgtctttggtgatggggtttttttttttataacttagtaaaaaaaaaaaaaatgtatgtggaattctgtctcttggtaaagctcaaagccaggctagcctgaggtggcgcagggctctccttcctgtcccttcgatctccttgagaattaagagctggcagctgctgatggtgtttcccaacccccctcacttcccaagacaacccccagcttcaggtcctcatggggaggggagggcacgttcttgacacatgggaacttcgctcaggagggcctccccttcccctctccctcagagttttcactgccgtctcgtctttagaaagctgtttgaattccccccgcccccagtttggaccgtgtagatataactggatatacggatttttctctttgtgcaggcttcttatgccgttggtatacagggcaggaaagagaggaataaagggagagagcagtgtggaaaccacggtggttttgctttgttcttactaggttttggtgccaccttccctgcctgcgcttgtgccccctctcctccttgggcactggcggcctccttgcctcccttccaccagtgctgccatcccgtgcctgtcgtgttggttcttcacacgtgctctgttctcggggttgttccattcatgccttcttggagggtgagggtggcttgggaaccgacccagtgatcatgcctactttcttctttgtatctccctccttcccagcccacccggggagtcagactctgatggaaggaaggtgccgtaggtgggcttttagaaactaacgggactggttttcaaagcagttatcttgggaaactgtttattccagcgatgtgacttttttcagaatatttcttggaatcatattcagagtctggggctgtgtgttgagcagccttaaggatgctagacactcatttagtgcccagggagtccagcgaatgacgtctgtggccaagcgaggtctcaggtgcaaagcaaaaggaccatttaaagtaaaatagcttggattcaatcatgtgacttttaaattggctcagaaagcaattttgtaatttcagagagtgttttgagccatggccacgttgtcattgtgagtctatagcttgactccttggagaacaatattcatttggttgtggagactgatttgctgggagaaatctgtcctgttactttctggtcatcccaggttctgacttttaccaggggcaaaaaaaaaaaaaaaaaagtcaagagggagataaatcccatctgtgagtttgtcttattggcgcctttttcctcagctgtcttccaagtattatttttactgttaaaaaattttttaaaaatgtgaaatgtaatgtttttacagcaacaatatgaaatatattttataaggaataaaatggtaccttgtctga

SEQ ID NO: 46288 - DNA, 691 bp, Homo sapiens
cctttttgtccctttccccaagccaccaattggatggatgaatgtttgacggggaagaggaagggtaggaggatgcatggatgagtggatgagtggatcgatggatgtattgataaatagatagaaccagtcatctgaagcaacttaagaattgtagccttgactccttgagactgtagatttcgatccaggaaacatttatttagcacctgccagatgccagaaatttataccatttaaaactcagtaagtcttttaaatatcaggaaggagagaagcgacatcatgatacatcctatgggtattaaaaagccaatagaatattatgaataattttatgctaataaatttaacaacttcaacatcataaacaaattccttgaaaaataaaaagtaccaaaattcattcaagaagaaatagataccagcctgagcaacatggcaaaatcccatctctacaaaacatcaaaaaaaggaaaaattggtcgggcatggtggtgcacacctgtagtcccagcttgtcaggaggctgaggtgggaggatcgcctgggcccagggaggtcaaggatgcagtgagccatggtctcaccactgcactctagcctgggtgacagagtgggaccccgtctcaaaaaaaaagaagaagtagataatctgaatagccctatatctatagaaacttaatagtgc

SEQ ID NO: 46289 - DNA, 1837 bp, Homo sapiens
acctttgaagaaccgttatgacatgattacgaatttaatacgactcactatagggaatttggccctcgaggccaagaattcggcacgaggtagcttttcttttatcacgaccctcgcatggggcgagggaaatggccgagcatggctgaggccgcgctctggccgagagcagggcacagcccctgcgttggttcctcttaagctgtcctccataccctccccacttatattaggagctggaagctatcaaagctcgagtcagggagatggaggaagaagctgagaagctaaaggagctacagaacgaggtagagaagcagatgaatatgagtccacctccaggcaatgctggcccggtgatcatgtccattgaggagaagatggaggctgatgcccgttccatctatgttggcaatgtggactatggtgcaacagcagaagagctggaagctcactttcatggctgtggttcagtcaaccgtgttaccatactgtgtgacaaatttagtggccatcccaaagggtttgcgtatatagagttctcagacaaagagtcagtgaggacttccttggccttagatgagtccctatttagaggaaggcaaatcaaggtgatcccaaaacgaaccaacagaccaggcatcagcacaacagaccggggttttccacgagcccgctaccgcgcccggaccaccaactacaacagctcccgctctcgattctacagtggttttaacagcaggccccggggtcgcgtctacaggtcaggatagatgggctgctcctctttcccccgcctcccgtgagccccgtatgcttcctcctctctggtctgaggaacctccctccccccacccctccccgtggtcttcaggaactttgtctcctgcctgtgcaggttgaggaaggtagttgcaggccaggccagaaggccagcctcatcatcttttctgcagtagaaattggtgataagggctgcatccctcccttggttcaaagaggcttccacccccagccttttttttcttgggagttggtggcatttgaaggtgtttgcggacaaaactgggaggaacagggcctccaggcagtgaaagcactgcttggacatttgttacttttttcggagttagggagggattgaagactgaacctcccttggaagaataccagaggctagctagttgatcctccccaacagccttgtgggaggattttgagatacttattctttatttgagccagtcttgcaaggttaacttctcactgggcctagtgtggtgcccaggtttttgccttgcttcacttctgtctctacatttaaatagacgggttaggcatataaaccttggcttttcataagctctacctgcctatccccaggagttagggaggatctatttgtgatggcctagggtttaagagctgtggaggactgaaaactggataaaaagggggtccttttccttgcccctgtctctcactcagatgcgcttctttttcgccactgtttggcaaagttttctgttaagcccccctccccctgccccagttctccaggtgcgttactatttctgggatcatggggtcggttttaggacacttgaacacttcttttccccccttcccttcacagtaactggggcaggggcctacggggaggggcttgtactgaactatctagtgatcacgttaacacctaactctccttctttcttccaggggccgggctagagcgacatcatggtattccccttactaaaaaaagtgtgtattaggaggagagagaggaaaaaaagaggaaagaaggaaaaaaaaaagaattaaaaaaaaaaaa

SEQ ID NO: 46290 - DNA, 2422 bp, Homo sapiens
  misc_feature (1)...(2422): n = a,t,c or g
tttttttttttttaaaaaaaaggttggaaaaattactttatgaagccttaagcactaagaataattaattaaactgtaatccaggattagatacaatttaataatagttcaattccaaaataaaagttattgtaggtaagaccatgaaatttcctaacacttgattttaatacattgcgctaattttctaaaacaactcagaggaacccatatttacagtaggcagaatatttatgaaaaaaatctggcatcaggtatatttatatatatgtatgtgtgtgtatacgtatgtgtgtgtatatatatgtgtgtgtgtgtgtgtatcccgagattatatgaactaagaaacaagttgtgtatcttaacagcagtactagagcgcagagtttcagacttggatttataaatgctttcaaccgtgtggtgtttggaaaaggagaagacatcatctgattttcaaaacctgaagtttttctcaggactgaagtcaaaatcgtaactgccacagagggaaaagggaagcttttccccttaattgttcatctgcgtcagaaagtccagtatccctgagataggaaccactgtaattagaagattggaatgaacaggtttctcccaaaggaagattgtttgttgctgaattatgcctactgccctgatcatcaggtataaactttgcatcttccaacctaatgcttggcagcaccaagacgtttcagtaatggttcatcataaacccagcattctccatcttcatgaaataaccttgtctcccactgaatttccttctccttcctttctcgggcttctgctctttgtctttcttcaagcctgtgctttgcttcagttgctgcatcaatgtctctgatttttaagttgaaagtgacatccttccaaaggctgcgggattcatactcgttctgatcttccaacttcctcactttcttcttgattataggcaacttcttggtatctacaaagactgtattttcccctgttgcatattttgcatacatcacaccattccattccccttcaattgagcaaaaagacttcttgtcatttggagaaaaaatctcggcagtaattctgtgcttcttgcccccatagaagggtttagtgtggaagatgatatttgcactatagcctgttttggaacaattaatattgcattctcctcctaattccacccagggcactgtgaggatagaccttccatagccattggggaatgtgagaatgtaatgttcatcatagtctagacatgagacacagccctgccctatgttgtgcaccccaattgacatcccaaggaattttgatttggtccagatatgagcattgaattgtatcttcttgttaaaacactccagcataaaaaggctgaaaatgggtggatgatgggaaacctgctcagcccacaaatgttacactgtttttggaaacccagggaactggtccttctgaaactagttctgtgttctcttcagtatcatttggtaatgtccaatgacactgaaaaatctcgcccaaaatgggattgtatggctttttggcaactgatcctttccttcccgcatgaaaggctgagaggtaccatttcacaacctgaaccattcgatccttgggatccttctggtcactaatgctcacaaacaggtccggatgtgcaaaaaagtctgcatacatttctaaaagagatcttctttcaagaataaacgttggaagaactaccttagtaagatccatccccagcctgacttgtgataagaggtgcatgataacgctcttgtgctcctccactgacccagcctccgcatcatcatctctgtcatcatgtgaatcaaacaggtcagcatcacttgttccattggacaaggaagaattaagtgattctgtggtatctgggcgttttagactatttcccgagctgctgtgtgtcaggactgaggcagatccagaagaatctattaagcgctttggggatgagccactttgatggaattcatcagcatcataaaattcatcttcactgctggagtaagagaactctgggactgtatttggagacaagttcacgtggcttggagaagtgagactgctgctaggtggtgagttcccactgcctgtactatttggtgtaggagtctgatgatgtcccaaggtagccaacacaggtccaactggtagggaagatggacgctgctctgacttacacaactgagcgggttctggaggtaacacagtctgggaaggcattgtgctgatcacaggttccaaaggactaggttgatatattgcatctacgggattaatagtacttataattccatctgcgtggcntccgcattactctggtctttagcaatctgtagcaacacaatgcagtgtttaattgattctaccatgctatttgttgtgt

SEQ ID NO: 46291 - DNA, 1006 bp, Homo sapiens
tttttttttttaggtgctaaaacttggttttgaaattttattaaaaaaatatatttgcaaacatataaaatttaagatgaaaaacgctcattttaaaacatgtaataacttaatatttgcaaacatacacagatgctataaaatccataccgttaaaaatgttaatgatacagtattgcgctcatggaacaaaaatcttgctgtaattccagagcttctcgtccccatgtttcagggagctgagaatctggtacaatgaaagtcatgagagccacatggccaaagcagtaatacagaataaaaaaccatttagaacacatattttaaaaacatgtttcttaaggaatcacacagataaaaaggaaacacaattctggcattttccccactttgaagtgaatgatattgcatcttagcattttaaatgaaggtgtcaaatacaaaacggagggaatcactgcacacatctgttgaatttgctgaaaaacaggctcctcaaggccctggtccactcggaaatgttctcaagcacagctgtaaaaaagccctagtgtaagctgcttgactttgcctcagatcttagcattttagagacttgagaacacagggcactattggttccagaagatacactgaacgcaactgaagaaaactgaagggaggcaagaaagaaaaacatactctgcagcaaacgtgcagccaggatgcaggatgcgcaccctaggattcctcagttctcctcactcaccacgggctgagccccactcgtgcctgtgccacctctcattcctctcagagttacagtatgatggctgattttgttttttgagcagttaggcaccttcaatttcatgttgcattattagtaatacaatggcagttagggcctctactatggaaatgagaaaatttcaaactacattctttgggggaggagagtaataaagctgcatggtttaaaaatttacctagtagtggatttgatagggtttatataatttctaca

SEQ ID NO: 46292 - DNA, 245 bp, Homo sapiens
gagtaaatagaacttgtccctaaaaggatctagtaaaagaattgaaatctagtttgtagactgttagttattactgcattgctaggagtttatcacctaagtccagggatggaagcctgtggcatttatcattactttttggtaaggtactgttttgttgtagcgttgttcttttctttttttcttttcttttctcttttctctttctctccctcgcgctctctccctctctctttcttctcact

SEQ ID NO: 46293 - DNA, 2351 bp, Homo sapiens
ttttttttttaaaatttccattttttttttaatctccagtataaaaagttccactggtacaaaatgcataagtacaatcagttgtagaaataggaaagcctgcgtattttttttttggctcaaattccatcaaacaacaaaatccaaatgcatcaataaaacaaacaatactcaaatggtcttacagtttccactaggttgcattaactttggcttttctcagacaatatttaaaaactattttgtaattctaaacaaaatgattattaatctacaaacatcaattctcacagcacaaaaaaacaaatacattttttgtatgacattattcaaaaaggtaatgaaactacaggtttttttaaaattttattttttttttaattagcacttaagataataaaaacaaacagtaaaatgattccagagtagcacaagccaactataacccctatggtgaaagaaagatgaactcgttacgcctttgaggactgccattgtatcacaattctctaatttagattaaaaatgactattctctacaattgattaaaaaaagcggtttccctgtgtgtgttttcttctgggcacaggccctttgcacccttgcagctttttccttttgatatttattaaaagataaaagtggatagaaggacagtttgtctctgtggaaggttattttttggagaagggcaaaaaaggactttccccctcatgtcctctctctcttggtgacttgtgaagaagaaacactcgattcagagggcgcgtcctgagcctcctgtcccctaccctcagtgtttcctctgggggagatgcatgcaggtgggttgaggttgagagggagatggggaggggagtcggcttcagtaaattgtttttcgttgagatttaggtaattgataagaagtttcagaatgaaatggtcttagaaattcaagtggtgggctcttgtgtttccacgtacgtggtaacgtgtcgagacacaccgtgttctcagagagagacaggtgcaataagtgttgttattaagctgattgctgcagaaagtacaaaatagccctcagaggatgaaggaaggccccagcagtagtaaacacatgtgaggataatacaaatcatgtcattgtaaggaagtgcatgtgctataagaaggaaacgtttgtgttgctttttgtttttttgcatcagtagaggctagtcctttccatcccagggctatcccatccacacacactgatcctaacagggtgctgagcggggaaggggagctgaggccaagaagcttccagggcatgccgaagaggaagactggagcttgtgttggggctgtaggcgtgacattaggatttgtcaagacagcaaggtacctgttcgtagaaagtcatatggcactttaaaaagtggcagcaggaactggtgctaggtatttggtcagtaaattgtgataaagaactgagctttacttagatgaaatgtgttcaattaaaaaaaccaaaaaggctgggaaagggctatgggcttctaactccagacacctggtatattcagaggtacctactgggatcagagatgccccagcataatggctgattagaaatattatttaggagtatttaggaaacagaaacaaaacccctcaagagactgtcctgccacaaagtcgttttactgcaaggtatatgaaaatattctagactaggacatagcactaaacgtgatctcaaaagcatacaggattgttaggtgctgaatctacctccgttttccctcagggtttatccaattactcgttaaaactgaagaaggaattctagtagcacattaggaattcttttcccaaaaatgagaaataatcaaaagtagtaaaagtagtgtaggattttttccctttagattggcctcgtggaattgttttctgttttcttttggatcttaaccaaagaacaaagtagtcaaaccgaaacaacttagaggatagatgccagggaaaaaaatccaaattggaaacacccccaaaacaaactcaaatcatgacagtataaaaagtcatcaacattcccagatagctctggggtagaaagggttaaaagttcaaaactttctcaccttagaggtttccatagattatgaagaaaatacatggtgaggttgccttcacagcactgatgtgcggagtggttaaaaaagtgggacatgggcacttatacaatgtcttacaaaaaacatcagagagaaataacaaacaataacaatttcaggcaacaagaccacaggatagcaagttaacaaactttgtaacctttttttgttttgtttttttttttaaatattagggatttatacaaaac

SEQ ID NO: 46294 - DNA, 384 bp, Homo sapiens
ggccaagtacccgcgtgcatacggctgccggcatggcacattacaacttcaagaaaattacggtggtgccgtccgccaaggacttcatagacctcacgttgtcgaagactcaacgaaagactccaaccgttattcataaacattaccaaatacatcgcattagacatttttacatgagaaaagtcaaatttactcaacagaattaccatgatagactttcacaaattctaacagatttccccaaattggatgatattcatccgttctatgctgatttgatgaatattctctacgacaaggatcattacaagttggctctggggcaaataaatattgccaaaaatttagtggacaatgttgctaaagattatgtgcgactgatga

SEQ ID NO: 46295 - DNA, 1974 bp, Homo sapiens
cgcaggaggaggaggaggccgtggcgacggcgatggcgacggggacgcggacgcacgggcgaggacgacccggggcactgggacgcggacgctgccgaagccgccaccgccttcggggccagtgcgggggccgccgcacccccgggcgctggctgccgaggagatccgacagatgctacagggcaagccgctggccgacacgatgcgtcctgacacgctgcaggattacttcgggcagagcaaggccgtgggccaggataccctgctgcgctcgctcctggagaccaacgaaatcccctcgcttatcctgtgggggccgcgcgggctgcggcaagaccactctggctcacatcatagccagcaacagcaagaaacatagcataaggtttgtgacattatctgcaacaaatgccaagacaaatgatgtgcgagatgtcataaaacaagctcaaaatgaaaagagctttttcaaaaggaaaaccatcctttttattgatgagattcatcggttcaataaatctcagcaggacactttccttcctcacgtggaatgtgggacgatcactctgattggggcaaccactgaaaacccttccttccaggtcaacgctgctcttctgagccgctgtcgagtgattgttcttgagaagcttccagtagaggcaatggtgactattttaatgcgagcgatcaactccctgggaatccacgtcctagactctagccgtcccactgaccctctgagccacagcagcaacagcagctcagagcccgccatgttcatagaggataaagcagtagacaccctggcttacctcagtgacggtgacgcccgagctgggttgaacggactgcagctggcggtgctggctaggttaagctctaggaagatgttctgtaagaagagtgggcaatcctattctcccagtagagttctgatcacagagaatgacgtgaaggagggcctacagcgatcccacattttatatgaccgggcaggtgaggagcattacaactgcatctccgccctgcacaagtccatgcggggctcagaccagaacgcctccctcttactggctggctcgcatgctcgaggggagggagaggacccactctacgtgggcacggaggctttttcaggttttgccagcgaggacataggtctggcagacccgtctgcgttaacacaagcggttgctgcctaccaaggctgtcattttataggcatgcctgaatgtgaggtgcttctggcccagtgtgtgggtctactttgccagagccccaaagtccattgaggtgtacagcgcctacaacaacgtcaaagcctgcctgaggaaccaccaggggccactgccccccgtgcccctgcacctgaggaacgcgcccactaggctgatgaaggatttgggctatggcaaaggctacaagtacaaccccatgtacagcgagcctgtggatcaggagtacctgcctgaagagttgaggggggtagatttcttcaagcagaggaggtgctgactcctcagggcacgacagcagaaggatgttgcttttttaagggagggccagaaagaaagttagtggattgcaaagttggttgcctggtggaagttagaacagaccaacattttgtgccagaaatttaagagttccataggtggaggcgcagttctttcgaataaatgtgtaactttgaaattgtgttcatttgcactcggtgcagcggttatgcttatgaaaatacctggcagctttgtgcaatgaattaatgttataaggaattatctattttgtcatagtatttaagtcataatgtcatttcagaattcagttctgtaggattttcttttctttaaaaaatgtatattctgggtagttttaattggtaaaaaaatgtaattgtgatttaatactgcatagtgttttgggtattttttttatatgcaaaggtcttacgagccaataaaactattt

SEQ ID NO: 46296 - DNA, 2915 bp, Homo sapiens
caaaaagattacagcccaaattaaattcctgtacgaggaacttggacttgacagcaccagtgttttcgaggatcttaagaaatacctgaaattctgaaacactgcattcaactgggaattggaaacacactgaaatatttcatagtcttacttccaattgagttagcaaaaaaaaaattaataacttgagacttttaagttattaattttttaaaatgtgcttctccatctaaattttgcttagtctacatctcacttgcttatactattctctccattgatgcacatgcccattaacctaggaaagtagttttcaaatcatgctccttagaaggatgtggagtagagggaagggaaggattggtgatagcagagctccaggcctcccttccagtcagaacagttgagcagtttacaaattagtgtcctgcctctttgctagcaaatgcttttagacactgtggcagtgagtcatcctctaatttctatgactgcattttaagggaaaagataaaattcttccccttaaaattcgttaaagtttttgaataatctggggtcctaatgtgttctggtcatccctgattgatgctatctgaataaagttataagctcctataagccataatttacttttaaacattttatttttttcaaaacatttgagaacctttcttaaagcggttacattcaagctacagaaatatcgaagaattaatgattgttcaccaagcagcatgctgtacatgaagctattacaaatgcttacaatcccactgaaatgccagtgtcttcatctcttcataaaggtgcctaacacgaggtatacagtatgttcagtacactggaatagcatgctcgattggaaacaaagcatctatctctgaaagctgtttggcgatgaaggagattcttcgtgttgtgttcaaagatgagtccctctcccttgtccagaaaaatgccacttgtatcaactttactgcctttgtcggcagaattggtacttaaccttattctcattttagcgggaaggcccgaaatcatattatgtagatttaacagtgttgattctccaaaattcagaaccacgataaagattctgtcgatgccatccagctctcttgtgtacacaacatagtggctgtcattcctcaaatggcaaaaccagcccctgttgaggagtagctcattggcatgaagtagacttaaatcttgatataacttcaaagccgatctgggctgagtcttttggacatcaacattcacagtgtggtaatctgaattggtaggtaaccaggtgttactagcttcagaaaaaccagcatttgaactattgtcccactgcattggtgactttgagcgaagggtattaatatcatagctttcattgagatttgcggctacaatatttcccattccaatttcttctccatagtaagttataggagttccagggagtgtgaaaagaagcatgttcatcacgttgacatactgattccccaaacgcgaagtcagccgtgaactgtctggtccaccaatcatccagttaggccattttccttctggcatgttttccatccaggatgtgataacctcatacacgctgttcccagaaacagtgtctagcatgctgaggtaattgttgaagggaaaatcagcttcttggataaatggcaatccatagtacatcacggtcctgtcaatactctctgcataggcttcagtccccatgaacctgtatctgccgggctccgtgctgtattggtccatggtctgccggaagctgcggacaatgtcgtgcattcccacctgcgtggtggtgaagtcatggtacagctccgagtattgtgtgaccgtgtccgggatttgggtcttatttacttggatctcatctctcaggtgctttgcttctaggaggaatttaacagcatccaaactaaaaccatcaacaccctttgtgagccagaaccgtaaaatttcttttatttcttcttgaacatcaggattgcggaaatttaaatcaggttgctctttcataaactgatgaaaataacattggtttcgcacttcgtcaaagtgccaactggagtttccatacacacttaaccagttgttgggtggaatggttttgccattttcatgggtacagtcatgccagatataataatcagtatattttcctgtccgtgtccgactcaattgaaaccaaatatgtttatcactcgtgtggtttggtatgaaatcgatgattaattttaaacctttatcatgtatggctgcaaccagattctcaaaatcttccatcgttccaaaaatgggatcaacttcccggaaatcttcaacaccatatctgaaatctttaagggacgatttataaaatgaagtaatccaaacagtttttatatttaaagctgtgatgtagtccagtttatcttgaatacctttcagatctccgttcccatccttgttactgtccttgaaagaccttgggtagatctggtacatgggcccctcctgccaccagtctaggcactttggagagagggcaatgatggctatggtggccgcgatgagcaccagcacagaagccactgtgagccagaagaggatctcccgaggtatgcggtagcgggcctggccagagaactggaacagcacctccttgggcatccccgcatagggctggacgcccttgaagtcgggctcctgggagccaaggatgcccctggtgctgtgcttcaggttgtctgttgagctgcctggatccggggtctgctccagaatgtcttcattatggacaaacccgttgtttgtctggcatcccttcatactcatctcgatggagtctctcttgcttttatcttcagccatgtctcaccgacttatgtcttcggagtgccttcctgcagtaaggc

SEQ ID NO: 46297 - DNA, 2193 bp, Homo sapiens
cccgggcacttttcagaaaaagaatctgcatcctggaaaccagaagaaaaatatgagacggggaatcatcgtgtgatgtgtgtgctgcctttggctgagtgtgtggagtcctgctcaggtgttaggtacagtgtgtttgatcgtggtggcttgaggggaacccgcttgttcagagctgtgactgcggctgcactcagagaagctgcccttggctgctcgtagcgccgggccttctctcctcgtcatcatccagagcagccagtgtccgggaggcagaagatgccccactccagcctgcatcccatccatcccgtgtcccaggggtcacggggcccagaaggcagccttggttctgctgagtgcctgcctgggtgaccctttgggggctaggagagccaccagagcacactctccggtacctggtgctccacctagcctccctgcagctgggactgctgttaaacggggtctgcagcctggctgaggagctgcaccacatccactccaggtaccggggcagctactggaggactgtgcgggcctgcctgggctgccccctccgccgtggggccctgttgctgctgtccatctatttctactactccctcccaaatgcggtcggcccgcccttcacttggatgcttgccctcctgggcttctcgcaggcactgaacatcctcctgggcctcaagggcctggccccagctgagatctctgcagtgtgtgaaaaagggaatttcaacgtggcccatgggctggcatggtcatattacatcggatatctgcggctgatcctgccagagctccaggcccggattcgaacttacaatcagcattacaacaacctgctacggggtgcagtgagccagcggctgtatattctcctcccattggactgtggggtgcctgataacctgagtatggctgaccccaacattcgcttcctggataaactgccccagcagaccggtgaccgtgctgggcatcaaggatcgggtttacagcaacagcatctatgagcttctggagaacgggcagcgggcggggcacctgtgtcctggagtacgccacccccttgcagactttgtttgccatgtcacaatacagtcaagctggctttagccgggaggataggcttgagcaggccaaactcttctgccagacacttgaggacatcctggcagatgcccctgagtctcaggaacaactgccgcctcattgcctaccaggaacctgcagatgacagcagcttctcgctgtcccaggaggttctccgggcacctgcggcaggaggaaaaggaagaggttactgtgggcagcttgaagacctcagcggtgcccagtacctccacgatgtcccaagagcctgagctcctcatcagtggaatggaaaagcccctccctctccgcacggatttctcttgagacccagggtcaccaggccagagcctccagtggtctccaagcctctggactgggggctctcttcagtggctgaatgtccagcagagctatttccttccacagggggccttgcagggaagggtccaggacttgacatcttaagatgcgtcttgtccccttgggccagtcatttcccctctctgagcctcggtgtcttcaacctgtgaaatgggatcataatcactgccttacctccctcacggttgttgtgaggactgagtgtgtggaagtttttcataaactttggatgctagtgtacttagggggtgtgccaggtgtctttcatggggccttccagacccactccccacccttctccccttcctttgcccggggacgccgaactctctcaatggtatcaacaggctccttcgccctctggctcctggtcatgttccattattggggagccccagcagaagaatggagaggaggaggaggctgagtttggggtattgaatcccccggctcccaccctgcagcatcaaggttgctatggactctcctgccgggcaactcttgcgtaatcatgactatctctaggattctggcaccacttccttccctggccccttaagcctagctgtgtatcggcacccccaccccactagagtactccctctcacttgcggtttccttatactccacccctttctcaacggtccttttttaaagcacatctcagattaataaaaaaaaaaaatatctcgagggggggcccggtaccca

SEQ ID NO: 46298 - DNA, 1881 bp, Homo sapiens
  misc_feature (1)...(1881): n = a,t,c or g
atcccatcataccttaatgatgaaccaccagaaggttcaatgaaagatcacccacagcagcagccaggcatgttgtcccgtgtgactgggggtatcttcagtgttacaaagggagctgttggtgccaccattggtgtagtggcttggattggtggaaagagtctggaagtgaccaaaacagctgttacaactgtgccttccatgggaatagggctggtgaaagggggtgtctctgctgtggctggaggtgttacagctgttgggtctgctgttgtaaacaaagtgcccttaacaggaaagaagaaagaccaaatctgactganatatagagatacacttgcgctccacagcactgtaatgccagtggttggaattgctaaattatggactacaaccaagtcaactgttttggacgtttatcttctaaactgctgtgttgaaagtattgatgactggctttcatctaaaaagaagagaccaatacgagcacagtatatgaaggtttctcataccttaagttcccagggtttttatctggtaaaatgttacacttactcggttgtaactgaagatatggtatgtttgaatatttactataagtctttcagtttgactaaaaatgtgaaagttgaatttagtagatgatcttcacagttccatatgtataatgtgccaggtaactcacctgccccttaagaagggaaccttgaattacataagccgtacctttgatgtgcctaatagtttcagatgtcttagttttttataaccatagttgattaggccaagaggcattcatttcttatttaagctggcaaaattagcaggaattagagaagtttaaaaagataaatggttttatgataatgttaaccatcttttgttagtaaatatgcgttctattattttaatcattgatgccttacaaaagaaaacatcttttctaataccctgaatatgtgctgttcttagaatcatctatggattcttttaaaggttgtttgtgaaattagttttccctttttagaatctcaggagtagtggggtaaagacatttcctgctgtcagtggataagacagagcttgttaactgttttggcagtagttaaaatcaaattgtacacttctcagcctgggttcatgcttcatcattaatacacctcacagtgcctaaggaacatttacttactggtcagaaggtattttggaagagtttcatattaaggaggaacaaataataattttaagttcttaaaaattacctaaaacaccccaaatataaaaagaagccttcacacctattctgtctttaggatgtccttaaattattagcagtactcctttttttaaaaacactgtaaaagtaacccacaaatatgtgaggacttactattttaaatggaatggaatgagctccatagattagttttgaatataaagtatataaaagtgcatcagtggtttatataggctttaaaaacatgttatcttacagtcctttaaagcagccatagagtttgtatcatttttcaagccaatttcagtcagggatttgaattgtttgattatggatgataaatgtgtcatatcttattaatatgtctcatgtctcgttccttcttaatatgatttagctggaattcattttcttttcgtttcatgtctaatttcataaaacgtttaacaattggcatatatacttggcattcctgtccaccgaggattgtaatccaagcctgggaaaatcttaaatttctttttacttaaatctggaaanttgtctccattctgccaccttttttttntttccttttgnnccngcgcctnnanngnnnntatccttggnanncnntnatcncnatnttggtntatnnctgtaac

SEQ ID NO: 46299 - DNA, 1212 bp, Homo sapiens
  misc_feature (1)...(1212): n = a,t,c or g
gctaagaaggtctatgtctactgaaggcaataaacgaggaatgatccagcttattgttgcaaggagaataagcaagtgcaatgagctgaagtcacctgggagcccccctgggacctgagctgcccattgaaacagcgttggatgatagagaacgaagaatttcccattccctctacagtgggattgaggggcttgatgaatcgcccagcagaaatgctgccctcagtaggataatgggtgagtcaggtaaataccagctgtcccctacagtgaatatgccccaagatgacactgtcattatagaagatgacaggttgccagtgcttcctccacatctctctgaccagtcctcttccagctcccatgatgatgtggggtttgtgacggcagatgctggtacttgggccaaggctgcaatcagtgattcagccgactgctctttgagtccagatgttgatccagttcttgcttttcaacgagaaggatttggacgtcagagtatgtcagaaaaacgcacaaagcaattttcagatgccagtcaattggatttcgttaaaacacgaaaatcaaaaagcatggatttagtagctgacgagactaaactcaatacagtggatgaccagaaagcaggttctcccagcagagatgtgggtccttccctgggtctgaagaagtcaagctcattggagagtctgcagaccgcagttgccgaggtgactttgaatggggatattcctttccagcgtccccggccgctnataatcagaggcaggggatgcaatgagagcttcagagctgccatcgacaaatcttatgataaacccgcggtagatgatgatgatgaaggcatggagaccttggaagaagacacagaagaaagttcaagatcagggagagagtctgtatccacagccagtgatcagccttcccactctctggagagacaaatgaatggaaaccaagagaaaggtgataagactgatagaaaaaaggataaaactggaaaagaaaagaagaaagatagagataaggagaaggataaaatgaaagccaagaagggaatgctgaagggcttgggagacatgttcagccttgccaaactgaagcccgagaagagatgaacaacaaagcgattcaaaacatgtcttgaacagcacatattgcacagttgttgttttttttaaacaaacaataaatttacttttaatgaaa

SEQ ID NO: 46300 - DNA, 1209 bp, Homo sapiens
tttttttttttttttttggccaggaattactttaatttttttttttttttaaaaaaaggtttaaatggcaacacaactgtaaagttggtacatcacagaaacaaaggtctttgcaagcaatactgattggaaatagcaaaacacttggctggtgaaaaaaatgaaaatctaaattatatacaatagtagctaagggtgatattgaaaaagtctttttaactgtgaatcaagatttaacttgccattatctattgcttatttattcagggttgtaaatattacttatatagagacatagagatgtgtaaaaatgaaacattgtgaaaaaaatacaatttttcaatttcatatgaaactcaaagtataagttttgtccaatatggaatgtacctacatttgtttatattagggctctaaaatccatttaaaaattgtttttctgtttttaaaaaagaaatagctgacccaccatgcaagttcgctatatatcttgcttgctcaaaatgagcattttcaggtgaggtctgttttttctggcccaagtctactatgattccttagaagtcgtactggcccaattgaagaaagggtttccatgaagagtctgacggcggcatctggatgaggggtggtccgggtaatgggaagtgagtagagaagaaggagctaagagcccaaatccttatgaaggatgacattcagttgttaaattttaaggggtatccaatggctttttccaggcactcaactaaagagcctgcggaaagaaaatccctctctacttctacaaatttgatgtagatggatttgggggaaactccgggatccacaatacagttctgagacaaaaacccgttaataccaacccaatctttgctgaaggttttggtattcgcttggaaatgtaaaaataagcactgctgtagagtcctgacctcagcaatcccgaggtagcaatagataattcgggtgggttctatttccacctgtaatgaggcttgtgctgaaagggtttccaggtcaacccggccctcttttccctgggtccagggaactttgctccatgtgtggtgagaggggcctctcaatacattcttcatagccaatggcataaaggcctgggcttttaggaatacccccaggcaataaatattgaacaacattcccaccagttggtttggagtgggcaatgggtatccagtcaatttc

SEQ ID NO: 46301 - DNA, 1742 bp, Homo sapiens
gattaccagcctcacggagtgacttccagaaatatcctgacccacaaggacgtaacagaaaatctggagacccaagtggtagagtccagactgagggagccacctggagccaaggatgcaaatggctcaacaaggacactgcttgagaagatgggagggaagccaagacccagtgggcgcatccggtccgtgctgcatgcagatgagatgtgagctggaacagaccttcctggcccacttcctgatcacaaggaatcctgggcttccttatggctttgcttcccactgggattcctacttaggtgtctgccctcaggggtccaaatcacttcaggacaccccaagagatgtcctttagtctctgcctgaggcctagtctgcatttgtttgcatatatgagagggtacctcaaatacttctgttatgtatctgtgattttatttcttctttgggtatagggttgaggggaaataagttttgagtgagaaataaacgttttagctgaaattgtatcccagaagtttgaaataagtagtagaagagggggaaaacaagggagaagtggtggggaagacttggtagattggggccttaagtaaccacctcctttccctctctgcccccatgacttcctgctccaagttacagaagggaaggaaaccattttactctttttattctgctcattaatgatctgaaagaagaagatggggaaaaggggattccaccacaaggctccaaagaaccaagagtgcaaatcagtccatttcactttcactgtctgagatagggtctctaagacccaggatacaagggtggaatgtagctatatggactcgatttgcttccggaccttttccagagcctttctgtccaattgtcgctgacgaatgatgacaagacaagcgaagatcagggccacacacacgacagccccttcgaacttccaaaataagcgttgttccatcaaagctgagcggcagcttttgaactcatttctcttagatgagctgcatgtgattttctctacatatcctgtgggaccacactcaggggtagttttagcccggaaattagagcatggagagcactcttctgctaccacaaactcttccaccagccagcatggcaaatttgaggtgcttgctgacagcttctcttcctgcacgggagcctctgcttggcagagctttaaggtgaaagcacagagcaaccagcagaggtggcggccctgggggaggccaggcctcccggcacccgcaagcatggagcgccaagtgtcgcaacctgtcggaaacaagagggaccttacttccaacaggccttcgttgcctccgtcggaagcgcagaggcggcacttacttcttgcagcccttcccagaggttcccaggtcagggcagggaaggccggagttgccgtattggagcagaggatctatcaggacgtccccgttgccacagcgagaaaaatcgatatgtttttgggagttagggaggcgagcgccttctgcggggtcgcagggcgctggaggaagggccggcgggggctcgcggccctagcgcccgctcaccctccgctcccgcccccgacgcagccatctagccccgtggaggatcctcgggcgcgggaccgagctcggggcccggtttcccgggggcgttcggtcgttcgcgctggggcttatagtcttccgcgtcggtgcgcctctgcctgctgctcactgggaattagctcggcgccc

SEQ ID NO: 46302 - DNA, 592 bp, Homo sapiens
  misc_feature (1)...(592): n = a,t,c or g
aacagttaattttggcaaaaanagaaanccnnccaacnaaaagntaaaattcataagcaggatttaaaagccactgaagtgaaaatgatgtatttcctcagcgttatggagttagactaccactacaatctttttttttttttaataaagtctctgccatcctctcccccgactcaggtcaaagttcatagcagcaatgcacaaagtcctctgtgaagccagtgttctctgctccccgggtcagaggtcacaggtcaagttcagtcagtccgaagaatcatgggcgggtgctcgctgtcctcatccaggcgcagggcgctggcctcgtcctccaggcaggcgccacccacagcacccaggtcgtctgtgtaggcaagtctcgttggggatgaaggcacgtaagtaccttttcctgcaagctgcgccgtatgtctgagtgactaaggggcagtcgtgagaggcagagtccaagatctcattggtcgtttccagacttgccgtccagccggtgctgcttcatcagggcacactcgccgccctcctgggggtccaggttgtacatgtacaggtacccgtcggcggcacccaccaa

SEQ ID NO: 46303 - DNA, 5529 bp, Homo sapiens
gttgtttcagccattttaatacattcaagaatatttactagaacaacatttaaacgtatcgtcggtccgcagaagcctgggatcgagagaaatagaaacgcgactggcccttttgcagtaaagcttgtgcttgaagggagaagaggcaaagtggcttcttggagacttcgtgccagatgccacaggactgagagcatctccaaatgtcactttaaacacgtgtgagcatctatagtcattcctaaagcccacagtgtcctaaggatcctattagacgaggcaaaaggcaatgcttctggaaccctctcccttgcagctctgcacgcaaaccttccccaaggaggggcccgaggcaagcctctagataggcggggccaagccctccccgtggcccaccctctttccctgttgctgacctcaggcctgatgctggacccatgagactcccagaggggaaacacagatacagcccatccatccatggccaccttcctccagaagatcctggggaccccctacccccccatcccatgaggcaccagggctgggctcgcatggcccagcaagggataaagttgggaactgcagaccatgggaagccccctcattcttagggcaaaacagcccctgaaggacaaaataaataaaccaaaccatgaccagacagctggatccggacaggtggagtggcctctgtgaaggcaaatgagagcaaaagtgggaactgaggacacctaagtggagagacacttaaaaacagtaattctcacatgaacatcagtggctcatgccaacagcagagctggccatcaacagaggaacagcaacaaaaacacaactcagacggggggcgggacggggccaggagtctgcgggggtctctgatatgctttgtggcatgactttgcttgcctggcctctcctttcttagctgaaaacaggcatttcactaaagggcatccagccagcggcagcagcctgagctcccaggctgacatctgggcagggctgatgggcagcttctggccatctggtgaccaggtgtgccgccagctgcacccacatgcacagcccctttcctaataaccacattctaggttacgtagacacgttaaactcctattctagaacatcgtgcttgaatgcagacccctcagcccacaatcgggctggctgggcctcctgtgagcccctcattgcatccagtctgtggggcagtgaccccgcttccactggtggctggtcttcctcatggtgctatgccaggtgcccaaacacagttatattctcaaaggtacaggtcttgtctggacattgttcaaaccaatagctactgcgttaggcacacgggagatccctattccccaaaaattagctgtttgagttctggccttgagaagcatctccagtgaccacctttaaataaggctttggttcaaaacagcatggacccagcaccctggggagggtgggcacacgggggcatggaaccaagtaccctggggagggcgggcatggtggtaggagacaactcaaccactgagtcttggaggtcctgccttggccatggagggcagtggctgccctcacaagaagagttaaggcactttctttaactctggcctaggagaattatgtcttagtgactcagtgagtttaaatgacactgcctgggctccctaaagttgtttacttttctcctatttcctgctttattccttgctctcaccatgctaatgtacagatgttgtttagatttctatgcttattgaaacaatgtaactttggtactaacagaacaggagcgaccttttccagcattgctcgtaacaaaacaaaaatgttaactagaaaaactccttatgatgaagaaatctaaagccagagctgggactccaaaccccttccaggctggaagacaggtcgctgagtccaggcaaggggcccccgtaactgcttcccgccagaaagcccagccgcgtgagtgcagcagcagcaccccagccctggcgtgcccgcaccacgccctctagatactctcctagctcaggctgaacacgcctggattgtgtcggccgggacagccccgtcaggtgtggggcagctgacccacgtctgtggtgaacatgctcctccaaactaggacggtgaagggcccagggcgctgggaactgccaggcgctgactctccttctgggttctcaccagcaccggaacccaccccagccaatagtcaggaagtgccgcggccgagccttcatcaaccctagtgagtttcccacagaactgaatcccttttcccaaattcagctgtgcatgagccctttttgtttggtgccctggagcactagtgtagttcaatattctcttcagaaggaaaactccagcagccaccggcctgcaggatgtgtgctgagcccacatgacctgaatggacgggtcatgtgggaggggccctggtgggagctgtgggccacacggctgagttcttccaatacggaagccccgagctggaggctcacacgctgtggggcagcccagagttgctggaagctttacaggggtgcgtacgtaatggcgtcggtgtcgctcggtcgctgtggaggggtacccccgctattggggcggctcctcccggcatgctcaggtctcaaagtacttgtagatcgccgtcacatacagcatcacgttctgccagtcgggtcgttcagtccgtaccatttcattaatgtccagtgtggatttgatgccgacactttcagctgcctggaaagccagcatgaagttccttctcttatcctggctgttcagttcttgatatggaatgtgggcagggagatatgtatgcaggagggcacagaaggccagcccatcattccagctgctgctgaagtttgtaatgtcaatattctgatagccttctgttttcttctgacaccacttcagcaaggcgttcctctttgatcctccatattctctggccaatgctgagagagggtctttcctttcttctcttattcggcttcgggtggtgggagtcacagatgccgttggagaagaggacagggaaagctgtggagacgtggttcccatagccatcagagaggctggcgacgctccctcctgtgcagaaatgtcccgtttcatttcttcactacttcgtcgagacactgagagggtcttggcactttccatcgcaggcactcttggcagggaagcaggccggctggctgaagatgttcttaacagatgctcttgaacagggatttccccatagtttggtctcttatctgacagggctgtcaggggtttggatgttgagattggtccacttatggaatgtctctgcataggggacacagctgctgcaggaggggttttcataggacttgggctcaggggcgttcgaggaattgcagctgcagcagggtttggtacttgagatgcactgtcaaaggacttgatgagggtttttactgtaggagttggctctgaggaagtcgaggaccttctactcagtcccattccctgccttaaggctgccaaatctctctcaacggcattcatgtaattgtatacccggcctcgctcctcctcttgcttgcgtgactttatttcctccaattcttttgtgagtttctcatttttttcttgagcctcatgtaaccggcgctttagatcaccaatctcctcttgggcttcagatttaatgtcatttgcaatgactactgcagtctggagatcagcctgaaactgccgccattccgcagattcttcccgaagtcttctgtggagtgtctttatttctctttccatgtcgtgcttttggtcctggagttttttaactgtattctctagatcagaaataatgaggttgtcatgaagtttcacagcacgatgttgttctacttcatcttcaagttcaaagatggtttctttcatgtcactcctttctgtttctttttcatccaggtctgatcttaatttttctaacgtcatattcaaatcttcaatttgtttcttagcttcttcttggaaggctcggtattcatcctctaccttagcaatggcatcctgtaatcgattggcatcatttcgggtatgagccagatcttcctgcaagctactagccaaagtctctgctttttctttgtccagcctgacactctccaggaggtcctgaatatcagatttgtctccagagttatggatagaatacagctctgccactttctgcttttcattctccagctgagccttcaggcgattcatctctatctggtcactggccactgtggctttgtattcctctaacgtggctgccaaggctgcttttcctttctgctcagactcaataattcgctccatatggtgactgcgttctttgagtgcccctatcatttcttgagcttccttattgtcttgttctgccattttcaaagtattgcttaaatgctgctggacaccaagaagctgctcccgttcaaaacgggcattctcagcgaggtccatgtaacgttgctctaattccatatagcgcccactttttacatcttcatctatgacataagaaatgtgatgctcatctagaagagagcggaagtattcaatctgtcgactaaagtgttccaacttatcgctctgctgacataaagactccatcagaataaccttctcttctccaagcctttcgttttcactattcagttcctgggtaatctgctgtaaatcagctagctcttgcagggttgcctggagttcctcacttgtactgtgttggttctcttccatctggtgtatccgttcagtcaggcaagccacggacacttcactggcattcccgctgctccccttccgggagcgctctatgctggggatgccttccgactctgaggaggatggtgcatccagcgcatcatcgctcgatgtgaggggctggtagacctcactgcactcactgtctaaattgtccatggagttactgtgctgatggtccattagtgtattttcatcctgactcaagagatcctccactgagccaggggcagagccttccactgaagaagtcagagttcctcctccatcgctctggttaccaggggtgatttctgggctcagggactgatagccaaacagtttttcagaattgtctaacctctgctctagggaaaagcccaatgcattcaacctgtcctttaacattctgttttcatttttcagctggttgagttcttcacggatggcagtattctgttcctgcaactgcaataaagtggactccacatcagtcggctggtgagccataatagtttccttctcagatttttcatcaccctcagaatgatcctcattaatgcccagctgggcacgcatgtctcgcagttcatttctcaaatgtaaaatttctacgtctttggtttttgccagcgtgagaagatccttcactttggcctccaaagcagctctgtcactgatctgattgtctgacttagacttgctcatacgaacgtcacattctgtagcagttcg

SEQ ID NO: 46304 - DNA, 981 bp, Homo sapiens
gtgcttggcgcgtaccgtgcggtccctgtagttggaggacgggcggtcgcgcggcctttcccactagccggaggtcggagataagtacccgccgcccggctcctctcgggaaagcggggtggtcctcgaaccttcagcgagggtggggagttgcccagtagcctctagttcgttagtcaaaacgtgaaaaaaaagacctgctttgccctgggaaatagtaaccctgccaaatacatcagcttgtaggagacagaggtatgtttctataaaacctgataaccgaaaattggccaacggaacaaatgtcctcggcttactgattgacactttattaaaggaaggctttcatttggtcagcactagaacagtatcttctgaagacaaaactgaatgctatagctttgaaaggataaaaagccctgaagtgctcatcacgaatgaaacaccaaaaccagagactatcatcataccagagcaatctcagataaagaaatgaagttgtctatcctcttttaaagagaaattgccatttttcttgtttcattacgtatttagggcatacatgttagccaaatctacactcagcctaactcttggcttcatctgctgccatgccgtctctgggcaaccaggccccaactgtgcttaagccataatgcctgctgctctctagacaactccatgtacttggtgctttggtatatgttctaccttcaatacatctttccctttctcttcttcatgaatgcttatgagccgagattgcgcccactgcacactaggcttggggtgacagaggaagactgtctcaaaaaaaaaaaaattgatcaaactgatggataccctaagtaccctgacttgatcattacaccttctatgcatgcaacaaaatgccacgtgtaccccataaatatgtagaaatattatatgtaaataaatagttgggccttccgtattttcccacttaaaaaaaaaaaaaaa

SEQ ID NO: 46305 - DNA, 1378 bp, Homo sapiens
tggttaaataactttaattacaccactgtaagtagattctgcctctgaccctcccacaggacacaaccggatgtgattcttgtcacttctattttaaacatgcatactgggaaaaacagaaacacaagagtgctatgggtacacgcgacgtgtgagaagaaaggaaccccctggagacacggacgcggtgtgcggtgacagccaggcctcactgacaacagggcagcgaatcgcagccgggacgcctctgaggcggaagcagtcttgggatttcctgtcacgctctcgatgcttctgcccactctggtttgtcacggggatgcttcattttggacagtataaaaccggtgattaatgcatatcttgctcttcagcaaaatactattcaagtagttttaacttaaatattttaaaagtaatctttacattattgaagattgttaaaaaatacagaatctgacaacttttcactcaatctgatgctctgaaactcttcacttcctgttttatcataatttagaaggcaatccctggcctctataaaactctctgcaggattagcttcaagatccatctttcccccactggttcgagtttaaaaggctttcagaaccttttgccactgcattataaagagaacatgaaccccttcccattacttcctttagctacacatgctatgactgagagtgtgctggaagctaaacaagccccagctgatttctgccacataaaagggcgccgtgaagaatttccctgttgaaaccttaatgaagacgatgatcccaagtgaagctttatgaagagacggcacagcagagtgaaatgtttggcaatcaacagttaattagaattacatccttgatcagggatgatgctatctccgcgaactcagtcgttagaaaagttggtttctgctgtgacgaggctcacagtggccactcgaggaagtccagcctcgtcagcctccggtcccgggccccaggcccctccaggccctcagtagatatctgggcagtcggagaaattccgctcaaagtaatcccctgcatacaaccagtcgggggtcccagtgtaggggttattgcctgggtagaaccacctcgtctgccactctgcctcctccttggcccgctccctccgtgcttctctctgcttctcctccagccgctccttctcctggctggccagatccatgttgccattctccatgccgcggatgtcagggcgcaggcggcagtccgtgggtggcagggtcttctccatgcctgtctccagctcgttgaggctcacagtgaaactggtgaaattatacatctgggcagagttgggggaccgggtgttgatccttcaagagccagcttgctcaagggaatga

SEQ ID NO: 46306 - DNA, 391 bp, Homo sapiens
ttttcagtatttctaagctacatggtgcatctgcaagttttttaaattgttgcaaatttccaaaaaaattttcaatatatttatcaaaatatgcatataagcggtcctatgcagttcaaacccgtgtttgagaatcaactttatgacttccagtgtcattctccaccatttctgcagtttatcacattttgcttcaggcagatttggtaaatcttcaatgatagttctctaggccattgttttgtaacatgatcaaatgcttaatgggaaatagaatatgtatatgtattctttgtctaccaactaccaaagaaacaaatactcctcagtttaacccaacacaagtttatttactaagtcaagtcaaactgaggagtatttgttgtcgacg

SEQ ID NO: 46307 - DNA, 829 bp, Homo sapiens
gcgcccgtcgcaggtcgcaggcctctttgtcagctggagttgcgcgggctgacgcgccactatgtagcgggtttcgggcgggccacgcgtgcgggacaggaacccaaccccagccgaccttgagctccaggagttcgtctcttacgtctgcggaagtgcagctgcctcagttcttagcgcaggttgacaactacaggcacaagccattgaagctggaatgtcctgttgctggtatttcaattgacttaagccaactatcccttcagttacaataggaaagtgcctctaataaggccaaatatgcgtactaacttgtagcaaccacgtgtccgtgcagtgccacaggagctagagcagtgacaatgctggtggcaacagggcagtgtagcaggtgcttcatgttcaccttttcaaccttttcatttaattgtcacaactcggaggtggattctgttagggacaggctgccccaggaccactccgcccccgctaactcaatgcagctgacccttaccctgaatactctgcagctgcattcctgaaccgttatctaggcgctatagcaaggtcaccagacttgctacaccgaagccctctgggtggcacgggggaggtcatgagaaacgtggattacacccccttgtaaattcctattttcacaagataatatattgtaagccggtcatgagattatatgtggtaaagttaattgactaacaaccccagggtctctctcccccatataaacccctcattttgtaagctcagggctgccacctccgactggtggagaagcctggcaggttaataaacttacttggcctgaaaa

SEQ ID NO: 46308 - DNA, 2204 bp, Homo sapiens
  misc_feature (1)...(2204): n = a,t,c or g
gccggtttatcctggttgtggtcaagactggatgatgtaactggctctctaggaagcctcacttggccgtaacctcaggaaggttctctttgaccccatctcatttcgaagccacttctgaagccacttgagaaaaatgatgtgacagttcctatcaaaaaggattcagaaacatataccatctgtgaagaaagtggccctttctcccgcttgcaaaatagacattctcaaattccaaaatgccagccaagaccccaatttacctgaaagcagccaataacaagaaaggaaagaaatttaaactgagggacattctgtctcctgatatgatcagtcccccgcttggagactttcgccacaccatccacattggcaaagagggccagcacgatgtctttggagatatttcctttcttcaagggaactacgagcttttacctggaaaccaggagaaagcacacctgggccaagttccctggggcataatgagttcttccgggccaacagcacctcggactctgtgttcacagaaacgccctccccggtgctcaaaaatgccatctccctcccggaccattggaggattccaagctctcatgttgccctttattgtcaccagtgacatttaattccaaacaggagtccttcgggccagcaaagctgccgcagggtttagctgcggagcccgtcatggaggaaaaagctcaggagaaaagcagtctgttggagaatgggacagtccaccagggagacacctcgtggggctccagcggttctgcatctcagtccagccaaggcagagacagccactcctccagcctgtccgaacagtaccccgactggccagccgaggacatgtttgaccatcccaccccatgcgagctcatcaagggaaagactaagtcagaggagtccctctctgaccttacaggttccctcctctccctgcagcttgatcttgggccctcacttttggatgaggtgctgaatgtaatggataaaaataagtaacaagatgccaacttttttcctttggggtaaaaggtacaaaaacaaactaaccacagttgaagagaagggcttccggagctgtatttgcagttttgtgttgggttttctaaaataatattcttacaaagtatttttttacctgttatgccctgtttgcaaaaacaatttagaaaaaaacaacaaagcaaaacctatcttggcaaaaaaaggaagtgagtcagagcccattttcaggaggcattggtgatgttcggctcacatattgtttgcagacacacaagaaatctggcttggccaggattggcactagctatgaagggctgagcgagtcacattaaggaacttcacggaactttatagcactccgacattttctgagcaagaggaagtcaaaatttatttaacacctaagcctttttgtagactcttttctatatattgcttaggctcaccatagcgaattctccagtgttaaaacttttctgttttcacatttgaactttatgggttttggggattttcttgtagttcttatatatccctatatattatatctatattgcaaaattttgactgtcagctacatgttggtaagacacaggcaaagtattactgtaactaagttatttttaaagttaaaatatatttttacgtgcctttggctttttattgcagagtctacattttatagattctacatcagatgttgtcacttatttccattgggattccattgtaagctgtgtatgtgcgtgtttggaaaagtgtattcatacttagtttttttttcttcatctgttatcatacttttaacagcaaccaataacggattgtaaagtgtaaaggcacaggttactcatgatgcttctgcagagactgtgggctacaccacatatgttatttggaaatataggtattttagtacagtacatacttgcattacataggtacttcaagcaacacaataaaaagtaaatgataaagtgaacttgcttgtttatagtaataaacaagaccataagagaataagtatagctagagaaattgcttctctgaaatgtacatgagcccttaaggtaagagatgatttccatctactctcattttgattacttccttatggtttgngaggctaagaaactgagcctctctacttttggaaaaaatgaacatgtganggtcaganttttttt

SEQ ID NO: 46309 - DNA, 1623 bp, Homo sapiens
ttggagagaggggtgatgcctggtgctggtggaacccctgcacagagacggacacaggatgagctctaagtacccgcggtctgtccggcgctgcctgcccctctgggccctaacactggaagcagctctcattctcctcttctatttttttacccactatgacgcttccttagaggatcaaaaggggctcgtggcatcctatcaagttggccaagatctgaccgtgatggcggccattggcttgggcttcctcacctcgagtttccggagacacagctggagcagtgtggccttcaacctcttcatgctgggcgcttggtgtgcagtgggcaatcctgctggacggcttcctgagccagttcccttctgggaaggtggtcatcacactgttcagtattcggctggccaccatgagtgctttgtcggtgctgatctcagtggatgctgtcttggggaaggtcaacttggcgcagttggtggtgatggtgctggtggaggtgacagctttaggcaacctgaggatggtcatcagtaatatcttcaacacagactaccacatgaacatgatgcacatctacgtgttcgcagcctattttgggctgtctgtggcctggtgcctgccaaagcctctacccgagggaacggaggataaagatcagacagcaacgatacccagtttgtctgccatgctgggcgccctcttcttgtggatgttctggccaagtgtcaactctgctctgctgagaagtccaatccaaaggaagaatgccatgttcaacacctactatgctctagcagtcagtgtggtgacagccatctcagggtcatccttggctcacccccaagggaagatcagcatgacttatgtgcacagtgcggtgttggcaggaggcgtggctgtgggtacctcgtgtcacctgatcccttctccgtggcttgccatggtgctgggtcttgtggctgggctgatctccatcgggggagccaagtgcctgccggtgtgttgtaaccgagtgctggggattcaccacatctccgtcatgcactccatcttcagcttgctgggtctgcttggagagatcacctacattgtgctgctggtgcttcatactgtctggaacggcaatggcatgattggcttccaggtcctcctcagcattggggaactcagcttggccatcgtgatagctctcacgtctggtctcctgacaggtttgctcctaaatctcaaaatatggaaagcacctcatgtggctaaatattttgatgaccaagttttctggaagtttcctcatttggctgttggattttaagcaaaacaaaagcatccaagaaaaacaaggcctgttcaaaaacaagacaacttcctctcactgttgcctgcatttgtacgtgagaaacgctcatgacagcaaagtctccaatgttcgcgcaggcactggagtcagagaaaatggagttgaatcctttctctgccactctttgaggagaatctcaccatttattatgcactgtagaatacaacaataaaatacagccatgtaccacataacaacatctggtaaacaacagactgcatatatgatggtggtcatccagtaagctaaggttaatttattatta

SEQ ID NO: 46310 - DNA, 330 bp, Homo sapiens
ctcccgagtgcgcggtggggaagccaaccttggagagctgagcactttttcagattagtaatgcctgcgacatactgtggtcccaaatatttttcatatgttgttttgcttattccagtctgaaaccaaaaaccttctgttcaatgacaacactgagtgtctggccagactccatggcaaaacgtcgacgcggccgcgaattccagatctatgaatcgtagatactgaaaaaccccgcaagttcacttcaactgtgcatcgtgcaccatctcaatttctttcatttatacatcgttttgccttcttttatgtaactatactcctctaagt

SEQ ID NO: 46311 - DNA, 611 bp, Homo sapiens
ttttatgtggaagaatacagaaatatgtttaatacttagtatcaaactaaaaagtaatataaaattacaaaacttcttttttttcatgcacaggctttttctggtaaggaccgctgggattgaacagaagcttccggtaaataagggccccgtcggcaagacagcatactgctgtcacaagtgcaaacacccctccaccaactgtcaatgttgtggtttctggtatcagtgccaacacagatacgatgagcatgaatactgttgttaccagtgagttgataatatcaagcaaaggccaaaataaccacttcattaatcgatcaagtctgagtacatataaaagtatgaaaaataagataacggtgacttcaaatccagtgataacaatatatggttcaggggcttgtgcgatgataaaaaaggtcatagatgtcacagttagtgccagccgcagcatcttcacgtggcctttcacactgaagcagaaggggcgatgttttattttcggctgcacgttatccatcgcgtctgcagacccagcagcagcactttccctcaactcttctcagctggctgcctgagtaggttctgcgacgccctcgtgccgaaaa

SEQ ID NO: 46312 - DNA, 1383 bp, Homo sapiens
aaggacctgtatataactatctattcgatgatgaagataccccaccaaacccaaaaaaagagatctctcgaggatccgatttggtaacatgaagaaaaaagttaaattatccaaggaacaccagtcattggaagagaaccagagacaaactagatcaaaaagaaaagctacaagtgatacattagagagtcctcctaaaataattcccaagtatatttctgaaaatgagagtccaagaccctcacaaaagaaatcaagagttaaaataaattggttaaagtctgcaactaagcaacccagcattctttctaaattttgtagtctgggaaaaataacaacaaaccaaggagtcaaaggacaatctaaagaaaatgaatgtgatcctgaagaggacttggggaagtgtgaaagtgataacacaactaatggttgtggacttgaatctccaggaaatactgttacacctgtaaatgttaatgaagttaaacccataaacaaaggtgaagaacaaattggttttgagctagtggagaaattatttcaaggtcagctggtattaaggacgcgttgcttggaatgtgaaagtttaacagaaagaagagaagattttcaagacatcagtgtgccagtacaagaagatgagctttccaaagtagaggagagttctgaaatttctccagagccaaaaacagaaatgaagaccctgagatgggcaatttcacaatttgcttcagtagaaaggattgtaggagaagataaatatttctgtgaaaactgccatcattatactgaagctgaacgaagtcttttgtttgacaaaatgcctgaagttataactattcatttgaagtgctttgctgctagtggtttggagtttgattgttatggtggtggactttccaagatcaacactcctttattgacacctcttaaattgtcactagaagaatggagcacaaagccaactaacgacagctatggattatttgcggttgtgatgcatagtggcattacaattagtagtgggcattacactgcttctgttaaagtcactgaccctaacagtttagaactagataaaggaaattttgtggttgaccaaatatgtgaaataggtaagccagaaccattgaatgaggaggaagcaaggggtgtggttgagaattataatgatgaagaagtgtcaattagagttggtggaaatacacagccaagtaaagttttgaacaaaaaaaatgtagaagctattggcttcttggaggacaaaagagcaaagcagattatgagctatacaacaaagcctctaatcctgataaggttgctagtacagcgtttgctgaaaatagaaattctgagactagtgatacctactgggacccatga

SEQ ID NO: 46313 - DNA, 494 bp, Homo sapiens
acatgactgtttagaaaaatttatttgaacatatgaaaggaaatttagacacccccaataaaactgagaagttcctttccgaggtgaggggaattcctgacagcctccctgagcagtgctgcacataagcttgtggtcactacgcagcctgggctcagctcacggggctgcagaaggagcccactttttctggcggggacacatcgtcttcacgaggaaagaggccagacacacgggcttgcacccgtggctcctgccgtcacactcctcgccacacaggctgtgtctgaaatgcgcagagaacagaggctcccaggatcggcatcttttaaaaatgcacgcagcaggctctcggcagaggctggactcttccctccaccatccaatctgcatgtcaaagaatgcgaccgggtgggaagcacctggactccgtgacaccaagacggttctgccggcggggaggggctgcccgaccccttccccgaggttctctt

SEQ ID NO: 46314 - DNA, 2761 bp, Homo sapiens
gactcctaggggcttgcagacctagtgggagagaaagaacatcgcagcagccaggcagaaccaggacaggtgaggtgcaggctggctttcctctcgcagcgcggtgtggagtcctgtcctgcctcagggcttttcggagcctggatcctcaaggaacaagtagacctggccgcggggagtggggagggaaggggtgtctattgggcaacagggcggcaaagccctgaataaaggggcgcagggcaggcgcaagtggcagagccttcgtttgccaagtcgcctccagaccgcagacatgaaacttgtcttcctcgtcctgctgttcctcggggccctcggactgtgtctggctggccgtaggagaaggagtgttcagtggtgcaccgtatcccaacccgaggccacaaaatgcttccaatggcaaaggaatatgagaagagtgcgtggccctcctgtcagctgcataaagagagactcccccatccagtgtatccaggccattgcggaaaacagggccgatgctgtgacccttgatggtggtttcatatacgaggcaggcctggccccctacaaactgcgacctgtagcggcggaagtctacgggaccgaaagacagccacgaactcactattatgccgtggctgtggtgaagaagggcggcagctttcagctgaacgaactgcaaggtctgaagtcctgccacacaggccttcgcaggaccgctggatggaatgtccctatagggacacttcgtccattcttgaattggacgggtccacctgagcccattgaggcagctgtggccaggttcttctcagccagctgtgttcccggtgcagataaaggacagttccccaacctgtgtcgcctgtgtgcggggacaggggaaaacaaatgtgccttctcctcccaggaaccgtacttcagctactctggtgccttcaagtgtctgagagacggggctggagacgtggcttttatcagagagagcacagtgtttgaggacctgtcagacgaggctgaaagggacgagtatgagttactctgcccagacaacactcggaagccagtggacaagttcaaagactgccatctggcccgggtcccttctcatgccgttgtggcacgaagtgtgaatggcaaggaggatgccatctggaatcttctccgccaggcacaggaaaagtttggaaaggacaagtcaccgaaattccagctctttggctcccctagtgggcagaaagatctgctgttcaaggactctgccattgggttttcgagggtgcccccgaggatagattctgggctgtaccttggctccggctacttcactgccatccagaacttgaggaaaagtgaggaggaagtggctgcccggcgtgcgcgggtcgtgtggtgtgcggtgggcgagcaggagctgcgcaagtgtaaccagtggagtggcttgagcgaaggcagcgtgacctgctcctcggcctccaccacagaggactgcatcgccctggtgctgaaaggagaagctgatgccatgagtttggatgaaggatatgtgtacactgcaggcaaatgtggtttggtgcctgtcctggcagagaactacaaatcccaacaaagcagtgaccctgatcctaactgtgtggatagacctgtggaaggatatcttgctgtggcggtggttaggagatcagacactagccttacctggaactctgtgaaaggcaagaagtcctgccacaccgccgtggacaggactgcaggctggaatatccccatgggcctgctcttcaaccagacgggctcctgcaaatttgatgaatatttcagtcaaagctgtgcccctgggtttaacccgagatcttaaacccgggccccgggtattttgccaccgaccgggttgaaaataagtgcgtccccaaggccaccgggagatattacggctacactggggctttccggtgcctggctgagaatgctggagacgttgcatttgtgaaagatgtcactgtcttgcagaacactgatggaaataacaatgaggcatgggctaaggatttgaagctggcagactttgcgctgctgtgcctcgatggcaaacggaagcctgtgactgaggctagaagctgccatcttgccatggccccgaatcatgccgtggtgtctcggatggataaggtggaacgcctgaaacaggtgctgctccaccaacaggctaaattttgggagaaatggatctgactgcccggacaagttttgcttattccagtctgaaaccaaaaaccttctgttcaatgacaacactgagtgtctggccagacttccatggcaaaacaacatatgaaaaatatttgggaccacagtatgtcgcaggcattactaatctgaaaaagtgctcaacctcccccctcctggaagcctgtgaattcctcaggaagtaaaaccgaagaagatggcccagctccccaagaaagcctcagccattcactgcccccagctcttctccccaggtgtgttggggccttggcctcccctgctgaaggtggggattgcccatccatctgcttacaattccctgctgtcgtcttagcaagaagtaaaatgagaaattttgttgatattctctccttataaagtgtcactcatcttttctagaattttatactgaaatcacatgcctgacaaaatacctgtacagttggaccttcccttccaagtttttcaggttcagcccctcctctttcttgcagtcttgggtatgatgccg

SEQ ID NO: 46315 - DNA, 840 bp, Homo sapiens
tgcagctgccttagcgtttttgagtcaggagagccgaacgcgggccgggtgtgccgggggcctacgggtcccggccccggtcactatggacagttttttcttcggctgtgagctctccggccacacccgctccttcacctttaaggtagaggaagaggatgatgcggcagcacgtgctggcactaaccatgctctgcctcaccgagggagccaaagacgagtgtaatgtggtagaagttgtggcccggaaccatgaccatcaggagatcgcagtccctgtggccaacctcaagctgtcctgccaacccatgctcagtctggatgacttccagctccaaccacctgtaaccttccgcctgaagtcgggctctggccctgtgcggatcactgggcggcaccagattgttacgatgagcaatgatgtttctgaggaggagagcgaggaagaggaagaggacagtgatgaggaagaagttgagctgtgccccatccttcctgccaaaaagcaggggggcaggccctagccctcctaggtcagctccatgtgccatgcaccgccatgcaccctgttccctgacaagtttcaacaattgtaaatatttcttccttgaagaggagagcttgggtgggggttgggtgggagggacttgggtctttggtgctaggagagggcctgtgctccacacagccgtggttttctgattttcaccatgcccggggcctcccttcccacctgcctgtgagaattggaggttagtgcctgaagctcagagctacacatttttaatagtttttacatttttggataaaggttgaaataaagtggtgtggagtttttgc

SEQ ID NO: 46316 - DNA, 472 bp, Homo sapiens
  misc_feature (1)...(472): n = a,t,c or g
tgnaaatntgtatgactgattacgaatttaatacgactcactatagggaatttggccctcgaggccaagaattcggcacgagcaagccgacggcccgctgctggcctccgtgacgcggcctcctccgcgcctcgcggcatggcgtcggaggggccgcgggagcccgaaagcgagggcatcaagttatcagcagatgtcaaaccatttgtccccagatttgccgggctcaatgtggcatggttagagtcctcagaagcatgtgtcttccccagctctgcagccacatactatccgtttgttcaggaaccaccagtgacagaaatgtttactcagtgcctggctcccagtatctttataaccaacccagttgttaccgaggctttcaaacagtgaagcatcgaaatgagaacacatgccctctcccacaagaaatgaaagctctgtttaagaagaaaacctatgatgagaaaaa

SEQ ID NO: 46317 - DNA, 1394 bp, Homo sapiens
gcgcaactgcagatcggtagccggaggccgccacggataaaggctcactgatggctcagttgggagcagttgtggctgtggcttccagtttcttttgtgcatctctcttctcagctgtgcacaagatagaagagggacatattgggcaatagagcaaggctccgtctcaagaaaagaaggtcatttcccaagactagcatagggagtatccatttaaaatacattcatcttcctcccatttccgtgctattaatcacttgttagagcaacatgacatgcccagcatcccacttcccgaaaatgtctacttccttctactctgagctcttgttgcctaggaccttcaggaaaacaccaatttcaccacagtaggaaccgggaggcaggggttaggttcagctttttctggattaggcacattttggttcagggtcttaacttgagggcctctccggtactaacatcctgcgatagttggtcccatgagcacagaagagcctcagtagagtcaagtcctgctgcagctgccccaccccaagtttctatcatttcctctttaaacaaaaaatatgttatcctacacattagtgtcaatccaatggttgtctcttatctgtctaaatagcaaaatcatgaaaatcagctgttttatttgcataggacaactaacctgtctgtgtaactttgtttttattttaactcttactagaaaatctaatcttaaaacatttgaattctaaacatgtaaaatgtgacagcctgcaattttgtagacagtgaagtaatggctgctatttataaatggaacatctatcaaaataagtaactgtttataaaattcagtttttgtagggttttccaaggaaaaatcaccttggttgaatgtttctcactcattaaactttgcagaagtgattcatattcagtactgtttttaatcactttttaaaatataaggaccgaatgcaaggaaaccaaagtttattaataatttttatataactaaaataaaatagatgtggagggatctgtgatcatataaaaagggagggttactgaaagaattttagcaatatattgattcaggaaaaggagctgttttataaatgatcattcactgttccctatggttctatgtatctttcaaaccgatacctttactatttaaagagcgtaaatagtgaaagtaagatggtcatacttactgactttatctatttaagtttgatggagataaactatatcttggctagtggctactgtgtctgtgaatgtaaccagtacttctttaagctctattcagtagggttccagccactgcttttttgttgtttctagccactgttttttttttcttgtttccttataaaacaggtaataaccaaaaaaaaaaa

SEQ ID NO: 46318 - DNA, 331 bp, Homo sapiens; identical to SEQ ID NO: 16681

SEQ ID NO: 46319 - DNA, 1270 bp, Homo sapiens
ttttttttttacataaaatttataacatttatttaggcaaaaaaaatcccaaaacaaaaatctgtacacacaacattaatacttaagtgatgtcctgatttaaaatacagcatgattcatgtacagaatactcccattcatctggccatagtgagaacagtgccttcagtccagataattgagagtctttgaaatatacacactttccaatgaattttttatatccttaggaaaggagttaaactgttctatcagaattcaaacaaaagataacttctctcacactcataagtcagtgaggaatttgacagtgggaattctacaaaagtcagggatttcttggatttttgttgttgcagattatctgagagtataaagtttttaaggggtaaacaatgctcttaaggtcctgcttttattaaagtgtctcagctttccttagctaagtaggcttcttccttctaggctgcttaaaataagcttaaaaggacccaatttgaacagtttttcccaaaataagtccaaaattaaacacataacattaataaaatagattgatgatttcccacaaaataattttgataaactggattttggaaatattctaatggccattctgtctagctgtaaagttaggctgtgctatccaaaaggctttactttagagtcatgagaagcagcactgatctttgcaaaacttaccccaaaaaatggggagagagaaaaacaggaagaaaagtctctttcttaggctaccagtcagttaacaaagtatcttagattaagatttggaaaccaaagaatgcataattaggagtgtaccatatcatgcaaagtctatgaaatactaaataaggtaaaacagttaatcatttaaagcacgatgagcaaattctcttatcatacggctattctcatcaccggacgaaggttggttttgcattattcctaaaataaaacagttcgtgagtgaatactgcaaattaaaaactgtcaaaacacagcaaatgataaggactaaacatccattatccacaaactcatttgaaactactaccatggatttgagagggaaaccaaaagtttgcaaacctctctgggagctgtgtcaaagttagtattctgaagccctagcaatacaaagtccccaaataagtaaaatacagataaaagtggaagagcctacatcagctcaaagtaacatacttcctttaacttatgccttcagtttaataatactgtttataccactacattgtataataacgaa

SEQ ID NO: 46320 - DNA, 1919 bp, Homo sapiens
ttttttttctgcattttgaatagtttattaaaggaaaggtgaagcatcagtttcaaattgtacaaaaggaaaaaaaacctcatattgcaaatgtacaatttacagaattactagcaaaaccaatcaaggagacaccgaaaatacaaaaatttgattgacttcaaactgaactggaaacccattggagtagatatttagcctttttgtgtggcatggtagtctacaattctgtcagcatctgttttccatacaagactgtcacgcaaaggatcaatttgtgcatgtgccagggcacctcatggcttgctccctggccaaaaccacaggcaggcagggctggggtggacagtccagtcattcctgcaccttcacttccagtgaagcccacaattctgggagaaagtgaggccccagctcccctaactaactggagcccaagaattgctgaattagcagagaagatatttttggtgaccaggtttttttcagaactgtacaaatgttgagaaaaatgttttgtgtctttactaaaaggatgaataaaatcatccatcatcatcttgctttcccgcacaaaagatgatcactgggtgtgcagaattttaaaaaatgtttttcgtatttgataaaaagggaaagcctcatgattctgttgcagctactttaaaaaccagcccagaaacagctgtggatgaattggtttggaaattctgaggcttactttagaaatcagaaaggaagagactaagtggggtttttaaaacaatagcagcaagtcataaaagtctaggcagaatgtaactctaaaccattgtagactgtcctgaagattcataatttctttccccaaaagaattattcttaatatgcacatttaacactgaaatgtagctgtaattcaaggtaagcttaggaacttcaccctctaagcacagacttctatgcagcacatacttctataatcagtaaacttaattcacaaaattagcgcataagggtattaagtgcatgggaagtaaacacagttatgttacacttaaaattacttttgaatgattgataaaggatttcttcatgattgattatcttaagaaaatggaagtctgtgtaacttgaatttggcagggcatgaaataagtggtaaaaacagcaaactgataacttgagaatcattttcgttttactgagaatactttatttgctggtagaagttgctaaaaatgcacagaacaaataccaatagaaaatgcactgtatttgaatctccctagtctatataaaatgaacggtgtacagcatctgttggaaaaatggctgcatggacatttcttattttatgcccacttataaataaaaataaaccttttattcaagagtatataaaatctgggaattcatatccatatccacagagggtgtgtggtttttggcagagatgtactatgtcagaatttcatcttagcttgtcaatgttctgctccttcattatttgtgttccacaaaggtcaaccaaatccagtgaactccaaaacactcttcgcaattaggatgagctgcttactcataggtttaataaaaatggttagcttttaaaacataaaaaggcaaaatgttaaaacggtttttaaattgtacaacaggaaaataaagttaaaaatatgtttttttttactcaatgttgagttttcataaaacaggtgtataacagtgtttatcttgacagctgttttaaaaatttaaaatttccttcctccctcccagaaaaacacacacatctgtattgggataagtccaatagtaggacacaaatgattttcaggtcagtctttctgagttgacattcaccaacattcccttgggtaatttacatgctcctcttctgtcactgcaaaaagggattgaccttaatcatttgatta

SEQ ID NO: 46321 - DNA, 2016 bp, Homo sapiens
tttttttttttttggaaagcattttcaaactttatttacaactgtcacagtgacaaaaagtagtttggaaaaaaaaaaatgctagtttctccctgagcctcaaaaaagaacagatagaagttacaggaggttcatctcacaacaggcatttttactgaaatactaggaattttttcaatacaatcagttagaaatacacacaaattacttgaaaaaaaaaaaaagaggaggccagataggagctcagccacttgtccaagagcagctgggtccccccagcaggctccaccgctgagggtcctgacattagctgtcagcccctggcctgctcagactgcaaacggtcatacaaagtggtctagggaccagcaaaaataataaaccacccccataaacagacacatacacaaagtagatttgttacgcagtttacaagcatgttcccatcacacagcaagaccaggacaggtgattcagggtagcagataagggaagacaccaaaacacaggaattgaaaaggcaagacccccgtccacaaggggaggcgagggaatgagagtatggatgaaccactctctgcagccaaaacagaacgaagcggggagcaagagagaggaaagcccctctcggtgcaggctgccggcctctcccacttctgcgaggagttggaagaagttattgccattgatgtgtgtcacacaggcagacaacagagggaggaagcaaggggtgccggcgaccattggcttcccagaacggaattccgcggactgctgtgtccacagcgcaccctcgtcctcctgccccggcatccccagagccacaatgaccttgaggtattaaatacagctatatacacacgtccagaactgagggtcaacctggactgactggagacctgaggggacatgctgcgtgccttggttggccgagtttagctcaaggaaggctctgagtccacctcttggccacacggtactgctctcggcggactgaagcatttgtcctgcaacctgctgcttcagatggctcttagctacaataagaaatcctaagtccaaaggccaactttctcatacaactggtgcccttgcaggaagcagtgggaggtggggagggatgaggaccactgttgagtaaggacagcagaggtcccttgccatgcctcccttctgcccttgtccgggaacaacatggggagaagccagggatctcatgacatcctttagtctcaaactcgatcccaaggttgccacgacagccttgtccccaccatgcaagtcacctccccaacaagacacataaaaagccacgtctgctctccactaggctcccacaagaaaaacagaccaagatcccccatggggcgtgagtactgcagctgggcagactggcgggaatccataggtgagctggggacccatgtacccatggctgctggggctggggcagggaaggtggcggtgaggagaaggaagggccagcctggaagaccacgcccactccatctcgggagcaagtcttggaagggcagcagttaagggagagaccttcgtgctgagtgtcccaccctggggcttccaacaagggcaggaagtgctctcactactccctaaaaagtgctgggaagcaaaatggatatatcagggagaaaagctgaaaagcactgcctcttaaaaaccgatcacactggctatgtgagcctaccacagctgggagcagagaggccatggagtagaatggggtgacctttcctttcctgcacttcacctccagctggctttgcaggcagccaattgctcctgctctcctttactctcctccctgtcatatagaccaacacacctgaaatgaaagcaaagggtggggtgggtgaaactggagagagagatgaagactttgttttctgatgtcccagcagccagagtgaatgtctgctgagcgcatcctggctgcagttctctgctcaatgttttcttaaaaacatgtattttttcttttgcctcatgtttgtt

SEQ ID NO: 46322 - DNA, 1235 bp, Homo sapiens
tttatttttctttttcttttttttttgttaataatttgaagatgtttattgcattctatttttggtgggaaaaaaatgtaacatacatttatttagcacgacattgtgaaatacacaaaacatgtaactgagaaagcaggaattttctattcctagtccatttctcgaggactaaatcatcggactgctcccaatgtaattggatatttcttacaatagttgggcaccaagtttaagatttattaattttctcctctcagtataggcagcaattcaccattttctttcagttccttcacaatatccaatcctcccaccagctcccctttcacatacagctgagggtatgttggccaatttgagtaagcttttaatccttgccgaacttcttcatcctccaatatatcgaatgtttcatattcaacaccagtactatttagtatttccagaatttgtttgctgaatccacattttgcttcctgtttgtttcctttcataaagagcatcacagaagctttatttgtcagcactttgagcctttcctctaatttgggagctttgggacaaattgtatctagttcttcagatgcttctagctccttaattatatcaagtcctcctatgagctctccagaaacatagagctgaggataggtaggccaactggaataggctttgagtccctgtcgaacctcttcatctgagaagatatcaaaactgctaaactgaatattatgtttgtgaagaatttccaccatctgcttgctgaaaccacagcgtggttccttgaaggagttccctttccataaaacagccatgccagggggccagccatgagtcaaatttccttcaaagcgaaaggttgaaaaccttcctttaaagatgttccattagcgcctgggtaggaaggagccactagatgcatgtcgctgaaacttttttggtcaactctggggcatgtgcacccatcctaatcggtcggattttctgagaattcttgaaaaacaagaaaagtgggaacagagctaatttcatatttttcagatacttcaggaacaccttcagcttccaacttcacaaatgaaacttgagggagttctttagctaactctgccaataacttcgttcatctgtgcacactgtggagcccatggtgcccagaaatggaccacaaggagggacttggctttgaggcgcagcagctcctcaaactgcccggctgagccgacctcctc

SEQ ID NO: 46323 - DNA, 893 bp, Homo sapiens
gcggcgagactgcacctcccagcatgccattgcagccaggactggagtcggtacttaagagtgatggggttccctagatactttaggccgtcgcatcgattatagagattgaggtggaacccggggcctgggaactggacgcacgcggagggcgaagatggaagcctggcgctgtgtgaggaagggctacggccactgtgtggtgggaagaggccggtgtgataaagcggaattgggaatatatatgtagccatgataaagaaaaaacgaagatcctaggagacaaaaatgttgatcccaaatgtgaagacagtgagaacaagtttgacttttcagtgatgtcctataatatactttcacaagatttactggaagataactctcacctttatagacattgccggcggcagtattacactggagttttaggtttcccaatattctgaaagaaattaaacattttgatgcagacgtactttgtttgcaagaagttcaagaagatcattatggagcagagatcaggccaagtttggaatcactgggttatcactgtgaatataagatgcggacaggaaggaaacctgatggctgtgctatttgcttcaaacattccaaattttcactcttgtcagtgaacccagtggaattcttccgccctgatatttctctgttggacagagacaatgttggattagttttactcttacagcccaaaattccatatgctgcctgccctgcaatctgcgtagcaaatacgcatctgttgtataatccaaggcgaggtgatattaagctgacgcaattggcaatgctactggcagagatttccagtgttgcccaccagaaagatggcagcttctgccctattgttatgtgtggtgactttaattctg

SEQ ID NO: 46324 - DNA, 758 bp, Homo sapiens
  misc_feature (1)...(758): n = a,t,c or g
ttcggcacgagaatttctcttctatttttgtctctgccattttattttattttctaggaaatttctttattatccagtgaatttttatttgttataattttatttccaagttatcttctatatggatgttcatttttatagcaatcattcttttaagtatgcagtattttttcacctctgaagctatttaagtttttaatgtgtttttagctccctgcattttttgttattctgttgtcattcacattagaggccttcctcaagcattctgtgactcttggctgtgaattcatatttaaaagtaagtgccttaaacacttactagaagctggagttgagagcttgttaactggtctccccttgaagggtgtttgtagggggacccctaatcatgtgccacgtgtgtgtagtacctcagttttaaaatttaattatgaaattttaaaaaattgtttttcattttttgtatgagtttctgaaccattttttaaaaccattattttggtatactttacacttacagaaaagttgaaaaatagaataaggnnnnnnnnnnnnnnnnnnnnnnnnnnnnnnnnnnnnnnnnnnnnnnnnnnnnnnnnnnnnnnnnnnnnnnnnnnnnnnnnnnnnnnnnnnnnnnnnnnnnnnnnnncttcgtctttacaaaatataaaaaagttagctggctgtggtggcacatacctacagtctcaattacacgggaggctgagcagaaggatcacttaagcttagggata

SEQ ID NO: 46325 - DNA, 458 bp, Homo sapiens
ggtatatatggagtactattacaaccttgggagaaggatggtctataaatccttttagttatgaattttcattatatgggtattacccaattacctataaagtatgttatgacacctggcatggtgcaaagcaggacttccagtgcgatgtgaggtggccagggctaaggaggaaacgatgtgtcgatgttgccttctgttcctttgatgggaattaaaagggaatcatgagaactctcattctgcagtgcctcttcctgtccagggtcctgctatgaggtgtcatcctcttgggcagaggaaaaaagcgccttttggataagggagaatttaattgtctaaatcaatagttactaactggccatctatggtttaggtgtagcctgccaacgtgttttattgggaccccacagttaaaaatatatagtactggtatttaaaaataccctattttggct

SEQ ID NO: 46326 - DNA, 360 bp, Homo sapiens
ggtgaaatacagctcctgcttctgagaacctataacccgaataaggaaatagtgcatacatttctaaaaaaaaaattaggcaactatgacaggatccataagcaggaattcaaaggaaacaaaggttaagaaaaaatagtcaaaagttgctatgatcggtatggaaattaaagtagtagattttaaggggatgctgggtggaggatatcccagctgcaatggggaatgggcttggcatatttacaggatcatgagtagtcagcctgaaaggtgaggaggtattttgaaaagtcaaaagagactgatggctgggtgcagtggctcacacctgtaatcccaacactttgggaggctgaggcg

SEQ ID NO: 46327 - DNA, 885 bp, Homo sapiens
tcagaggttacatggccaagattgaaacttagaggagtatagttacataaaagaaggcaaaacgatgtataaatgaaagaaattgagatggtgcacgatgcacagttgaagtgaacttgcggggtttttcagtatctacgattcatagatctggaattcgcggccgcgtcgacgaggactgctgtctgccctctctggtcaccctgcctagctagaggatctgtgaccccagccatgaggaccctcgccatccttgctgccattctcctggtggccctgcaggcccaggctgagccactccaggcaagagctgatgaggttgctgcagccccggagcagattgcagcggacatcccagaagtcgttgtttcccttgcatgggacgaaagcttggctccaaagcatccaggctcaaggaaaaacatggcctgctattgcagaataccagcgtgcattgcaggagaacgtcgctatggaacctgcatctaccagggaagactctgggcattctgctgctgagcttgcagaaaaagaaaaatgagctcaaaatttgctttgagagctacagggaattgctattactcctgtaccttctgctcaatttcctttcctcatctcaaataaatgccttgttacaagaaaaagtcgacgcggccgcgaattccagatctatgaatcgtagatactgaaaaaccccgcaagttcacttcaactgtgcatcgtgcaccatctcaatttctttcatttatacatcgttttgccttcttttatgtaactatactcctctaagtttcaatcttggccatgtaacctctgatctatagaattttttaaatgactagaattaatgcccatcttttttttggacctaaattcttcatgaaa

SEQ ID NO: 46328 - DNA, 1550 bp, Homo sapiens
  misc_feature (1)...(1550): n = a,t,c or g
tttttttttaacttggcaaagaggcttttactggaagttcaggaaatacaaatgcaaaggcaaatggccaagccagcagtacgtagttggtgctaatggacgaagccataaggtagccatgatgtggcaggggagggagggaggctgaggctggtgggctggaagctgcctgtgacctcctcccggccccactgtgtccctgtccccccaggtgctgcggctgctcatcacggcctgggagagaagactcatcttcactatcggcacgtccaacaccacgggcgagtcggacaccgtggtgtggaacgagatccaccacaagaccgagtttggatccaacctcacgggccacggctacccggacgctagctacctagacaacgtgctggctgagctcacagcccagggcgtatccgaggctgcagccaaggcttgaggcccaaggctgcccaccttccctcctgctttgcccctggtccggcaaatgcctccttcgccaggtgtgtcctggtagcccaggttcagggctggggaggagcctgcggaaggggccgcagccattcaggggacctgcctggtggcagctgggatgaagagagatggcatgtcaggctggccccgaatcatagctccctgagagggccaagcagagagtactggaaacctccctaccaaaaagacagagacccgccccctcacacacaaacacacatgtcctgttgaactcatgcacgcacacccacgtgcctgtacttgcccccaggctggaagagaagagacagaaagaccccatgacccccccatgtggatccccatctgtgtctcagttgcatctgtacagccttgtctgcaaactggaggatgcggggcaagcccttaggggcctgccagggctcggggggcaaagagggactcgggaaactcagtgtaccccagatgcctcacccattccgtgtcatcacccatgtctgccacccactgattgggcaattgtgggcccatggggtggaagcccccagatgactgagcagttctacaaaagaatggccagcacgagcggggactagagggtcctgattttgtgtctgtgcctcttcatctctctggactctgatctccttctcccttcccatctccaggccttctgtctgtcccagataaaggcgctgttctcccatcctccctaccccatcctctccaccaaatcgctcccaattttgagagccaaagcgtgggcgcttctgacttcaggagcgaaaggaggaggcctagtttgggccgatgtattttaaagcagagtggacagcagagagtcaatttccctttcgttgggagtgggcagtggggtggctaattgtcttcggccaacccaggggcctgttgcccaggcaactcaccacgtccgcctctgctgattggctgccacggtgggagtcagccaagatttaaagggatgccagcgattgctcttttcaaaacctaccagtcccactgtgggtggagaaataaatggtctttctcctcaaaaaaaaaaaaaaaaaaaacnnaaa

SEQ ID NO: 46329 - DNA, 1116 bp, Homo sapiens
atactcttatgacatgactacgaatttaatacgactcactatagggaatttggccctcgaggccaagaattcggcacgagagtgaaggcctcgttgagagaaggtctcattcgggtgtttttggaagagagtcgtgtgggcccaggtatcgtagcggcgacacgagagagacgggcggtgtgacagccttccactacctgcacgagtgtattggtaacgttggggtctgtctgctatcagctatgccgctgccccgttgcgctgcagaccccgcttggccaagagaggcatcctcaaacatctggagcctggaaccagaggaagagatcattgccgaggactatgacgaatgattcctgtggactaccgaggccaccagggttgggagggcctaccaccaagctggtacaaaggtgtttcgacccttcctggcggggctcccttactactgggaatgcagacacagaccttgtatcctggctctccccacatgaccccaactccgtggttaccaaatcggccaagaagctcagaagcagtaatgcagatgctgaagaaaagttggaccggagccatgacaagtcggacaggggccatgacaagtcggaccgcagccatgagaaactagacaggggccacgacaagtcagaccggggccacgacaagtctgacagggatcgagagcgtggctatgacaaggtagacagagagagagagcgagacagggaacgggatcgggaccgcgggtatgacaaggcagaccgggaagagggcaaagaacggcgccaccatcgccgggaggagctggctccctatcccaagagcaagaaggcagtaagccgaaaggatgaagagttagaccccatggaccctagctcatactcagacgccccccggggcacgtggtcaacaggactccccaagcggaatgaggccaagactggcgctgacaccacagcagctgggcccctcttccagcagcggccgtatccatccccaggggctgtgctccgggccaatgcagaggcctcccgaaccaagcagcaggattgaagcttcggcctccctggccctgggttaaaataaaagctttctggtgatcctgcccaccaaaaa

SEQ ID NO: 46330 - DNA, 317 bp, Homo sapiens
aaataaagcagatattttaataagtctgataaatgaaaattaagagttctgatgtatgttttgagctttctcttatttacccatatcaaaataaatgttgcatctaatgaccagaaaaatttgtatgggaacattgcaataagaattatattttcagtttttcttattgtcatgtaattaatgtgtctcaaagtaaggatttgctgtagtgggaagcttgaatttttaaatttttgttttaaatgtgatcatgaaaggttgatgatttcatgtattgatatttaaacaatggtagtagtattatctcaggggaggag

SEQ ID NO: 46331 - DNA, 88 bp, Homo sapiens; identical to SEQ ID NO: 363

SEQ ID NO: 46332 - DNA, 898 bp, Homo sapiens
tttttttttttttttttttcactagacaaaaatctatttttaattgtataaaattatacatataaaatacatagaatgtactaagaagatgagtaaaatctttgacaccagaagtggacagatcaggaaacaatttttctcaagttatttgggatcttactggttggtatttgagaaaaataataaatccaggaggtacgagggcaattcttcccacaactcacaccccttaatccacacgtcccagagaaaggagaaacaggagtgttgatgagtgccagcttataaatgtcaaacagacacacctggtgtgtctagctgtttttgcctttactccaacccgacgtgtttcatggaatacaaacatggggcttctaccccagctctcttctgattagtaagaaaaaaaaaatgatagggcctggagaattcaaggaagcccgtttcaagcactaataaaattgtagctggattccttacctcttacccaacatgatttcaaaagccaagaaagttgcctttcatcttgcccctatcaaatcccaaaagagcccaatatagccctgtttccataatcctatttttattgttgttggttaacacttgaactttcctgtttggaacctaatcctatttcctaaaagcaaagtctgtataattgttaagtgggaagtccaattgcaggaatactaaatgttcccaagctcagtttagaaagtacatgggacaataatatagtataaataagagatcacagagacaagggggaaatatatattagagacctccaaaaaaattctctgaaaggagaatactttagctgctgtactacaggttatttctctcttatgtcacccaggagagaagtgggggagaatggtgttaaaaacacaaatag

SEQ ID NO: 46333 - DNA, 1506 bp, Homo sapiens
aaattttatagccaaagttttatccttgatgggtttggccagactgcaatttcttgactaaagcctttaatgccaggttaaacaggagaaactttttccactagaagaaaatccttgctatctattttttccaatagaagaaaatccttgctatttattttatttgatgaataaacaaatttattggcagtagcttaaaaaaaatttttttttaaacagtctcactctgtcgcccaggctggagtgaagcaatgtgatctcagctcactgcaacctccacctcccgagtagctgggattacagacatgcaccaccaccctcagctaatttttgtatttttagtagagacggggtttcgccatgttggccaggctggtctttaactcctggccttacgtgatccgccccccttaaccttccaaagtgctgggattacaggtgtgagccactgcacctggcctgtagtagcttaaaattttccttgagaaaattcctgactttaaaaataacccttatataagtacaagtgattgtgacaaatgacgtaaaaatggcattcatgatgtctgaaacaagcctaaatagaattcaagattagactaaatgattttcacaaagcacattcaaggttttacattctatgattgaaaaaaattttttgaaaactttttatttcattctttcctgtaggattttgctacaaataactttgggaatgaataaagtggaatggtaactttccagtggttcagaattgaattagacttcttgtgactgtgatgtttggtttccattgaaatatatgaagtgagatgtcatatcctgaatatagtttgtcttcccccaattacttgatagcatgtctgtcagccagtaaagattaagaacagagtttctctaaattcctccgattattccactaaggcacattaaaatacttaattttggggaaacccagacatcacagatttctccatgaagtcctaaatcttctttaaagtcagaataggtatcttagttactgacagtattcaggtttttttctcccttggtgatatgtcattccatcagtgaaaaaatattttctcccagggataagaaaggtattctggtaatacattatcatcaatccttaaacagtaacagtcttggcacttatcacaaaaccgacccatttcttataaccagaaagattatcttagactgtccttcacattatactttacctactgccttgtaagaataagagttgctcactgtgtttacttgctgtcctccatattctccattgcaccattggtgtataacgttaagagtttcattgaatattattttaagtattacaaaaggcagcttgcttcttaatctatgcatctttggggtttttgaagaaatttaattctttgatgtaaaaaggaactgttaaaaaagttggaagctctgcacctgtgtatatatatattttagcaataaagcagcatgggctgagaatgcactgaaaaaaaa

SEQ ID NO: 46334 - DNA, 1743 bp, Homo sapiens
tttttttttttgtaatgaagaaaataaatctgtatcattttatttaacattcattctttaagttacagttaacacaatcagcttctaatccaagaaatcctagtataatctgaaatacatgcatatacatttagtaagacctacatttctaaataaattacatgcatgatatacaataaagaatactaatatgagaattcaggacatttatttttctgcatggaaatttaactactgtataacacacgcacatacaaaacaaaccccacaaaagcaacagtggtggtaataggtagtgagagacacacaaaataagcatatttaaaacgcctacaaacagccttttttttttaggcaacaaaatacgtccagtccttgacatcttctcatactcacctagcaccacagatgcaaggacctaacagtaaacatgtacaatctcatgcttaacacctaaagcatgcactgaattgaatttgtatgttgtgatctattctactaagtatgcaatacatactttttcctactaatattttatacattaaattaccctggcagcattttgaaattttaacattgatgtaaaacaacttttgaaagatttatgaaacaagtttcgaggttcaccttcaggctggtttggttaagtggaaaaatggcagcagcctcaaggttcatactgaatgaaaatggtgttgtgtgcatgtcaacccatgtaaaaaatacctatatacaagatggcacaaagatttgtgcagttggaatcaccagtgcaaatgcatgcatttgaggtacttatttttttcatggtcaggtataattatgcatagtcattttccttaagtgctaaagatttcagacctgatcaaatgaaaagctgtaagtgtaaatatgagctatttatatagttaatttcaaagtgctatgcttttaatgaacatatgtttaacattatagatttatatatttagtttaaaatatttatattactaaccaataaattttctcactataaagagactgactggcaattatacctggccaagtaatttaaatagcatacttgcaagaactgtagtgaaagagttaaatacttcattattgcttcattgaactgagaagcccaaaaggcatagatcaacaatgctcagtgatgaaaaatgaatacccagaacagcggtgcacgcccccaaaatgacctctgtgcaataaaaactaagcattctccacgttatcaatgccgttggcatccacatggatatcagactccccacacaaagatgagggaacaaagcggctaacagtgggacacaaacagctcttaagctctggcaattcctgcttcaggcgttccaattgctccacttggaatatatttggttgttcaggcatccaatcatatatcctatcataaattagaccattaactccaagttccttcaatttccttctgttttcaggatcattggtatcatcaccccagcagaatatgactagtcccttagcttttgcctcttgaatataggatgggtttctgagcaagtcttcagtatgtacatttatccccagtagattttcaaactgtgcaaagctcattgcaatgggggttgtccgagatctgaggtccatgagttcaggataaatctcagattttccttgagttaaaaatagtatcggatatttgttctgcttttgccgaaccattgtgcaaatatctgcatcaaatgaagaaaacactattct

SEQ ID NO: 46335 - DNA, 339 bp, Homo sapiens; identical to SEQ ID NO: 16755

SEQ ID NO: 46336 - DNA, 497 bp, Homo sapiens
gtcgacttttttttttttttttttaatgattaatagatgatttatttaggcaggaatacatatagtcatcattgccagacttaatatgagaggtgaaatgttcgatccaattttccttcctggataagtttttctttcctatccctctcagttttgataatataataaatgaagatgaggggcccaaatccacacagagctcccatgagtgagtttttaggagtgggtctgaaattaggatagacatttattgttcttgcataggcccaacgaagcaaggcaggattttcgatgagccctcggcggttgggatcgttgtactgaagcaggtactctcgtttcagctgggctcttatggccaaccgctcggcttgcgcccgccgggtttccggagatatgttgtattcggctgggtcgagggtctcaggcagagtgcgcaggctcgacggcttatactttgggaacgacatcttggcgaaccagggcacaattgcgcc

SEQ ID NO: 46337 - DNA, 1241 bp, Homo sapiens
  misc_feature (1)...(1241): n = a,t,c or g
ggcgagcggagttagcagggctttactgcagagcgcgccgggcactccagcgaccgtggggatcagcgtaggtnagctgtggccttttgcgaggtgctgcagccatagctacgtgcgttcgctacgaggattgagcgtctccacccagtaagtgggcaagaggcggcaggaagtgggtacgcaggggcgcaaggcgcacagcctctagacgactcgctttccctccggccaacctctgaagccgcgtcctactttgacagctgcagggccgcggcctggtcttctgtgcttcaccatctacataatgaatcccagtatgaagcagaaacaagaagaaatcaaagagaatataaagaatagttctgtcccaagaagaactctgaagatgattcagccttctgcatctggatctcttgttggaagagaaaatgagctgtccgcaggcttgtccaaaaggaaacatcggaatgaccacttaacatctacaacttccagccctggggttattgtcccagaatctagtgaaaataaaaatcttggaggagtcacccaggagtcatttgatcttatgattaaagaaaatccatcctctcagtattggaaggaagtggcagaaaaacggagaaaggcgctgtatgaagcacttaaggaaaatgagaaacttcataaagaaattgaacaaaaggacaatgaaattgcccgcctgaaaaaggagaataaagaactggcagaagtagcagaacatgtacagtatatggcagagctaatagagagactgaatggtgaacctctggataattttgaatcactggataatcaggaatttgattctgaagaagaaactgttgaggattctctagtggaagactcagaaattggcacgtgtgctgaaggaactgtatcttcctctacggatgcaaagccatgtatatgaaatgcattaatatttgactgttgagaattttactgccgaagtttacctccactagttctttgtagcagagtacataactacataatgccaactctggaatcaaatttccttgtttgaatcctgggaccctattgcattaaagtacaaatactatgtatttttaatctatgatggtttatgtgaataggattttctcagttgtcagccatgacttatgtttattactaaataaacttcaaactcctgttgaacattgtgtataacttagaataatgaaatataaggagtatgtgtagagaaaaaaaaa

SEQ ID NO: 46338 - DNA, 1491 bp, Homo sapiens
  misc_feature (1)...(1491): n = a,t,c or g
cggacgcgtgggtgcttgtgttttggaatttcacacccttacaagaataccacattttgaaacccagaaagacctggaaaggagcccagcatgtccatcttttcaaagatacaacaaaagcagaagttacaagaatattgcggagaggttggaaagcaggatttaacctctagttctcttgttctcagagaacagcaggttgatagtagattatgtctctaggtagagacagatacatgagaagagcctccaaaactggaagcccatcataaggcatgagaatgtttaactataaagccttttattagttctttgatagctaagatggttgttggagaaagtgcttaagccactgtttatgttgctgcctcctctctcaaaaccagccaagatctgttcacacacctctgtggctgtctttccctgaaacatggtaactcaagactgcctgcctaggtttcttagattaattattcacataaattttgtttaatattggttgaacaagaaatctgactttaaaagattattaaggagaatattccttaactatactggcttgatttgaaacaggctcttattgccatttaaactgccagaaatctttgccaaggtnctggttaaaaaaattggaaacggttttcttagccccagctttaaaagctagagactcagagaaatagctggcttaacaatgacagaacagcttaaaatttgtgcctacaccatgttctgagagtcgttcacatcaaattcttatcttttccaagccagtaagttggcttctccattcctggtgtctgatattcttgacaatcatcagcaacaaagatcacagcactttccagaagcatggagcttcagaaagtgccagtgaactcttggtcctcagtagtgagatgataacagtgttataatgcagcttccttgagccatcagagagagtgtatgttcaccctatctggctgtatcccattggcagtggacagattgaggaaattcctagatcactgagagctaagcaccatgcatagacaacagtttgttcttgcctgtgttgcttttagggactttgactaccacatgttcttttcttggggtgatttaatcacctgggagcatctgagtctgctcctaagtggctttgcaactgggcctaagttctgtttcctttatggatctcaaattttcatctgcacaatgaggctgttgaaaggaaaaaaagtgagcctctaggaattattcaaaaaaagtctgtgatacattccttttcctgccaaagttctgtctctgtctttggcttctgtccaggcaaagctaaataagacagcaaagtcaaagcagataaattcttgttgaaacttgactaaaatttatttgatttgttgttttactcccacttggaatcctgaggtagaagacagaatgcagaagtcttacatcttgggcaggaaactggtttattcctatactcttgtttcctctgcttct

SEQ ID NO: 46339 - DNA, 332 bp, Homo sapiens; identical to SEQ ID NO: 16775

SEQ ID NO: 46340 - DNA, 8416 bp, Homo sapiens
agaggctgcggtgagtccgccagccccagctgctcctcctcaagcccccaaggcccttcggcgggcccctgctgaaagaccggcatgccctattctgtgggcttccgcgaagccgatgctgctaccagctttctgagagcagcaagatcaggtaacttggacaaagctttggatcacctgcggaatggggtagatattaacacctgtaaccagaatgggttgaatggcttgcatctggcttctaaggaaggccatgtgaaaatggtggttgaacttctgcacaaagaaatcattctagaaacgacaaccaagaaggggaacacggccctgcacatcgctgctctagccgggcaggatgaggtggtccgggagcttgtcaactatggagccaacgtcaatgcccagtcacagaaaggttttacacccctgtacatggcagcacaagagaaccacttggaagtggttaagtttttactggaaaatggagctaaccagaatgtagccacagaagacggcttcacgcctctggcggtagccctgcagcagggccatgagaacgtcgtcgcgcacctcatcaactacggcaccaaggggaaggtgcgcctcccggccctgcacatcgcggcccgcaacgacgacacgcgcacggctgcggtgctgctgcagaacgaccccaacccggacgtgctttccaagacgggattcacgcccctgcacattgcggctcactacgagaacctcaacgtggcccagttgctcctcaacagaggagccagcgtcaatttcacaccacagaacggcatcacgccactgcacatcgcctcccgcaggggcaacgtgatcatggtgcggctgctgctggatcggggagcccagatagaaaccaagaccaaggacgaattgacacctctccactgtgcagctcgaaatgggcacgtgcgaatctcagagatcctgctggaccacggggcaccaatccaagccaaaaccaagaacggcctgtccccaattcacatggcggctcagggagaccacctcgactgtgtccggctcctgttgcaatacgacgcagagatagacgacatcaccctggaccacctgaccccactccacgtggctgcccactgtggacaccacagggtggctaaggtccttctggataaaggggccaaacccaactccagagccctgaatggctttacccccttacacatcgcctgcaaaaagaaccacgtccgtgtcatggagctgctgctgaagacgggagcctcgatcgacgcggtcaccgagtctggcctgacacctctccacgtggcctccttcatggggcaccttcccatcgtgaagaacctcctgcagcggggggcgtcgcccaacgtctccaacgtgaaagtggagaccccgctacacatggcagccagagccgggcacacggaagtggccaaatatttactccagaacaaagccaaagtcaatgccaaggccaaggatgaccagaccccacttcactgtgcagctcgcatcggccacacaaacatggtgaagctcctgctggaaaataacgccaaccccaacctggccaccaccgccgggcacacccccctgcacattgcagcccgtgagggccatgtggaaacagtcctggcccttctggaaaaggaagcatcccaggcctgcatgaccaagaaaggatttacccctctgcacgtggcggccaagtacgggaaggtgcgggtggcagagctgctgctggagcgggacgcacacccgaatgctgccggaaaaaatggcctgacccccctgcacgtggccgtccatcacaacaacctggacatcgtcaagctgctgcttccccggggcggctccccgcacagccctgcctggaatggctacacccctttgcacatcgctgccaagcagaaccaggtggaggtggcccgtagtctgctgcagtatgggggctcagcaaacgccgagtcggtgcaaggtgtgacgccccttcacctggccgcccaggagggccacgcagagatggtggctctgctgctctcgaaacaagccaatggcaacctggggaacaagagcggactcactcccctccatctggtagcacaagaaggccacgttccagtggcagatgtgctgatcaaacacggtgtcatggtggacgccaccacccggatgggctacactcccctccatgtggccagtcactatggaaacatcaagctggtgaagtttctgctgcagcaccaggcagatgtcaatgccaagaccaagctaggatacagccccctgcaccaggcagcccagcagggacacacagacatcgtgactctgcttctgaaaaacggtgcttccccaaacgaggtcagctcggatggaaccacacctctggccatagccaagcgcttgggctacatttctgtcaccgacgtgctcaaggtcgtcacggatgaaaccagtttcgtgttagtcagtgataagcatcgaatgagtttccctgagacagttgatgagatcctggatgtctcggaagatgaaggggaagaactcatcagcttcaaggctgagaggcgggattccagggatgttgatgaagagaaggagctgctggattttgtgccgaagctagaccaagtggtggaatctccagccatccccaggattccctgtgccatgcctgagacagtggtgatcaggtcagaagagcaggagcaggcatctaaagagtatgatgaggactccctcatccccagcagcccggccaccgagacctcagacaacatcagcccggtggccagcccggtgcatacagggtttctggtgagcttcatggttgacgcccggggtggttccatgagaggaagtcgccacaacggcctgcgagtggtgatcccgccacggacgtgcgcagcgcccacccgcatcacctgccgcctggtcaagccccagaagctcagcacgccgcccccactggccgaggaggagggcctggccagcaggatcatagcactggggcccacgggggcacagttcctgagccctgtaatcgtggagatcccgcactttgcctcccatggccgtggagaccgcgagctcgtggttctgaggagcgaaaacggctccgtgtggaaggagcacaggagccgctatggagagagctacctggatcagatcctcaacgggatggacgaagagctggggagcctggaggagctagagaagaagagggtgtgccgaatcatcaccaccgacttcccgctgtacttcgtgatcatgtcacggctctgccaggactacgacatcatcggtcccgaagggggctccctgaagagcaagctggtgcccctggtacaggcaacgttcccggagaatgccgtcaccaagagagtgaagctggctctgcaggcccagcctgtcccggatgagcttgtcactaagctcctgggcaaccaggccacattcagccccattgtcaccgtggagccccggcgccggaagttccaccgccccattgggcttcggatcccactacctccttcctggaccgacaacccgagggacagtggggagggagacaccaccagcctgcgcctgctttgcagcgtcattggaggaacagaccaagcccagtgggaagacataacaggaaccaccaaacttgtatatgccaacgagtgcgccaacttcaccaccaatgtctctgccaggttttggctgtcggactgtcctcggactgctgaggctgtgaactttgccaccctgctgtacaaagagctcactgcagtgccctacatggccaaattcgtcatctttgccaagatgaatgacccccgagaggggcgcctgcgctgctactgcatgacagatgataaagtggacaagaccctggagcagcatgagaacttcgtggaggtggcccggagcagggacatagaggtgttggaaggaatgtccctgtttgcagaactctctgggaacctggtgcctgtgaagaaagctgcccagcagcggagcttccacttccagtcatttcgggagaaccgtctggccatgcctgtaaaggtgagggacagcagtcgagagccgggagggtccctgtcgtttctgcgcaaggcgatgaagtacgaggacacccagcacattctctgccacctgaacatcaccatgcccccctgcgctaagggaagtggagccgaagataggagaaggaccccgacgcccctggccctgcgatacagcattctcagtgagtccacaccaggttctctcagtgggacagagcaggcagagatgaagatggctgttatctcagagcacctcggtctcagctgggcagagttggcccgggagctgcagttcagtgtggaagacatcaacaggatccgagtggaaaatcccaactccctgttggagcagagtgtggccttgctgaacctctgggtcatccgtgaaggccaaaacgcaaacatggagaatctgttacacagccctgcagagcattgaccgtggcgagatcgtgaacatgctggagggttccggccgacagagccgcaacttgaagccagacaggcggcacaccgaccgcgactactcgctgtcaccctcccagatgaatggttactcctcactgcaggacgagctgctgtcccctgcctccctgggctgtgcactttcctctccgctacgtgcagaccagtactggaatgaggtggccgtcctagacgccatccccttggcggccacggagcatgacaccatgctggagatgtctgacatgcaggtgtggtctgcgggcctcacgccttctctggtcactgctgaggactcctctctggagtgtagcaaggctgaggactctgatgccacaggtcacgagtggaagttggagggggcactctcagaggaaccgcggggccccgagttgggctctctggaacttgtggaggacgacacagtggattcagatgccacaaatggccttatcgatttgcttgaacaggaggaaggtcagaggtcagaagagaagctgccaggttctaagaggcaggatgacgcgacaggtgcagggcaggactcagagaatgaagtgtctcttgtttcaggccatcagagggggcaagcccgaatcacacattcccccaccgtgagtcaggtgacggagaggagtcaggacagactgcaggactgggatgcagacggctcgattgtctcatacctgcaagatgctgcacaaggttcctggcaagaggaggtcacgcaaggtccacactcattccagggaacaagtaccatgactgaagggctagagcccggtggatctcaggagtacgagaaggtcctggtgtctgtaagtgagcacacgtggacagaacagcccgaggctgagagctcccaggccgacagggaccggaggcagcaaggccaagaagagcaggtgcaggaggccaagaacaccttcacccaagtggtgcaggggaatgagtttcagaatattccaggggagcaggtgacagaggagcaattcacggatgagcagggcaacattgtcaccaagaagatcattcgcaaggtggttcgacagatagacttgtccagcgccgatgccgcccaggagcacgaggaggtgactgtagaggggcccctgggaggatcccagtgagctggaggtcgatattgattactttatgaaacactccaaggatcacacctcgacacccaacccctgaaccccacacactctgccatgcacacaggaggagagctggacctgagggccaccgcagcggtgcacacattcctctgggctgacggcatgacctctgtaagggactcctgctagtcccctcttggcatgaatgactgactgtagacgcatgacctccaggcttcaatcctgcctcttgcaatgacagctgatctgtcggaaccaggacacaaaagcagcaagaagcggggagagagagggatagaaaacaagcgcaggagagcctgcgaacgcaaaagtgaatgagggctttttgtggctggggatgggttttggttttggggttttttttttaaattgttttgacttcgtacagggtactttttcccaacctcatctgtcagaaatccatgtgggcttcctggaaagaaaaaaaaaaaaaaagaaaactaggcatgaaatcagtttaacaccttaatcttaagccatgtcctcatctgcccaccctccccaacccacatacctccattccacttgtgacaccccctcgactccctggtgacgctcctcccagatcgctctacatgacattcaggacacacacacacacacacacagacacaccactcgcctccactgaatctacacacagattttactgtgacttctgaagctgtggataaattggaattttttatgttgtctctctctctgccaatttcaatacgaatcatcttccaatggaaaatcattaccttgaagagtgcattcggggttccttgtgttagggacttaagaatctgaggcgaggacccccaggcttacctgtaggactcaaagggagccaggaccccatctgaaagggtctcctctctcagttgggggacaggccggtggctgacccaggattgcaccagcatgtccatagagaagaggttttctatgtcttcaagcactatatcatagtccgtgttcaaagtgtaaactgtacagtaatcagccttgtgtatatgaaaaacaataaatactatgcaaaccaatagaaacatttagcagtacgtacagagcctgacagcgcagctcctgaggacttctgcggctgcaggagaaggagctgtggcctgtctttcagtgaaagaggaaggaaaggagtagggctagtgaatgtatctgccaggtcttagaagtcaggaccacccagggtctcccagagtgaacttggtgctctaagtccaggcagcctgcaggctggggaccctgggtgcaggtgccaggctcgaggctgttccctgtcctgcctcagtgcctcccctctgcccagcccctgtggcctcttggagaggcgagccagggggctccccggaccgcatggccggtgagagtagagtcggaggcggagagcctggacgcccagaggccggggccaggctctgggtcaaggcaggaaggagacagacagctggcagttcctcgcctcggtgccatcagggaggagccttaagttccactagagcctccggcccagggaggccagaatcagcacaatcccggccccgccctcgcggcgggcgcccccagggccaggagagagagacagggctggctcctctcgcccctggagccgcggtgtggacggcccggccccgtccgccccgccgctctgcgggagtgtccttcgggacacacttaaaccttccaagtagcacagaagccccctccacgtcagagccccctggccgcggggcctgtgagcggagaggggccctgcttcccacacaaatccgccccggtgcacccccggccaggcaggccccggggcggcctaggcgccttgtcggccgggggtggggctgcttttgcttcctttagaggggcgggcagggagaggaagctctagctccgggcctgagtttccccgaggctgcgtcggaggagctgcagggcgagcccggacggctgccgtctccgccagaggccaccccggcccggcctccaggcagaggcgcccccctccatcctcccccatcccgggggccacggcaggggggccgcacagcgcggctgggaccgattcggtgacggcccaaggaagctgggcgcagggctcgcctctcccgcctcgatcctgcaccttcctctcccaggtcgctgctgcagccaacccagtagcccccttagcgcccccgcggaccccgcagctccagactccgctttggcacctctgctccggctggcatggctgcacgctccggctgctagtaggagccgttaggggaggagtttggggtctccacacgatgcctagagaatgctgcagtctgcacattagacgctttttagaagttttgaaattaccttgatttttttaattgttatgaaaatggatcttttcttgactctcccacatgctctgttatgggagagaatcccctaccctactctgatgtatagaccattctcccttcaccagccgaaccaatgtcaaaattaataaagaaatggactaaggcacagggctctatctctccttcccgctcgtctttggggggttaggggtgctgaggccagcgtaagcctgggttgtgatgtgaaggagtctatgggtggggctcaggtcccagagagcccgccaatgcccagtcctcccagaagcctggacaaccctttaatcaggaaccacccacctgagagatgcctccagagagg

SEQ ID NO: 46341 - DNA, 2520 bp, Homo sapiens
  misc_feature (1)...(2520): n = a,t,c or g
acggcaaaaaatgttggtttgacttccacaaatgcagaagtaagaggatttatagatcagaatctcagtccaacaaaannnnnnnnnnnnnnnnnnnnnnnnnnnnnnnnnnnnnnnnnatttcatttgttgcatttccagtttccaataccaactcacctacaaagattttaccaaaaaccttaggaccaataaatgtgaatgttggaccccaaatgattataagcacaccacagagactaaccagttcaggaagtgttctgattgggagtccatatacccctgcaccagcaatggttactcagacacacatagcagaagctactggctgggtccctggtgatagaaaacgggctagaaaatttatagactctgatttttcagaaagtaaacgaagcaaaaaaggagataaaaatgggaaaggcttgagacacttttcaatgaaagtgtgtgagaaagttcaacgaaaaggtacaacatcgtacaatgaagtcgctgatgagctggtgtcagagttcaccaattcaaataaccatttggctgctgattcgcaggcttatgatcagaagaacattaggcgaagagtttatgatgctttaaatgtgctaatggcaatgaacataatttcaaaggaaaaaaaagaaatcaagtggattggcctgcctaccaattctgctcaggaatgtcagaatctggagatagagaagcagaggcggatagaacggataaagcagaagcgggcccagctgcaagaacttctcctacagcaaatcgctttcaaaaacctggtacagagaaatcgacaaaatgagcagcaaaaccagggcccgccggctctgaactctaccattcagctgccattcataatcatcaatacaagcagaaaaacagtcatagattgcagcatctccagtgacaagtttgagtatcttttcaattttgacaacacctttgagatccatgatgacatagaagtactaaagcggatgggaatgtcgtttggcctggagtcaggcaaatgctctctggaggatctgaaacttgcgaaatccctggtgccaaaggctttagaaggttatatcacagatatctccacaggaccttcttggttaaatcagggactacttctgaactctacccaatcagtttcaaatttagacctgaccactggtgccaccttaccccagtcaagtgtaaaccaagggttatgcttggatgcagaagtggccttagcaactgggcagttcctggccccaaacagtcaccagtccagcagtgcggcctctcactgctccgagtcccgaggcgagaccccctgttcgttcaatgatgaagatgaggaagatgatgaggaggattcctcctccccagaataaagacaagagaaagcctacgtttcaatatgtgatgctcatgtgtgtttgtagtgtgagctcttgtttttgaaatgattgcttcagtctttgcctttgtttgcactgtgtgtttcagtggaaaactaggaggaaacacaataagcaaatcacatgaaggctgagatgattgagatgaaagttaacatagtgttgaatggaaagtctggccaacagagcagtagatgatataacaaagaaagcatgctttctgaggagatagtggggataatccctgaagagttggcagtgtgagtgcaactcatttatcttctgtgaggtgggatttttgtgttcctcacacccatgtaattattcttagaattgagattgctacacggagcagtccttgacgatcgtgtttctgacgtttctcttccttgcctggactgcctttgacaaggcagaaatgaacatgaaaagtccccaggagaggggagctgtgtagtgagggatactgagggcagtcctgtggctgaggggcacagattgaactgctgaactagttggaggtctagatgaggtgctttacgcatcagctgccttagacagcttctagaaaggagcgagcgctacttcttaagtacttaagtgacatttagataatttatagtaaaactgaaattattattagccaatgcattggtgcatagaatttactagggctacttctggaagccaaaatagaatagcatttccatgtgcattaaatactttgccagcactgcctttgccagcatcctaaatctggagttttacaaagaaggaaactgtatctttaggttaatcaaagctatgcatttcatatagctttttcatttaaaacaagacaaagaaacaaattcctatgaccaaattgcttgcctacagttccctgcagtaattgtatgatctcacccagtgtgcaatttgtgaaaatgaaccaaatgtcattacttttgtcttaaagaaaagtctatttcaagaatatgaacagcagtgtttccttgtacatgtcaccttttttcacattttcattaatcagaatgaccttattgagcctactcctggggtcaattgcatttcaaactaatccaatatttagtgtttcacagaaacactagaaaac

SEQ ID NO: 46342 - DNA, 401 bp, Homo sapiens; identical to SEQ ID NO: 16787

SEQ ID NO: 46343 - DNA, 468 bp, Homo sapiens; identical to SEQ ID NO: 16796

SEQ ID NO: 46344 - DNA, 1524 bp, Homo sapiens
ttttttttttttttttttgaaaaataaatgattttattgcagggccaatgataggtagtcacaagggcatgaaatggcagatctcttgtctgaagcagagaaggcacactggcagactccatgtgtgtcaaacgccgtgcatgaatcaggtttttagaaggaaggtaggagaggaaaactactcactagcagaactgaactgctgtaaaataggttaaattctttgaaaagtgaaaaatgatagtagcaaaatcatgaagttgtatctgaaccagagccgtgatgtaaccaagtaagatggaagtttccatccagaggagttaattccgaacaagtcacagaaaggtgagagctgccggttccggcacgctgtcttctggagtgccagtgaccgggcaagaaatttgattctttcctttgattctcttgggaaagaacacatttcccaagcccctggagacccacagggtttggcactgtccgtgaggctgtgctcctgaggacggacgttcaggaggccgtggaggagcagcgctgcaggagcagggtgtggcagctgtcgcacactcgcaccggcttggggtaggagggcagggccagctcgttgctggagcaggtgttgcagaagatgtggccacagttccggcagtggtgctttctccgggaaatggagaactccttctcacactgcctacagtgtgtcgcttcgtcatctttcagccaggcgtggcccttcagtgcctggttcacttcttttatatcttccatcttcagcttggactggctgaggtgcaggcccatttcctggagggcttgttcctgctcctcgcagatcttctgcagctctgccttctcgtcctgaagctcccgcaactcctttttcagtccttccacttgttgcagctccatcctgagtagagaggaagtgtctttctcgtgctgtaattcgcgctgaagagcctgtctttgctctttttctgatttcaattctttctccaggcttgagcattgctcgtgcagctgggagagctgcagctgcagggcgccgatcctcacgcccagctcctgctgcagcttgtggtccgctcctcagccccctgcctcgcccgctccgagtgctgcaacctttcttccatttgtttcatgctggacataacttggttggtttttccttcaaaggatgtgatggcttcattcttctgctgcaaactgctctctgcattctgagctttgtgaaaacatctgtaaattaaccgctttgacttcttccagctgctggcggagggcaactagtgtgtcctgcttctcgtgggtgtccttttccagtaacttcattgcaatttccatttcggttttcattccaatttgtaactccagttctttttccagttccaaccggactttcttctcctcttttagctgcttccacacatcactgtacatttcatccagaccttgccgagtttgcttgtaagtctccagctcaactttggtatcctgttttgttatctctacactcttttc

SEQ ID NO: 46345 - DNA, 1142 bp, Homo sapiens
  misc_feature (1)...(1142): n = a,t,c or g
gaggtcgtggcagggagattcatcgaggtgccctgctcatgaggactacgacagtcaccgcagttcagaaggctgcactccccgaaagtgcggcagaggtgtcaccgatgtcgtcatcaccagggaggaagcggagcggattcgcagcgtagctgaaaaggggctctccctgggaggatctgacggaggggcatccattctggacttgcactcaggggccctgtcctgtcgggaagcactttgtgaacctgtacagatacttcggggataaaatacagaacatcttctcagaaggaaggactttccgggtttatacccgggaagttgccggcagaaggtccagctcaccattgctgaggcttttggcatcagcgcatcctcgctgcatctgaccaagcccaccttcttctcccgcataaacagcacggaagcgcggacggcncngaacgagtactggcatgcgcacgtggacaaggtgacctacggctccttcgactacacctcgctgctgtacctctccaactacctggaggacttcggcggagggcggttcatgttcatggaggagggtgccaacaagacggtggagccgagagctggatgtttttgtttccggatgatgtcttgtgggttccaagaagttaatggaccgagagccagtgaagctgctggtgcgaaggctggagtcaggtgtcctccggggactcaccacccgcccgagagggaagaagacacatgcgattctgggaagctgagagcattgctttattgttgattcccttggttgcccgtgctgagtcctgcttttaaggaagcaggtcgcgtctccttcttcacctcggggtccgagaacctacaccgcgtggagaaggtccactggggcacccgttacgccatcaccatcgccttcagctgcaaccccgaccatggcatcgaggacccagcgttcccgtagccagcagccgggccaaggtaacttcaggagggcccgtgtggaggcagccgcgccagtcgtgcacccacccccacgtccacccgctcctgttcacagagtgccttaggaattctctgattttgatttgctgacgtgttaatcttttcatctgtgagtaaatgaagggaaccagcaaaaaaaaaaaaaa

SEQ ID NO: 46346 - DNA, 1743 bp, Homo sapiens
ggacatcaaagatgaggagcctggagactttgggccgaccgaagcctgaatgtgagggttacgaccccaacgccctgtattgcatttgccgccagcctcacaacaacaggtttatgatttgctgtgaccgctgtgaagaatggtttcatggcgattgtgtgggcatttctgaggctcgagggaggcttttggaaaggaatggggaagactatatctgcccaaactgcaccattctgcaagtgcaggatgagactcattcagaaacggcagatcagcaggaagctaaatggagacctggagatgctgatggcaccgattgtacaagtataggaacaatagagcagaagtctagcgaagaccaagggataaagggtagaattgagaaagctgcaaatccaagtggcaagaagaaactcaagatcttccagcctgtgatagaggcgcctggtgcctcaaaatgtattggccccgggtgctgtcacgtggcgcagcccgactcggtgtactgcagtaatgactgtatcctcaaacacgccgcagcgacaatgaagtttctaagctcaggtaaagaacagaagccaaagcctaaagaaaagatgaagatgaagccagagaagcccagtcttccgaaatgcggtgctcaggcaggtattaaaatctcttctgtgcacaagagaccagctccagaaaaaaaagagaccacagtgaagaaggcagtggtggtccctgcgcggagtgaagcactcgggaaggaagcagcttgtgagagcagcacgccgtcgtgggcgagcgatcacaattacaatgcagtaaagccagaaaagactgctgctccctcgccgtcactgttgtataaatgtatgtatcacctaggggttggcctcctggacccctcccgttctttctggatagccatcccctgggcctgtccaggactgggagttgcagctttgtgttaagctgatcacagacaccggctgcaccatcagcgggaagcagagcccatgtccaggatgcctcctgctgccctgtgtccatccctagtctgtcaggacttcctgtcactgttttccaaagctgtaaacctcactggtgaacgttcaccttaatgattgattctttaatctctgttttcactctcaggctctggtaagtattcgtattctcttcatcccagtctgattgcatagccacactgcccggcacgccacatccacccctgtctgcacatgagttgttctgacaacagcgctgtatacgcttcagtttttccacattgtccacggccagcacatgaaagcatcacttcttttttatgttgtgggaatctttgcaagttagtgttgcatctgattttcaggtgtacatttatttttgactgggcagataggggattttttttttccatgtccgattcacatgctacacacccacatgaacacattcgaacttcgaaggccacacactcctgcttcataggccccacggtaagtgagttcacacctagaacactgtcctgaccgcaggacgcgtggccttggacttggtattctacatgtgactggctttcttgccctcgtctcttgaatgtttagactcttaagatcatatcctgccccaaatttcaaattaatgaaatgaagatatttcaaacagatctttgaaacctcagattctgtggtgcaattttaatgttttcttgtttctcagttttctgctataaaactattttcaattcagtca

SEQ ID NO: 46347 - DNA, 1279 bp, Homo sapiens
atggcaggtacgtccttttagaatttaaggttagtgaagccatctatttccccgacccccttcagtgaaaatggtctttcgcatctggctcttctttttggaggcgtgcttgccagcagtcaaaatggctccattccggaatagatttaataggaagtgaagctgtgacggcgaggcgttgcccggcctatctttgctaggcgttctcagaattagttctttctgcccacactagacatggcgcttgccagcgtgttggagagaccgctaccggtgaaccagcgcgggtttttcggacttgggggtcgtgcagatctgctggatctaggtccagggagtctcagtgatggtctgagcctgggccgcgccaggctggggtgtcccagaagagccaggaatcgaaatgcttcatggaacaaccaccctggccttcaagttccgccatggagtcatagttgcagctgactccagggctacagcgggtgcttacattgcctcccagacggtgaagaaggtgatagagatcaacccatacctgctaggcaccatggctgggggcgcagcggattgcagcttctgggaacggctgttggctcggcaatgtcgaatctatgagcttcgaaataaggaacgcatctctgtagcagctgcctccaaactgcttgccaacatggtgtatcagtacaaaggcatggggctgtccatgggcaccatgatctgtggctgggataagagagccctggcctctactacgtggacagtgaagggaaccggatttcaggggccaccttctctgtaggttctggctctgtgtatgcatatggggtcatggatcggggctattcctatgacctggaagtggagcaggcctatgatctggcccgtcgagccatctaccaagccacctacagagatgcctactcaggaggtgcagtcaacctctaccacgtgcgggaggatggctggatccgagtctccagtgacaatgtggctgatctacatgagaagtatagtggctctaccccctgaaagagggtggatgcagctgcttgtgtttcttggggtgactgtcattggtaatacggacacagtgacccatcctccatcctatttatagtggaagggccttcaattgtatcagtacttttttttaagctctggcacattgacctctatgtgttaccagtcattaatgagctgctgcagaggtgactatttgttttactttcttggatgttaacattacactactcactactcaatctcaaaaaaaaaaaaa

SEQ ID NO: 46348 - DNA, 605 bp, Homo sapiens
ttttgtggcagaaacattttaattgtaaacagcaaggctctctgccaggcagcccagatgaacaggggtggcactgtgctggggtgaggtgctttctttgtgggaacgaaagcagacggcccaccctcgtctagccctgggcccctgtccccaaggccagctcgctgagcctgcgctcctcctggaagcggatgagggcatctctctggttgaccaaatccaccagcttcctcaggacctggtcctcagcctgccgatcagcagctgtctttaggttttcttcccggttcatgtagcctcgtagctcctggtccagctgccactgtttctcctccagattcaattcctgcaccgtgatcatgagctcggcctcctcagccaccaggctgtttttcttgtcaacgagctgtagcagctgtcctacccatagtttcttttgctgttctggggaactgctctggcgcctcaaggccagctccagcttcacgccctcggcctctagctccctcaaggcagcctcaatctcatttagtcgcctgtggatggtctgggccttgcagaacctctgtcgaccggccgggaatttagtagtagtaggcggctgc

SEQ ID NO: 46349 - DNA, 742 bp, Homo sapiens
tatgacatgattacgaatttaatacgactcactatagggaatttggccctcgaggccaagaattcggcacgagcatgtaaaggagccagtcttcagatgattccagcctcagccttcaggccactcagctggtgccaaatagagtagggatgagctgtccccacagagacctgcccagtgcacattgtgagaaagttcaggccaggtcttcctcctatagtggagagtatggaagtggtggtggaaagcgattctctcattctggcaaccagttggacggccccatcaccgccctccgggtccgagtcaacacatactacatcgtaggtcttcaggtgcgctatggcaaggtgtggagcgactatgtgggtggtcgcaacggagacctggaggagatctttctgcaccctggggaatcagtgatccaggtttctgggaagtacaagtggtacctgaagaagctggtatttgtgacagacaagggccgctatctgtcttttgggaaagacagtggcacaagtttcaatgccgtccccttgcaccccaacaccgtgctccgcttcatcagtggccggtctggttctctcatcgatgccattggcctgcactgggatgtttaccccactagctgcagcagatgctgagcctcctctccttggcaggggcactgtgatgaggagtaagaactcccttatcactaacccccatccaaatggctcaataaaaaaatatggttaaggct

SEQ ID NO: 46350 - DNA, 415 bp, Homo sapiens
  misc_feature (1)...(415): n = a,t,c or g
ggatggctgacattctctctcagtcagagaccctggcgtcgcaagacctcagtggggacttcaagaagccagctctgccggtgtccccagcggcgcggagtaaggccccggccagcagttcttcaaaccctgaggaggtacagaaggaagggcccactgcgttgcaggactccaattctggggagcccgacatccctcctcctcagccggactgcggtgattttaggagtctacaggaggagcagtcgcgccccccgacagcggtttcttcccctggcggtccagcccgggctcccccctaccaagagccttcatggggtgatcatgccacagcnncnnacaggtnacngancnttgaggncnntgntnttnttganacccntannttgaangggcnttnnttntgccntttccg

SEQ ID NO: 46351 - DNA, 1590 bp, Homo sapiens
  misc_feature (1)...(1590): n = a,t,c or g
atgaatttcttttcatgctaccttcaatcttcaactaaagatttctaaaaggggtaagaaatgaggcagtagtttattaaatacatagaagtacacagctattatatgctgtggctttgagaagttaacttttgtggaatatgaaaccaaaggaagaatttccatgtagataaattaagaatagggaaaaacatctacctaaaagatggttgtccctaaaaaactggaaacatctgaaatgctctatttatgttattattcctgggagcttatagcccattatttttactttttttttttaattcagaagactagaacagaacttaaattttacaaacttttgatcataatgcttttgcccatactgtctcgtccttagccccagtgacatgtgctgatcctcctgcctttagttctaaatggttctgaatagctttaaaagatgaataagaaaaaagatcaagctcttttgaggctagagggctcatatggagatctaaaaccctccatgttcatttccagacttggtcaggcacatacatagtaaattataatcaatcatgggaattacataaggataatgaggcccaactgaaaccaagtttcagtctgccttacctttacccgtccttgagaacagcggtccaggagaatcaggcagtctgtggcctcctgtagcagggcgctcttaacagactcaggtgtaaggtttggatcccttgctacatcacaaatcagtttcaagagggccttcagtaagaccacaagtctgcaggaaactctggaatcaggaagaaaagctatgttcatactctaaatctggatattaaaattggaagagacttcaaagactgtcaagtggaaagctatcatttcctaaattaaggaacttaggtcaaagttaaatgaaaaagacctaaaaacagaaccaaagacagcctctagatttcttaccctcaagtctcctgttaggcatactgcctatacacacagacacaccctctgccacactgctctcttccttccaagaagcttggttctactgtaagcaacagctccttcatgggctgagaaggggaaaccaggatctccccaaccaagggcctatacttttatttttcaactctattaactgaactatgcttggagagagccctgaatcctttaactttaatgccatcttaggcctggaagttagagtgagggaaatgagcttggcttctgggactgtgtcaagttgaattttctgtcatttaatttcagatccctagctcatcatcagtgaagtccagcctacttacttgtaactattaacctttctaaaagttttcatcgccttggtaaagctccagaaatggacaatgctagtgacannnnnnnnnnnnnnnnnnnnnnnnnnnnnnnnnnnnnnnnnnnnnnnnnnnnaaaatttatatgtatttttaccacaataaacaaaaaaccctaaaaaactttaatgaaaggtggaaaataatttaacttataatgtgaaaatacaatgtgaaatgtacaataaatcatatttatggacagatgcgtgactgggagaaaaaaaaaaaaaaaaaaaaa

SEQ ID NO: 46352 - DNA, 1211 bp, Homo sapiens
tacaagtataagtgttaccttacatggaaacgaagaaacaaaattcataaatttaaattcataaatttagctgaaagatactgattcaatttgtatacagtgaatataaatgagacgacagcaaaattttcatgaaatgtaaaatatttttatagtttgttcatactatatgaggttctattttaaatgactttctggattttaaaaaatttctttaaatacaatcatttttgtaatatttattttatgcttatgatctagataattgcagaatatcattttatctgactctgtcttcataagaaaagctgtggccgaattttgaacatctgttatagggagtgatcaaattagaaggcaatgtggaaaaacaattctgggaaagatttctttatatgaagtccctgccactagccagccatcctaattgatgaaaagttatctgttcacaggcctgcagtgatggtgaggaatgttctgagatttgcgaaggcatttgagtagtgaaatgtaagcacaaaacctcctgaacccagagtgtgtatacacaggaataaactttatgacatttatgtatttttaaaaaactttgtatcgttataaaaaggctagtcattctttcaggagaacatctaggatcatagatgaaaaatcaagccccgatttagaactgtcttctccaggatggtctctaaggaaatttacatttggttctttcctactcagaactactcagaaacaactatatatttcaggttatttgagcacagtgaaagcagagtactatggttgtccaacacaggcctctcagatacaaggggaacacaattacatattgggctagattttgccccagttcaaaatagtatttgttatcaacttactttgttacttgtatcatgaattttaaaaccctaccactttaagaagacagggatgggttattcttttttggcaggtaggctatataactatgtgattttgaaatttaactgctctggattagggagcagtgaatcaaggcagacttatgaaatctgtattatatttgtaacagaatataggaaatttaacataattgatgagctcaaatcctgaaaaatgaaagaatccaaattatttcagaattatctaggttaaatattgatgtattatgatggttgcaaagtttttttgtgtgtccaataaacacattgtaaaaaaaaaaaaaa

SEQ ID NO: 46353 - DNA, 344 bp, Homo sapiens
gcaattccctgtagctctcaaagcaaattttgagctcatttttctttttctgcaagctcagcagcagaatgcccagagtcttccctggtagatgcaggttccatagcgacgttctcctgcaatgcacgctggtattctgcaatagcaggccatgtttttccttgagcctggatgctttggagccaagctttcgtcccatgcaagggaaacaaccacttctgggatgtccgctgcaatctgctccggggctggtcgacgcggccgcgaattccagatctatgaatcgtagatactgaaaaaccccgcaagttcacttcaactgtgcatcgtgcaccatctcaatt

SEQ ID NO: 46354 - DNA, 1967 bp, Homo sapiens
ggatccggcaacgaaggtaccatggcgggacgtggcgccatggtgctgttgcacgtgctgtttgagcacgcggtcggctacgcgctgctggcgctgaaggaagtggaggagatcagtctgctgcagccgcaggtggaggagtccgtgctcaacctgggcaaattccacagcatcgttcgtctggtggccttttgtccctttgcctcatcccaggttgccttggaaaatgccaacgccgtgtctgaaggggttgttcatgaggacctccgcctgctcttggagacccacctgccgtccaaaaagaagaaagtactcttgggagttggggatcccaagattggtgccgcaatacaggaggagttagggtacaactgccagactggaggagtcatagctgagatcctgcgaggagttcgtctgcacttccacaatctggtgaagggtctgaccgatctgtcagcttgtaaagcacagctggggctgggacacagctattcccgtgccaaagttaagtttaatgtgaaccgggtggacaatatgatcatccagtccattagcctcctggaccagctggataaggacatcaataccttctctatgcgtgtcagggagtggtacgggtatcactttccggagctggtgaagatcatcaacgacaatgccacatactgccgtcttgcccagtttattggaaaccgaagggaactgaatgaggacaagctggagaagctggaggagctgacaatggatggggccaaggctaaggctattctggatgcctcacggtcctccatgggcatggacatatctgccattgacttgataaacatcgagagcttctccagtcgtgtggtgtctttatctgaataccgccagagcctacacacttacctgcgctccaagatgagccaagtagcccccagcctgtcagccctaattggggaagcggtaggtgcacgtctcatcgcacatgctggcagcctcaccaacctggccaagtatccagcatccacagtgcagatccttggggctgaaaaggccctgttcagagccctgaagacaaggggtaacaccccaaaatatggactcattttccactccaccttcattggccgagcagctgccaagaacaaaggccgcatctcccgatacctggcaaacaaatgcagtattgcctcacgaatcgattgcttctctgaggtgcccacgagtgtattcggggagaagcttcgagaacaagttgaagagcgactgtccttctatgagactggagagataccacgaaagaatctggatgtcatgaaggaagcaatggttcaggcagaggaagcggctgctgagattactaggaagctggagaaacaggagaagaaacgcttaaagaaggaaaagaaacggctggctgcacttgccctcgcgtcttcagaaaacagcagtagtactccagaggagtgtgaggagatgagtgaaaaacccaaaaagaagaaaaagcaaaagccccaggaggttcctcaggagaatggaatggaagacccatctatctctttctccaaacccaagaaaaagaaatctttttccaaggaggagttgatgagtagcgatcttgaagagaccgctggcagcaccagtattcccaagaggaagaagtctacacccaaggaggaaacagttaatgaccctgaggaggcaggccacagaagtggctccaagaaaaagaggaaattctccaaagaggagccggtcagcagtgggcctgaagaggcggttggcaagagcagctccaagaagaagaaaaagttccataaagcatcccaggaagattagaatgcaaatggacattctctgggaggtggggcataccatagcccaaggtgacatttcccaccctgtgccgtgttccccaataaaaacaaattcacaagaaaaaaaaaaaaaaaaaaaaaattcctgaggccgcaagggaattc

SEQ ID NO: 46355 - DNA, 657 bp, Homo sapiens
tttaatttctctcatctttatttttattaaaaaaaataaaacagtcaccaccaaccacatgacaactcgccaggcaaggccttgcttccctccctcctttgcgtcccatgtgcctagtcagcaaggtcggggaggcaccgatgttagcttcgcccaaagggagtattacagagagaggcttgggaaagggaaggaaacctggacaggcttttcagcactgagaaatcacttaaaactgatttgctttcagtaactggtatgtctgaaatgcagggagggaagaccatgctgtcagcaatcaacccactttttacaggttggctccagggagaggttggttgaaacggtgtttaaaggaaggagagtggtttcaccagcttgctcagctctcctggaacaaagactaaggtgctacgtgttgcttgttaggcttatactacggcgggtctggggctgcaggtctggagtccttgttagtgcatttagtgctggtgagaagggtgggccccagtcttggacgctgaagtcctctaaagacaaggcagagacacagcctcagatcccccgtcatcttccactgaataagggggatggagaagaggtctcagcagttggcctcctgcaagccgagatgcctgccagcctgggcctgcttcc

SEQ ID NO: 46356 - DNA, 1361 bp, Homo sapiens
ttttttttttttttttagattttaatgtatgatggtctttatttacaactttattggcaaaaaagaaaagggaaacttttaaacaatttaacacagggcattgtagctgatcctgtcagataaaagaagttccattttaaatgtccatctaattgtccaaagatacacaatactgaatctgcatacgcagtttcctttatgaagtacagtgctcatgttttaggcagtcttctaaacatacaaatacagaggaaattaaatcactcattaaaaactgtgtcaaatgaagggtattttaaatataagtttgttgtttctggtaatagcacatgcccaaatgaaaaccaaaagatggaaaggcagatacacttcttacttgggtggacagttacaacatcaatcattttctgcaatgaccattatattttcaatttatcatgaactactctgaacttactatgagatgtagccaaagtcagaagagaagatgtagggacaagatgccttttttgcaggaggttaactcctccagaatcagcataggaaataaacatcctgttgattctaggtggaaagaaattaatgtagtcaatttcaactcgtgctgagctgacttaattttttcagcgatgtgtttggtgtcattcttctaaatcaagtgtatttaattcttcttctagttcatccaaatcctctcccagtgaaaagattttcatcaacaggaacagcatcaatggctccattttccgttccctccctctcgttgtcctcttccaagtcacttctttcaccattttcagccctacctccagaagcttcacttaatttgttttcatctttatctgaagtatatgtgctgaatctttcaagactggctacagtaatacctgtttcatctacatctcttgggatgtacaggcttaaatctatgtcatttacactcactgaatcatcaacctcatcaccacctgttccctggggtgtagcgggtatcatctgcttcctcatcatcatcattgaccagttcaggacgaaattcaaacacttcacgcccactggatcactaagtgctttccctgctttgaagtcagctttccttctttccatatcttgttcaagtttatcaatcttttcttgtcttttccttttcttccaggcaagaaaagattctagagtgattttggtaacatttggacctagggcagaacgctctctctcaattagatcttctaatgaaatttcatcttctttctcttctttctttttatcttttttcaacacaaatccaggaggaagtgcatgacgatacatgcaaatatcacccctccagggcatacccaaaaccagccatacttgttgtt

SEQ ID NO: 46357 - DNA, 1205 bp, Homo sapiens
caaacacatataattcctccaagaaatttcccagatgtcctcatgctgcataggggcaggagcctgaaaagctaatttgagaagataataagtaggatttttgttttgttttgcattttgcagtacaaaggagaaatgattagaacttaggaagtgccagtgggttggtgaacatgccatcagtaaaagccctggaaacaaggtcatactagagattggttgtgccttgtcacaactgcaaacaatacctgagtggagtattcaaaaacttgcttagaaagaaaactctaggaacagatggcttcactgaagttattccaaatatttaagaaataataccaggcttttataaacttttctagaagaaaaaagatggaacttttccaattcagtttttgaggccagtacaaccttgataacaaaacctaaaaaaaaaacaacaaaaaaacccataaagctatagaccaaagtctcatagatttagatgcaaaatcctaaaattgaaaaaaaaagtctagtcatatccataaactgtatcatcaccaagagatgtttattagggcaatcaaaagatttattattttaaaaaaatcagtgtggacttccattcctctttcttttgattcccccctttgacttttcatgtatctctcctgccttccttccccagagtggaggagttagacctgcattgtgggatgagaggagttgtggctatgtgtctgctggcaccaagagggctgagggtgaggtgtggaagggacagggggaggagatgggcagcattgttaagagattggtaccactgagcaaatatgttgagaatgatgatggcaaggtttctccctgttagagaaggtatttgtagaaataggaatgaggagagctagaaaacctggagtgtggcattagaatagaactcatatcttttaaatatataggaacaaataaataaattgttgggtgtgcccatatacatatattttgtgattcattctaccgagaggacataaatgcagtcacagctcagtaacagtaaacacaccaactgccaagttattatttcctaaatactatccacaaaaaaggggaccagggatgattcctagtcagagattgggagaaatacaagatgagcctgaatcatctcatgtacctgacagtaagaaaaatactctggctggtctcagtgggcttcatgtctg

SEQ ID NO: 46358 - DNA, 3201 bp, Homo sapiens
aatatcacaatgtgtaatgccaccatttattacttctttactacattaaaaaagtgaccctgtttctagagaccaaacagcaccacagaggcattcttggaagagaattccttttgttcccaagcctttgtgactgactttaaatcctctcacctgcagaacagagatggcttcaaagtggggagtgagggagtgagcgaggaccctgggctgagacctgtttttcttccatttctgctgtggcttcccacagctccctggttccacaccaggccctgctctgccgcaggaaaatggattcccaggccacagagctgtcaggcctttgactttgcagagaccaagcaccccagaggctgtgcgaacagcggctagtccctggtgggccggtctggggcatggggggcagggagactgggagatggggagggcgtggagaatccggggggtcctggatactgacaaaatggctcaggtctgagctctggctgccccactgattgtgtggcttggccaaggtgcaagtctctcggcctgcttcctctgaaacaggagtggcaatcctggccgacagccctggtggcaccccctccccactgaaggcagagaacatgtgggaaatagtctaactcaggccctgggctgggctggcccgacccttctcctatgcctcccagggtactgtgtctcaaagaacctcttccctcctggaaccattttccactcctctttctttcaaacaagtcccccagcctgactcacaacccctgcttgctaccctcagccggcagaggcccctcatcagtggtaaagacagttcatctcagctgcctgccagcctatggtcttcacagcaccagaaggaaaatgcaaggcaggcaccagctcaccctgggctcaggcctgacgacagcggcccctgcctcagcccaccggggccagtcctcacctctcccgcacgcctggctctggggaagcccaggccgccatcctctggcagttccaggtctcttagaccacttccccctggctcctttccacctggcctgccccttctgtggccatcccaggccccagatgctcccctggtcctcctggaatgtttacaacagatgacacaaccaaggcaggtcccaggggtggggcccagggacagatacggacaccagcctgggttccactctggatacaggagcacagggctgagaggctggagaagtggagggctactgtcccgaggtgagggaggtgatggtgggaggaggggtgggcttgggacagcagggtctgctgggcctgcaacactcagggttcacagggcgcctcttcctgctctgtaggaggctgctggggaggctcgggcggcttgcaggcccactgcggtttctatacctggccctctgctctgagaaagggcgatggtcctggctgaggccatctgggaggaagtggccttcagcttcccgggtggtgacaaggtatgaaccacaggtccagtctgcactcacacactctactgcccggagagccatgggacagagtctgctgtgggcagaggatggggcacctgctggccgttgtggcacaggcagatgttaggaaaaggctggaccctgtcctgccccatgccaggccctgcttgggctgcattcctccggctgccctacggtgctgtcaccacgctctgctcgccatggtccacgctccagaggcggtaaaactcagcaaagtccacatagggctcaacacgaccgtcctcgccaggcgggagcgagtgggcgggccgggagcggaagaggcctccgtcagagctggagctgctgctctgcgtgtgcgtgttggtggactgcagggttaaggtcgggctttggttggtgagggtgggggtggcttcgtccagggtggaagcactgtgagccccgttgaccatctggccctgggagggcatgacaagggagagggtcacgctggtcttgctggtgctctgggcgctggagtatggcacagacacagggtacactcgtcctcctgcagctggggctgggctcggtgtgggctggctcatttcgcccagcgggtagccaaagttcctcactagcagggtcatgtcctcgtgccgggggcagaacctggcacgctccccaccactggcgaaggtgtcgctgtggatgcgcttcacccggtccacgacggcctgggccactgcgtccagggaggtctgcttggcaaactcagtgtcaatcatcgcagcaatctcctggttggcctgcccaggcccatgggctgccctctagggccttgtacaacccctccgacatcagcaccaagaagcccgtcaccccatccagcggctgtgcccccatggatttctggctctgcgatgattggtttggacttggcagcgctgagaaggtcaatgtccgtgtagccatatttaaccttgtaatccccgatccgccgggtgctctcctgcccacagatgatccccacctgcttgatctttccagcatccaagcccagctgcgaaagacggaagagctcatcctcgttctctgtggtgtggtccacgttcagctgtgtcacctgcaacccatccactgtcgatttgcataaaagtgcacggtttgtaccgacattggcgacgtagagcttgttgttgagaaggaccgccacaacggccatggcccctcccgaaatttccctctctaacgtcttgagtctctcaaggatcttctgatactgaggaggcagctggtgctgagggactccctctggcaattgcgactggaggcttgccttctcagccaaggcgtcgtcaatggactccaggaagctcctctccaccacatcgaaggcctgcagcagcacacgccgcacatcggcctcggcgtgctcggcattcagctggcccagcaggagctcctgcggacagccgctgggccacgaagttggtcactcggttgccatcatagccgttgaagaccccatacaggaagcagttgttctcactcctgaacttgagccagctgtcctctggcgggtggctctcagtgcccttgccatcagcagagtagctgcggttggaggctgagccaaccccagagaggtggcagagaggcaggtcatctgtccagcttggctgctgctcactctgcagcaagctcctcctctgcgccgccatcttggaggaaccctgcgggc

SEQ ID NO: 46359 - DNA, 748 bp, Homo sapiens
cggaggcggaggcagaggtggaggcgctttgaaagaagcttaagtgaaaatgatacatgttagaagacatgaaacaaggagaaattctaaagagtcacgtgcctgagcagaaatctcgagttgattggaggcgaactaaaagaagtagtatctcacaattacttgatagtgatgaagagcttgatagtgaagaatttgatagtgatgaagagcttgatagtgatgaaagttttgaaaatgatgaagagcttgatagtaacaagggacctgattgtaataaaacaccaggaagctgaaagagagctcaacttaagtaaaattcaaagtgaaggaaatgactgtaagtgtctcattaactctggcaacggttcaacatatgaagaagaaacgaacaaaatcaatcataggaatattgacttacaagatcaggaaaaacatttaagtcaagaggataatgatctcaacaaacaaactggacaaataatagaggatgatcaggaaaaacatttaagtcaagaggataatgatctcaacaaacaaactggacaaataatagaggatgatttagaagaagaagacatcaagcgaggaaaaagaaaaaggctatcctctgtgatgtgtgacagtgatgagagtgatgacagcgatatcctagttagaaaagtaggtgttaaacgtccccgtagagtggttgaagatgaaggttcttcagtggaaatggagcaaaagactcctgaaaaaacattag

SEQ ID NO: 46360 - DNA, 1850 bp, Homo sapiens
caactgagaaggtcgctgtcaagatggagtttccaacccagtaaatccaagggccagaccgtgacctcataaagcatgatctccttctgtccagactgtggcaaaagtatccaagcggcattcaaattctgcccctactgtggaaattctttgcctgtagaggagcatgtagggtcccagacctttgtcaatccacatgtgtcatccttccaaggctcaaagagagggctgaactccagttttgaaacctctcctaagaaagtgaaatggtccagcaccgtcacctctccccgattatccctcttctcagatgggtgacagttctgaagtctgaaggatactcttgagttcctctgaggagatccaaagggttccgggagcagacccccaacccccaaaagcagccctcagaagaccaggaagagccctcaggtgaccaggggtagccctcagaagaccagctgtagccctcagaagaccaggcagagccctcagacgctgaagcggagccgagtgaccacctcacttgaagctttgcccacagggacagtgctgacagacaagagtgggcgacagtggaagctgaagtccttccagaccagggacaaccagggcattctctatgaagctgcacccacctccaccctcacctgtgactcaggaccacagaagcaaaagttctcactcaaactggatgccaaggatgggcgcttgttcaatgagcagaacttcttccagcgggccgccaagcctctgcaagtcaacaagtggaagaagctgtactcgaccccactgctggccatccctacctgcatgggtttcggtgttcaccaggacaaatacaggttcttggtgttacccagcctgggggaggagccttcagtcggccctggatgtcagcccaaagcatgtgctgtcagagaggtctgtgctgcaggtggcctgccggctgctggatgccctggagttcctccatgagaatgagtatgttcatggaaatgtgacagctgaaaatatctttgtggatccagaggaccagagtcaggtgactttggcaggctatggcttcgccttccgctattgcccaagtggcaaacacgtggcctacgtggaaggcagcaggagccctcacgagggggaccttgagttcattagcatggacctgcacaagggatgcgggccctcccgccgcagcgacctccagagcctgggctactgcatgctgaagtggctctacgggtttctgccatggacaaattgccttcccaacactgaggacatcatgaagcaaaaacagaagtttgttgataagccggggcccttccgtgggacctgcggtcactggatcaggccctcagagaccctgcagaagtacctgaaggtggtgatggccctcacgtatgaggagaagccgccctacgccatgctgaggaacaacctagaagctttgctgcaggatctgcgtgtgtctccatatgaccccattggcctcccgatggtgccctaggtggaatccagaactttccatttgcagtgtgcaacagaaaaaaaaaaatgaagtaatgtgactcaaggcctgctgtttaatcacagataagcttctagaacaagccctggaatgtgcattcctgccactggtttcaggatactcatcagtcctgattagcctcccggagggccccagtttccctcccgtgaatgtgaagttccccatcttggtggcctgcccttcagccagtgtcctagcaaagctggatggggttgggccggcccacaggggggacccctcctacccttgactcctctgtgctttggtaataaattgttttaccagaaaaaaaaaaaaagat

SEQ ID NO: 46361 - DNA, 675 bp, Homo sapiens
ttcccgagctggcggggtccgtggtgcgggatcgagattgcgggctatggcgccgaagtttttcgtcagtactgggatatccccgatggcaccgattgccaccgcaaagcctacagcaccaccagtattgccagcgtcgctgtaagggactgaaggttggagaagcatattaactgctccagggtcatttgaagctgggctgcaagtccaggtcggctgacctgctcctaggggtctctgaagcaaggaatgttcccatcaggcctgaccgccgctgcctacagagtcacactcaatcctccgggcaccttccttgaaaggagtggctaaggttggacaatacacgttcactgcagctgctgtcggggccgtgtttggcctcaccacctgcatcagcgcccatgtccgcgagaagcccgacgaccccctgaactacttcctcgggtggctgcgccggaggcctgactctgggagcacgcacgcacaactacgggattggcgccgccgcctgcgtgtactttggcatagcggcctccctggtcaagatgggccggctggagggctgggaggtgtttgcaaaacccaaggtgtgagccctgtgcctgccgggacctccagcctgcagaatgcgtccagaaataaattctgtgtctgtgtgtgaaaaaaaaaaaaaaa

SEQ ID NO: 46362 - DNA, 812 bp, Homo sapiens
ggcaatttcttgggcatttacccatgccagaaggctaacctggggggaggggggccgcttgtgctggtgaggcacttggatacatactgatgctgcaagttcaggggatttttcttactcttaggtttaaccaagaacactgagcagggaaaaaccctgcctttcctaactgcatgtattttttcctttttggaaaggtggtagagactcagaagctttccttgttttcttcaggcctgctcccagttttcttaacagtttcttttgttgctttctctctcccttgttgctttccatggcagtaatcctcctagagtccaagcagtctgttgtatggagcagggtgtgtgggttttctgggcccatcattatggctgcttcagagtcagaagaaagccatagggcagtaaggggagctccctattgcctagcccctctccctttggtgggctcccactctagctgcctatttttgctcatcagctgggtgaagtcagtatgggccacaagttctccctccctaagcccttgctactttatgggttagctttgcaggtttggtggcttgaggggtgggggcaactcaccactgccaggtaactccctgaagggtgggagtggattatcttctaggctcttacccgcggtagggaaagggcatcaacactgtcttccttccattctcctttcccccatcccatttaagtgctgcccacagggcagaaagcacacaaaccaaccacacagtctctgacttctcctaagcactttgagttgttgaatggggctcaggggcaagagtttttgctgcc

SEQ ID NO: 46363 - DNA, 1293 bp, Homo sapiens
ctaaacaagtccctaagtttccttattttaatttactgtgactagatttgaagcaaataaatactccagatccatgcagctagaacacacttgcttccactactaaatatacagggtatgtcctaacatggagttaactggaatagcagtacactagcaagtatctgtgaatccttagcactgacgggttaacagaaatgctttggtaatacctacttagttaattggaggaagtagtaaataaacattaggtaatctgcagattacttcaaatgggaaaaatctttttgtagactctatagtaccctctctattcactagcttctgaaaagggaggagtatttttagtttgacaatttaataatttaaaaacaagacatctccaggtaggaaaaaatgaaagctatttcatgcaaacattatctaatttagcttaaaagtgaaagtggtaatactgttggtttctgtaaatgttgcagggttttaaactttataattactttaatatttttgataactagaaatctagtattgccataaaggaaactaagtgcccatcaaagatttgtttggtataaataaagaattatttgttttgttttcaatgacagtaagctacaaatcatgatgcttaaaaactttctaaagatgaattgtgtggcagtgattggtctgtttgtggagaatgtattgaaagctattaatattctagaatagattaataaattggctatgttgttccaatgaatgtacagcacttccattaacttttgcaaagcaacacagccttaaactcaatgcttttgctttatgacatgggaatgtctgtcatcaatggagtgtattcttgtaataaaattctttatatcgttctcaattctatagactttcaagcctatgtatgaatatgaaggggttttttttttttgctttgttttctttttagattttgtacattccatctttataggtctgtttcatatgttttatgtatagaacactaagtcttgcactctctgacattgatactgatatattctcgtcatttgttcttttatgaatcaaaatgttgactgcctatttaaagaaaagaatgaacgctgtgcatcaaagtgtttgtatgttcgtagctacatacgtaccacagtattttggatgctttagtctacaatgaaactttcaattaattctgtcttgaaacataggagaaacaggattcatgtgtatctctttaccatgcacaaaatctcaaatcattataataaagcttgttttctccaaaaaaaaaaaaaa

SEQ ID NO: 46364 - DNA, 399 bp, Homo sapiens
tagggaatttggccctcgaggccaagaattcggcacgagcgtttctgtggtattcttgccaacaatgtataatctcaatcatgagaaaatatctgacaaactccatttgtgggacatttgacagagtttctgacaagtttcaggtcaagaaaggcaaggaaagactgaggtgctgtcacagactacaagagactaaggagaaggaaccactaaatggaatatgtgattctagataggattgtagaataaaaaaaggacattagtgaaaaagcaggaaattccaataccatctttgttttagttaatcatgctgtatccaagttaatatcctggtgtgatcattgtactatggctgtgtaagaggttaacgttagtggtgtaagctgagaggtatatgca

SEQ ID NO: 46365 - DNA, 432 bp, Homo sapiens; identical to SEQ ID NO: 16851

SEQ ID NO: 46366 - DNA, 1307 bp, Homo sapiens
tttttttttttttttttttagagatttcccttttatacatattgcaacaagttctccataaaacattcatctgaaataaattaaaaagtccttttgccactgcctccaaacataaaaaggagcctgtgccctagccccagcccgggccacccatggccttgattgtccatggaagaaagttaaggattgaggggcccacagcctggagatgagagggccagatccttcctctgaagtctccaacaagaaacggcgaggtgacggcatgagcctggggagatggcagccaactccttgagaaattcagggaaaatgactgcacagtagacagcattcttgactcgaagagcctcaccttggcgttcaggggccccgcccggggtgagtagaactggagttgaagccccaggggagcccccacttaggccaagtcctgctccgtctcgcccaggctgaaggaccaattgtgccgcctgccgggccctggttggactgtgtgcatgccgcaggagtaactcccccaaggatggcctccggctcttcactaggggatcagaacggcgtggggcaggtcctgctgcagggccctcagcccagtccaacttgccacgggcaatgaggtacttcttggctttggacagcagtgctgggaagtcctcctgggaagccgcaaagttctcaatcttattcttcacagagcccagcacctgcagcagggacttgacactgggctggaagaccatgttggtgttgagcaggaaagagcggagcaggggctgggggtgacaggccagctgggcccaccagccccgtcagcaggaagttgacatagacggagttctgcagcatgttctcgagtttggcaaagagcacagccatgaaggggcctgggttgggggggaggtgggcacaaggatacaaagcctgaacacaatgcacatcgcacgcattcctccccaaaacaagagacccccaccagatgaaaagtatttgtatgtcagcctctgggtatgtttaaatatcccgtggccaccgtattctggaggaaataagatggcagacaccatatggacccacaagattccagatgccagctttacacacattcaagctgacaagccagatcttaggctctggactctgaaagatctggtttcagctgctttgccctttactagtttggacaggtcaaaattgtccaagccttagtttcctagttcgtaaaataggaaaatatacctacctcataaggtgatgaagaggatcaaagagttatcaatataaagcatttagcctcagatcttggc

SEQ ID NO: 46367 - DNA, 1309 bp, Homo sapiens
ggtgcgactaaccacaaattgtggtgctttttgtatattttatgtataaatcacaaagttgaattctgactatttttaagacaaaagtctgttaaacttttttattgtaaagaatattttgttatattcaaacatgagtacatttcaacagtcttttgcaataaataccataaaataatagagattcgcataataaatattctttacaataaaaaagtttaacagacttttgtcttaaaaatagtcagaattcaactttgtgatttatacataaaatatacaaaaagcaccacaatttgtggttaaggcaaggaaaacacagaagagattagaattactcagctgttaactatccaaggggccaaaaggaccattaaggagccaagatcactttaggcagcatagttctgtgacacatatagattgatcagctataaatatcaacttgagttatccaagtgccctcaatgacaacaaaaatttggtgagaagcatggggtgaagaaggaaggtggctgagtccttcacaaatacgaaggctagagtgaagatgggcaaggtccaaccaatattatctcccaatgtgaagatttacattgtaaggcgaatctaaaattacatagaaagaaaaaatacacttggcatctccagagtaagacaacaacaaaactgagggggaaagaaccttgaaggagaaagaaggagagggcagtggttaaaggaaaatttttacgttatagcaaaaaatatatcccccatgctacttaaggggcctatgctaggaagatagccctaactggagacagatttaatacatagcttatttaagcaattaaacagttgctttttaaaaaaccaatttccctgctcccacggtacccaatcaaaacaactctaaatcactgtagtctggatgtgggtgtatgttcatgtacacaactttagaaagttgcttgcagaacaaaaaggctacacaaaagcccactggctctcaataccctcaagtggatggcagaggctcttgttgaaagtgggagccaggtgcagcttcccagtccactcttgctgaagatcatccatgaggaaagagaaaaatccatgagttagaccttggcaacaggggaagagaaggtgggaaacagggaaaaattctaaagaaaacaaaaacaaaaacaaaaacaaaaaacagccacaacttgaaagctagaagttcaggaggtacaacccacctccaaaaatcatgatggtttaccctgaccccgggaggggcagctctccagcttacaatagacagtgttggagttcttac

SEQ ID NO: 46368 - DNA, 1356 bp, Homo sapiens
tttttttttttttttatacccaacatccattgatctttatttgatttgacaaaatctgcatttttaaaagacaggtaacaaaatctgaggttatactgaatctgacaaattgagttctatagtatctagaatatcatataagaaatatcaactgagggaaaagagaagtaccacatgcagatgctcctggcaaggggggaactgtatctgcaggtgaggtccagagtgtgcagtgcataagaaaatcctacagaaaatgccgttaacttacttggatgaaatgtttttcctttgagggggaggaagaggtggtaaagaggggcaggaattcaaaggcatatgcagaatggcttctccatttcaaaatggtaataaaaatatttaaatcatggcactagggcacctttgaggaaaagaacatcttaaccagagtaggctcattgcataattctttagtaatatgtacaattttcaagtaattaagcagacttaaaggataattttggttttaacagcagctatctatttttcttctcccccctctggggcttgatctgtttcagcatcacagggacacttttccacacattttctagggaacccaaccccttattcttgaaacaccttctataaaggaatcatcaagaattttgtctccatataaccagtatcgtaaacctcttgtggctaaaatgaattcccctttttgcagctgtattcgaggctcttcggtgcagggacttgtgaagaaggttttgattcctttattcagagggcagcaggcaccactataatcttctattactttatagcgaacacttctgactctcttatctgctttttgtttcaactgttctattgttaagctgtattggtgacagccttctcttactggccactcaagtccatctccttcagggacccctgaccacgtaaatacctgtttaaagttcctccatctacttcccccatatccatatggaaaaacaaagacttcatctagttgataatactgaaatccggatcctttagcccttcctccttccaatcccatgaactcaaatagaagttttgtttcctgaagaaattattttccatcccgaatgaataaagctgtgtgtacatagtcatcacaaaaatgaaagcagcatggatacaacccagtggtgctaaaaggagaaacagtgtgaacgaagcatgattttggtaaccacaacagttgttgatccaaggacagtgatggtccatcttcatcacacatctgttacactttctgcagtgatgtgaacgtggtgccttgtatgcttggcagactttacaatactggagatacatggtatcctgagaaattctcgg

SEQ ID NO: 46369 - DNA, 376 bp, Homo sapiens
cggacgcgtgggttcagaaaagaagagccagaaggatggaaattacttcagaaagatgaataccagctttgaaggaataaaagctgacgaggaattgaaggagttgaggcacgagcttgaacagggttgcatgtttggcccttgattgtaaatgcccattgctgcacctgttcctgttacttggggagttgcagcagaaggaacagcggcctgggactccagagaactgggttccctctcatccctccagggccaccacttcttgtgggcccttgggcaagtcactgtactttctgagtctcagtttccccatttgcagaatggaaataactaccccggtctaccaacttagaagaattgctttgaggatctgata

SEQ ID NO: 46370 - DNA, 300 bp, Homo sapiens
cagctatgacatgattacgaatttaatacgactcactatagggaatttggccctcgaggccaagaattcggcacgagtttctaatgcatcagaggagcttacaataagttagaaggctcaattagtgaaaaaaaaggtgatgttgactaaaggagaccatttttataattctgagtgtattataaccattaatcagtgttaataaataaccatctatagcagagggctttagaaaacttacattgataaatagataagaataatggctgttctctgggagcttttctttttttttttttt

SEQ ID NO: 46371 - DNA, 923 bp, Homo sapiens
ctttcagcctggtgtggggtgagtggtacccaacgggccggggcgccgcgtccgcaggaagaggcgcggcggtgcaggcttgtaaacatataacataaaaatggcttccaaaagagctctggtcatcctggctaaaggagcagaggaaatggagacggtcatccctgtagatgtcatgaggcgagctgggattaaggtcaccgttgcaggcctggctggaaaagacccagtacagtgtagccgtgatgtggtcatttgtcctgatgccagccttgaagatgcaaaaaaagagggaccatatgatgtggtggttctaccaggaggtaatctgggcgcacagaatttatctgagtctgctgctgtgaaggagatactgaaggagcaggaaaaccggaagggcctgatagccgccatctgtgcaggtcctactgctctgttggctcatgaaataggttttggaagtaaagttacaacacaccctcttgcttaaagacaaaatgatgaatggaggtcattacacctactctgagaatcgtgtggaaaaagacggcctgattcttacaagccgggggcctgggaccagcttcgagtttgcgcttgcaattgttgaagccctgaatggcaaggaggtggcggctcaagtgaaggctccacttgttcttaaagactagagcagcgaactgcgacgatcacttagagaaacaggccgttaggaatccattctcactgtgttcgctctaaacaaaacagtggtaggttaatgtgttcagaagtcgctgtccttactacttttgcggaagtatggaagtcacaactacacagagatttctcagcctacaaattgtgtctatacatttctaagccttgtttgcagaataaacagggcatttagcaaactaaaaaaaaaaaaaaaaaaactcgag

SEQ ID NO: 46372 - DNA, 2408 bp, Homo sapiens
  misc_feature (1)...(2408): n = a,t,c or g
ctgagagaatttctaaagtaggctcatcacttttttttaaatatcattttgggaagggaagacagggttaaggaactttatttaaaaaaaaaatatttttttcctaaaaactataaaagaggaagggtttcttgtcccgggaagcaacggacataatctgttcccagccatggccttccagcttgtgtccctgattcagggagctctcccttcctcctcctcctcctcctccggaggtgggatcccagagcctgccagtggaggcttatctgttgggaggaagacagctcttcacagaagcaaagaacaaaatggcatggagatcagctgcctgagcacctgcgctgtagcttatctgacaacgctgaggccacgagctcctgggtagctgtgatcagggacatgataatctgagctatgcagaggagcacatctgttgtcaactgctgtacccagaaatctagaactctgccgacagcctctcctggtgagtcgggactcagctgaggacacatccccaccctgcctcccatctggccctttggacaactggccctttgtgacagggctgactcaagtgttaggcagggtctcaggcctttgattgctcacccctgctccccaggccctgccctcacttttaccaaaggttctccctcggcgggagggcatctgtgttggaggtgatttgtctgggttcttccttttggttccagaaggaactgtcagtcatcagcatctgcgttgttagcagtcagtaccacccccgccccacaatgacagtcaaggctgacttgttgactgaagcctttttcccagaccccttatttcgaatccccaagcttcagtccctcttgggggtggagacaagaggacatgtgggaagccacggaagcaggttctttatgtcctctcctctgtggctggcaaggctcacctggccttatccacccacttatggaacctcaggagaggagggctcctcctaaaggcatgcagcttgcagcccctctttctcacacgtgtgatcctagcgtgagaggtcatcctgcccttgctgaagttagtagtactgtactaagagctctgccctcatgtgaattcctgccctggcgcctcttccctgaggctgaatcaggccctgctgcaaaactccaggcttcccagggttggggaggctgtgggaccaaggtccatgttggtccttccactgggtgcagcaggagctgggtcccgagagcctggcaggtgaaactctgcaggccttccgcctgattattatttattcactcctttcctcaccccaagtgccctgctctccaggtgcctagagtatcctaactcttaggaccagggattgtcttgcaccaagtatgcctacccctggccagtctgaggtctcctagccatagaactgactcctggaagcctggagagaaggtggtgacacccatgggttctcaactgtaaggaaaaaagacaccagacttttgttccctagtgggggaaagcccttagtcttgtacaggagcagcttgctcccaagtccttttggaagctggcagagctatattcctgacagccctgactgccaggtagagcaaaagacattggtgggggtatgtgaagcaaaaggggcaggtgcacacacctccacagtgacctctgtgcacacggttaccaccaactggctggccctcctcctcttccctggcccattgatcatcccttctcacagagggtcatcattatttccaaatattgtttgtctgatgacttcctcttcccagtgcaatttttcccttcctatttcaacctctggttcctgggatgagccataccctggaactggcccacccactgtgtcttccacgtaagggagacctttgcaaagggcatccaaatgggtaggcaggtgacagccgccgtatttattttgcataatattttaatttgtatatttttgtgatttattttggcgttatgagtttgactctcggggagttttgttgttatgactcttgtgtcttttgtcacaaaacaatgatatttgctaaacgatatatggaatttatttttgattggtaataaaaaatcaaatatgtataaatcctggtgaatctacaacttgcctgtttattctgtcagtattcagtatgttgttgagataaaagtggctgtggctggctgtctcttgtgatgggacaagggcaataaaggattctaggaccattcagcagtgaaatgcaatcagaaatgggaatttctaaatatagtcaaggctgtccgtcacaggagtgagagggacgtggctgctggcagacatacaggacagatgtgctcagctgccataagcatgagtccngtgaacagatcccatagggccctggcttgtgagtactggaggg

SEQ ID NO: 46373 - DNA, 596 bp, Homo sapiens
gcgtcgacttttttttttcatgtttataaacactttatttaggtgattacagtgggtaagttcccagctaagtgcacagatagaagcgaggtatttctgggttaatgcaggagccagtgggttacatgggtctgggcactgtggccaaggggcgagtaccaaggtttctgagtcagacccggccagagaccctgcgctgaaggtggactaatgtcctaacactgccagctgctttctcctcacagctggccacaccgcaaggcatctcttcaacagtaaatcatttcagcgatgttaagggaacagacgttaaagaaatggaagctgtgtcctggtgcgcctcagctgttgctgctttataagtcataatagcatgtgaacaagagttttagaatattccagtaacaatgagccacagagcgataaagtctgtgtctttctccctcagtgcctccttgcctgttttctttcatacctgaattcccatctttaagctgtggatcctgatgttgagtctcatgcatacaagaaaagtttttccgatgacaaagtttctgcttccagcattcccatcaacaggcattgtctgcagttga

SEQ ID NO: 46374 - DNA, 1256 bp, Homo sapiens
taaaaatcagatggggactttattgtgatggtggcaggtccaccagcagatgcaaatgtggggtgctgagagtggcaacacaggccaccccaaaccaacttcactccctcccctgtcctcagccagtacagaagccaaatgtagccccagccctagactccagcccaggcagagtccaagggaggggtgtcagggtcagaagtcacagggagcccagtgactatcaaggtggctgagagcaaggctagggtagggatggggcagagaaagggcagggggtgcagccccaggtggcccaaagcaacacagaggagcaagggctggcattcaagtcagcaggtccctggggagaacagatggtgcctggagtcccacatggtggtacaggtgggggagctcttggtggcaggcagcaccccaggaggagtgggactcctgccgaggctgaccccaacttcaaggctgccaagttctgatgggagtgtcctcctccaggaacatctcccagccccggacgagcagagccctggaggagtgggactcctgccctgaggctgaccccagttttggggctgccaggttctgatgggagtgtcctccaggaatgtcttcaggcccccagcgggcagagcccagaagggtctgagggcatgatgggcatcagtgggattttggttgtgccccaggggtgggcagggcccacccgtgagcaaaggccgcaggggtgggggctatgctgccaccaagcccctgggggaggggtgtggaggcggcctctgcatacgcccaggccaaattccaggaaagcgggaccagccgctggaaggggggtgagccccggagcatcaggagatgccccgaggagcacagacaggagaggtgcagctgctggcccagccaggagcccagggcctccctatttgcagttctccttccggaaccctttgtctaggtcgatgtacttggcaggcagggggctgtgggcacagccgccctctccttcaggatgttgtttttgtaatctgtgggaggagaggaggctgaggtccccgctcccaggatgcacttcccagcccgggacggagccgcgcctgtgccctcgtgtcccagcactgcctcacctagctggatgtcctcactcctgtaaagcatctggtcccctgcagccacagcgaaccgcgtccccggtcgccaccgcggatgagcagcgagaagttgccgtcgtcgaagccgaggccgagagctccaggcggccc

SEQ ID NO: 46375 - DNA, 1698 bp, Homo sapiens
tttaagtgtcatgtcatactaaatatttattttctgcagactgacttcggagtaattcttgagccaggaggggagaggttagtgttcaaattgctgagatcttaggtcaaaaagctacagaaaagaaatcactttgaaaaacacaatgactcagaggcagtcaccccttgccagcaattccaagagctgaggaggcttcatgcctcaggacatggtgactagttgagtgaaccagagattgaggcagtggtttttacaggggaagaaacaagccttgggtgtatgggagcaggaaaggagggtgacagactggagaaatgataaaggccattttggaagcccacagggaagtggtcttgggaaacctgaagacactgggatattcagaaggccaaggggatccagcttatcctgttgggcaaggtgctgggagtgaaggcaggtaagccatgtcaagggcctgggaagcaaggggaaaactggaaggggtaccccaggtgaagaagggtatggaatggggtgcagaagtccatggagatgaccggcagatctcagggcggtttctggcacatcagaagttgggcttatgcttcttgagctccaccataaggtggtgaatgttgatgagctcagcccgggcagggagggctcggagctgcggctgggacaggcacccggtggaagcgatgatagagctggatcagctgggtcagcgctccctgaatgatacatggtgcctatttatgaagttggtgaaactccgcattacatcctgactcagagattccactgatgatttccaggaactaccaaagccacggatcagctgagttacccgggcttcttcccctcgaagtcgctcagcctgtccacgctcaatcaaagcctcagcctccttcacaaatgccactaaacccccaaaagggggagacagcaactcttcaatgaattcctgtgtccgagcattgagcagctgctggaagctctcaacctctttgctgtcatctgcagcccgctcctattaccatcagcacacccagcatcatgtcatagttgttgatcagaaacacaagctgctccttccttgaggagaactcagctgccactcggaggacaaaattctccacctccacctgcagctgtcccagcaattgcatggtccgttcattaggaattgtctggttgatactgacaagagcggaggagaactctgcatagcggcgtgtgatatagtggggccgagtatccaacccccctaggcgctgggggtcagtgcttcggacgctctgaacattcatctccaggatcagttcaaaccgtggccatagcaaggcaagcacctgttcccagtacctgtccagggcaggaacatccctctttgctgcaatgttacggaaccggagaacaatgtggatacagagaaaaacagcaatggcatcgtagcagtcagctagataagaatccaggtgtttcagggtcatgctgagtgtacggcccatgacagcatggaacaggtcgtgtgcagctgggccagacacaacaaaaaattcacagatgaaaaggtattcgcggcaggaattgtctaggagggcgtagtgctggctgcggaagagggcctcaaatggatacctctgctctccgcgctgcgctgtgtgaggcaccaggatgggggcctcaagttcagtgggggaggttatc

SEQ ID NO: 46376 - DNA, 1652 bp, Homo sapiens
tttttttttttttagcaatacaaaagataaatatttattcagaacaaaacttttaacaatcaattttacattctaagccacaaggaaatagcaaaacatatagcaaaggaaaagcaaacactaaaagaaaagcagtgtactgtcttttctactggataacacttagttggcccatgacctctcgcttggcctatctcccaagtacattttagagttaacagctcactcataattttgggttaaaatccatctttctcctgagaatcaggagttgcacatgagctccagctagctgcttctctagggttcgtagctattgaggctaaggtgcaaatgtaaacctttggtaaggtttctttacacaggggcacccccatttctcactggtggcaatgaatggggaaggggtagggcctccaaaggacctggcacactgtaatccagaagtggtgccccagggagcaacgaatgcaccctggagtgtggtccttggtccgttccgtatctcccaagtattcagaagcccctccttaaaaaccttctctttctgctccctcctccaggtgatttctcagcattcctctgggctgatcattctggagagatcagactttctgggccctcaagtggttgaggaaattgttgtgaagtgtgagaggtaagtggaatgaagcaccgggcttggggtcaggggactctactataggctggctctggcaccagacagctatgtgattttcacccagtcatttaacctctttgggcctgtttcatctgcctggaaaaccagggaattggtccaaaccaactctcaggttctttccagcaggaatattctagattccatgattctataaaaaatggcttctgagcccaccaaaagagctgtcatgaagtccatgcatctttgtgccataagagaggcccttggcccaccattcagagcttattgattcagattatatacacttctaacaacactggtttcacaaattctcagaccacgtagattaaaagcagcaaattaaatgagggaggggaagagctgcaaaaggtagacactctgatagaagccacagtcaacaatgttttcaattcagcaaacactgatggagtgcctaccacgtgttgggccccgtacctagtgctggggcataaagatgagcaaggcagcccaaagggtgaaaatccaggggaagaaaaggtatggggcggggagggcgggaggggggcaaggagagagagaaaaagtacaagaaacaaaacaaatacccaatagaaaaacgaaaataaaattttaaaagggaggggcaacacatctgcacgctacagttctcccgcagtccgttaattgtgacagagtcacccaattcagaacaggctgaaatggagtaaactcggtttaagaaggcatagagagatgtctcttgtaggttttaaaaagatctccttcaaaaacgataaaaaatggtttaaaaaaaagttttggcacttaagagggataagctggctgtgtgttcaccctggcaggcaggcgggtgtttagtacccggccacgccggttagctgagctgccacggaattgtgcactgctttgggacactgggcaaaggcgtgtcctcgcttgccacagaggttgcacacgatgcctt

SEQ ID NO: 46377 - DNA, 968 bp, Homo sapiens
cagactggtcggcgcaagcgaagggcgggtaccaccgaaggagtgtgtgacttaggcattcagcgcactgcctgacccgaagtaccgacccgagttatgcccaccctccaactttgcgacggaaatgtgtcatctaaagccaggtacaccaggggttggaaaaaccacactaggcaaagaacttgcgtcaaaatcaggactgaaatacattaatgtgggtgatttagctcgagaagagcaattgtatgatggctatgatgaagagtatgactgtcccattttagatgaagacagagtagttgatgagttagataaccaaatgagagaaggtggagttattgttgattaccatggttgtgatttcttccctgaacgctggtttcatatagtttttgtgctgagaacagataccaatgtattgtacgaaagacttgaaacaaggggttataatgagaagaaactaacagacaatattcagtgtgagatttttcaagttctttatgaagaagccacagcatcctacaaggaagaaatcgtgcatcagctgcccagtaataaaccagaagagctagaaaataatgtagatcagatcttgaaatggattgagcagtggatcaaagatcataactcttgacttataaggctagctacttaataatcactcttgttgatatctctgccgacatcatagaaattgttcaagtgtcagtaacactttattaaaatcatgttgcagaaccagcaggtggatagtatataggtttatgcctgtgtttctttttctccatgagaaagctaaacatgaaatataatgaatatagtattattaaggattgagacaaaaactgtgattttaatacttaaattgctaaagaataaataaatctgacaaaatgggtggatatcttttaagtttattacagaaaaaaatgcagatgatctcttaaaataaaactaaagataaagca

SEQ ID NO: 46378 - DNA, 1975 bp, Homo sapiens
cttttaaatattggtcattaaaggacaggagctaagctagcaaagcaaaacatctttagcactttgcagatctcaagcagttaaccaggctctgattcccttccactgttttatgaattaattccagttcttttcatgtatctttgaacctaagattatgaagtaatttccctattagggactagaatgacttcagttttttcatttgataaaaatcagaactgctacctttcccttttttaatgatgcaaaatgtaggatgagtgcattaaggtttgtaagatctttatcattttatgtcattcattgaaaattgaaatgttcattctttttaatgttttcctatttccttttgcctagcatctgactttggtgttttaagttctgtagttccatgacatcattgtttgctgttgtgttacagagagagaaggaacctcacctgtggctcagctcaccccacatccgtttctcattacgtgtaaataaactgtcagagctgatgttacagcttttacagtttaaagcattcccctcgtctctagttccttttttcttgtttacatgttttgggcactttccctcattcaccaccttccagggtttcatagaaaataacttgttacaaaatcagttcaattctaatgtgggaccatagtgggcatggttccataaattagaccccatataggggacactgagctttaaaatcgttgattcctaaactcctatacattaaaaaaattcaggccccaggccccctcaaagcctgagaaaatttaatttgctcttaatttaatgttccaaaactcactcttggaaaaatgcctgttggaaaactacaggtgggtcacatgtgggggctgtctccgtgacactcaggattccagtcagaacctaatcctcatatctattgcctacaaaaatagaccaagaatgttgctgctcttttataatcctttaaatatttaacattcaagttttctttgtcttaaattcagcctcttcctaaaagcaaaaaagaaaaaaaaaacctcacagaattgtgttgagatccaccgctcacacgccgtacaccacccagtggcttcattctggcttagccgcagaggcaagaaagggaccccacttgctcccatgcccacctcaagaaaaaacataaaacaattttttttaaaaaagaaaagaaatctacctcagttgacaggattccacctttagggtttcttcaacttttaagtcttacctgttgagtgtaacttttgtagcatcttgcttttccaagcaagctagtgaggcatgacagagcagaagtctgtaaatgtccctgtgatggacctctttctagcatgttgcagttttatttttaataaattggtaagtgaaatgaacgtaaaggtaattgtgtacgttttagacatgacaatgaaaatttaaaatgtagcttccatacttgtgcataattccaaagtattttattttttatcaatcagtgttaaatagctttttgtacaggcttcaatccatttttcgaagtgtgctgttttttaatgaaagtaactataatcttttcacatcccatggaactgccgtttacacattgcaactttttaaacttaaccatatttttcaaaattaacgtttttggagggagaaaaatccccgcttgctaaatgatactaaaccgttgtttgggctcttataattaggtcctgagattttataaaaatttagtctgtagctttttaggttcttcactagagttggttgtacataaaaataataaagaatataaagtatcccaaaattcttttaaagtctggatttttccgctaatatgtactttagagaatattttgttcatgcatacttccacgttaaattgaaaatgtcttcagcttctcttgggtaaatgtgaaccatttgttttttattgtgcttggggggagaggggtattttaatataatttttgcc

SEQ ID NO: 46379 - DNA, 1497 bp, Homo sapiens
  misc_feature (1)...(1497): n = a,t,c or g
gcttgccaggtatggatcccggagcgcgcagaggagtccctgaggagctagggaccccaaaggcctttcaccgctgcgggccagtcctcagtcagctggagggtgggtcccacggaatcctgttagtttctaccacctcctcccccttctctggagctggtggagcttcagaagtcctgtggagcgtcggctgggatcagtttgtctcgggtgaaaagtaaactttgaaagctttccagagtgttgaatcttccaccagaaaacttgatcacatcaatatctgcagttccaatttcccaaaaagaagaagtagctgattttcagctttctgtggattctttattggaaaaagacaatgaccattcaagaccagatattcaagttcaagccaagagactagcagagaagctaagatgtgatacagtggtgagtgaaatcagtactggtcaaaggactgtaaatttcaaaataaacagagagctcttaacaaagacagtgctacaacaagtaattgaagatggctcaaaatatggattaaaaagtgaacttttctctggacttccccagaagaagattgtggttgaattcagttcacctaatgttgccaaaaaatttcatgttggacatttgcgttctaccatcataggaaattttatagcaaatctcaaagaagctttaggacatcaagtaataagaataaattaccttggcgattggggcatgcagtttggtcttctgggaactggcttccagctgtttggctatgaggaaaaactgcagtccaatcctctacagcatctctttgaagtttatgtacaagttaataaagaagcagcagatgataaaagtgtagcaaaagcagcacaggagttcttccaacgattggaactgggcgatgtgcaagcactttcactgtggcaaaaatttcgggacttgagcattgaagagtacattcgggtttacaagcgtctgggagtatattttgatgaatattcaggagaatcattttatcgtgaaaaatctcaagaggtcttaaagttgctggagagtaaaggactcctactgaaaacaataaaaggaacggctgtagtagatctctctgggaatggcgacccctcctcaatttgtactgtaatgcgaagtgatgggacttctctctatgcaaccagagatcttgcagctgctatagatcgaatggacaagtataattttgatacaatgatatatgtgacagataaaggacaaaaaaagcattttcagcaagtattccaaatgctgaagatcatgggatatgactgggcagaaaggtgccagcacgtgccctttgggagtagtacagggaatgaagactcgaagaggaagatgtcactttcctgggaagatgttttaaatgagattcaattaagggatgctnccagaacatgggctttccaattaagncaactanaaganctccaaggaacccncaaggagacttgcagtggaggggtcggggct

SEQ ID NO: 46380 - DNA, 695 bp, Homo sapiens
gctggggattattagggtgttgaggccaccgcacccagttgggggaacaaagcctttttaacacacgtaagggccctcaaaccgtgggacctctaaggagacctttgaagctttttgagggcaaactttacctttgtggtccccaaatgatggcatttctctttgaaatttattagatactgttatgtcccccaagggtacagggaggggcatcccctcagcctatgggaaccacccaaactaggaggggttattgaccaggaaggaatgaatccaagtgaaggctttctgctcttcgtgttacaaaccagtttcagagttagctttctggggaggtgtgtgtttgtgaaaggaattcaagtgttgcaggacagatgagctcaaggtaaggtagctttggcagcagggctgatactatgaggctgaaacaatccttgtgatgaagtagatcatgcagtgacatacaaagaccaaggattatgtatatttttatatctctgtggttttgaaactttagtacttagaattttggccttctgcactactcttttgctcttacgaacataatggactcttaagaatggaaagggatgacatttacctatgtgtgctgcctcattcctggtgaagcaactgctacttgttctctatgcctctaaaatgatgctgttttctctgctaaaggtaaaaaaaaa

SEQ ID NO: 46381 - DNA, 2263 bp, Homo sapiens
gggcaccttctgcctgcatcctggtgggcagacccagttctttcattgcagtcaacttgttcacaggggaaaccctgtggaaccacagcagcagcttcagcgggaatgcgtccatcctgagccctctgctgcaggtgcctgatgtggacggcgatggggccccagacctgctggttctcacccaggagcgggaggaggttagtggccacctctactccggcagcaccgggcaccagattggcctcagaggcagccttggtgtggacggggaaagtggcttcctccttcacgtcaccaggacaggtgcccactacatcctctttccctgcgcaaagctccctctgcggctgctctgtgaagggtctctacgagaaggtgaccgggagcggcggcccgttcaagagtgacccgcactgggagagcatgctcaatgccaccacccgcaggattgctttcccacagctctggagcagtgcgctacctgatgcatgtcccagggaacgccggtgcagatgtgcttcttgtgggctcagaggccttcgtgctgctggacgggcaggagctgacgcctcgctggacacccaaggcagcccatgtcctgagaaaacccatcttcggccgctacaaaccagacaccttggctgtagccgttgaaaacggaactggcaccgacagacagatcctgtttctggaccttggcactggagccgtcctgtgtagcctagccctcccgagcctccctgggggtccactgtccgccagcctgccgaccgcagaccaccgctcagccttcttcttctggggcctccacgagctggggagcaccagcgagacggagaccggggaggcccggcacagcctgtacatgttccaccccaccctgccgcgcgtgctgctggagctggccaatgtctctacccacattgtcgcctttgacgccgtcctgtttgagccaagccgccacgccgcctacatccttctgacaggcccggcagactcagaggcacccggcctggtctctgtgatcaagcacaaggtgcgggaccttgtcccaagcagcagggtggtccgcctgggtgagggtgggccagacagtgaccaagccatcagggaccggttctcccttctgcggtaccagagtgaggcgtagaggcacgccagccagagcctgtggagagactccgcctgctgacactaaacgtcctgggaagtgggcccttccctgggtctctgcactgactcccccactcctgaccctggtgatggtcgccactgggcagcagcagccttaccagtcctccatgatcacacccagggacctgcatgggtgaggggacaccctgggcctctctcccgcccagcatcctccctgagtccccacacagggcctcactctgcaccccaccagggtcccgctcacaccaggcagccttcatagtggtctccctggccaccttgggcagagctgggtcatgcagcaccccatccttacccggtgccctctccttgccagcttctccccaggccagagcgggccatcgcgtagaaagaaccagggtgtccccgggacaggccgtcccccaccccatcctgtagaagtccattccccttttccctcctgtgctctgtcccccaaggagtcatggaactcagggtactggggcctcaacgggaacctgagacagctccagcttcgcagcccttcccggagctacagggggatcctctagcatggggggtgtgacttggttcctttgaccaggtcctgtgaggaagcctggagcaagggtctcccccagcaggatgggtggggcctgctctggagctgagcccgtggccgctcacaggtgtccttagtggtgttgcagctgtctactggctgcatgtgctgtgaatatcccaaggaactggctgtggaatgcgtgtttgggtcagtctgtgccctctcagtagacactggagctgctctgtccctgaagaggccccgtgccccaggcatggcaagcgcctgcctctccccttccggtgctcacacgcccacgccgtgccacccgatgcaggactcacctctgtgccttgctgctcctgaggcccaagggcagccatggtgctctgtactgctcgggccgcccaggtcacagagcctgagcttcgtagccaaagcagcctgatgacccacccaccaaggaagaaagcagaataaacatttttgcactgcctgaaaaaccccggtggtcaggcgtgagcctaaaaaaaaaaaaaa

SEQ ID NO: 46382 - DNA, 2138 bp, Homo sapiens
gaacgattcacaggacaaacaaacccaatttttaagaagtttatttgaaactcttcctggtcgggtccagtgtgaaatgttactaaaggtcacggaacaatgcttcaacacgttagaacgatcataaatgttgcttctacttttgaggcgcttccctgaaacggtggtgcagcatggggttggccttggggaggcactattagaggctgaaactattgaagaacaacaatctccagtgaactgctttagaaaattatttgtttgtgatgtccttcctctaataattaacaaccatgatgttcgattacctgccaatttattgtataagtacttgaacaaagcagctgaattttatatcaattatgtcactaggtctactcaaatagaaaatcagcatcaaggcgcccaggatacatctgatttaatgtcacctagcaaacgtagctctcagaagtacataatagaagggctgacggaaaaatcatcccagatcgtggacccttgggagaggttgtttaagattttgaatgttgttggaatgagatgtgaatggcagatggataaaggaagacgaagctatggagatattttgcatagaatgaaggatctctgcagatacatgaacaactttgatagtgaagcacatgcaaaatataaaaaccaagtggtgtattccaccatgctggtcttctttaagaatgcattccagtatgtcaacagcatacagccatctctcttccaaggtcctaatgccccgagccaagttccactggttcttcttgaagatgtatcgaatgtgtatggtgatgtagaaattgatcgtaataaacacatccataaaaagaggaaactagctgaaggaagagaaaaaaccatgagttcagacgatgaagactgttcggcgaaaggaagaaatcgtcacattgtagtcaataaagccgaacttgctaactccactgaagtgttagaaagctttaaattggccagggagagctgggagttgctctattccctagaattccttgacaaagaatttacaaggatttgcttggcctggaagacggatacttggctttggttaagaatcttcctcactgatatgatcatctatcagggtcaatataaaaaggcgatagccagcctgcatcacttagcagctctccagggatccatttctcagccacagatcacagggcaggggaccctggagcatcagagggcgctcatccagctggcgacgtgccactttgcgctaggggagtacagaatgacatgtgaaaaagtccttgatttgatgtgctacatggtactccccattcaagatggaggcaaatcccaggaggaaccctcgaaagtaaagcccaaatttagaaaaggttcggatctgaagctcctgccttgtaccagcaaggctatcatgccatactgcctccatttaatgttagcctgttttaagcttagagctttcacagacaacagagacgacatggcattggggcatgtgattgtgttgcttcagcaagagtggccacggggcgagaatcttttcctgaaagctgtcaataaaatttgccaacaaggaaatttccaatatgagaattttttcaattacgttacaaatattgatatgctggaggaatttgcctacttgagaactcaggaaggtgggaaaattcatctggaattactacccaatcaaggaatgctgatcaagcaccacactgtaactcgaggcatcaccaaaggcgtgaaggaggactttcgcctggccatggagcgccaggtctcccgctgtggagagaatctgatggtggttctgcacaggttctgcattaatgagaagatcttgctccttcagactctgacctgagtggagacctttccaccagacacagctcgggcctgtgtaattgtaggagaagacactcagcagtgattgccatggcacagagccgtggtcattgttgctgttacaaagaagaaaaccatctgagttctaactccttggttgcttaaaagtagttcccaagagtctgagaagctatttctatttttaagagtcattttttgtaatttttgtaaaacaaaagtaccaatctgttttgtaaataaaaatcatcctaaaatttgaagttttt

SEQ ID NO: 46383 - DNA, 1368 bp, Homo sapiens
ccaagaatcctaaactccaccactcctcccattccagcttaacactatcagaataatatcccaaattcccagatttttttcttttttacttttttttcttccttttttaagagagacagtgtcttgcctcggtcacctaggctggagtgtagtggcgcaatcgttgctcactacagcctcccaactcccaggctcaaatgagccttccaccttggcctcccaaagtgctaggaccacagggcatgagccactgtgcccagcctagtttcttttctgtatgctttttttacaaaactgtgagccacagaggttgaccacttagccaatttgttgctagaagggagaaaaaaatctccaactaggcctccaggacaaaacatactcaaatttcaaacaggcagttagttttaattaacatacagaagtaattttaggactttcagatttctatgctgactagaacactttgcaggctgaagctgacattattaccaaatacttcatttaagtacatactctgaagtgtcaggcttccagtatatatagcaacgctctgagagacaaactgggctcatatgacggggttgcattttattttcttaacaggtctttaaattgggcagttctgaaattctgtttggtcagttctagatggtacgtcatgtgaatgcaaccaagcactgtagttgaaattgtgttatgccagtactcatatgttgtcttaggtactacgcataatgttaatagctgagatgttaaagaatttgaagtctaaaatataaaagatgaatatacccatattaatcctatgttaagatgctctggaaataaaggccttattcccttacacatgcgatttttgtaagataatatatacacagtatattttaaatgtttgtgtgggtggtctgtgtagttactccccatacaacaaagctgacaaaatttttaatttacacaatgtattctgcattttcaaatgtttatgttgtgtatatagcaaagaaattatcttactgatatgcgttgaccaaatcccatggagaaaagacatctcatttgaggttccccttcctctcatgtgtttgattttttggaaggtgatacagtatgtgggtaaccatgcaaatgtttatgaataactttactgaagtgattccatccgtattctgttctaatacttgtagaatgaccttcatatttatatattttatttctttgtttcaactatccagtgataattcaggaaatgtttcctttttttttttttcttacaaaaactttttatttgtaaaatgtttgtaataatgtaaaggtgaacatgttcaataaaaatcatatattaaaagtttaaaaaaaaaaagaaaa

SEQ ID NO: 46384 - DNA, 1131 bp, Homo sapiens
gcaaagagctcatggtccatgtgggtggattgattcaaatgggatgtgttttccagagcacagaagtgaaacacgtgaccaaggtagaatggatattttcaggacggcgcgcaaaggaggagattgtatttcgttactaccacaaactcaggatgtctgtggagtactcccagagctggggccacttccagaatcgtgtgaacctggtgggggacattttccgcaatgacggttccatcatgcttcaaggagtgagggagtcagatggaggaaactacacctgcagtatccacctagggaacctggtgttcaagaaaaccattgtgctgcatgtcagcccggaagagcctcgaacactggtgaccccggcagccctgaggcctctggtcttgggtggtaatcagttggtgatcattgtgggaattgtctgtgccacaatcctgctgctccctgttctgatattgatcgtgaagaagacctgtggaaataagagttcagtgaattctacagtcttggtgaagaacacgaagaagactaatccagagataaaagaaaaaccctgccattttgaaagatgtgaaggggagaaacacatttactccccaataattgtacgggaggtgatcgaggaagaagaaccaagtgaaaaatcagaggccacctacatgaccatgcacccagtttggccttctctgaggtcagatcggaacaactcacttgaaaaaaagtcaggtgggggaatgccaaaaacacagcaagccttttgagaagaatggagagtcccttcatctcagcagcggtggagactctctcctgtgtgtgtcctgggccactctaccagtgatttcagactcccgctctcccagctgtcctcctgtctcattgtttggtcaatacactgaagatggagaatttggagcctggcagagagactggacagctctggaggaacaggcctgctgaggggaggggagcatggacttggcctctggagtgggacactggccctgggaaccaggctgagctgagtggcctcaaaccccccgttggatcagaccctcctgtgggcagggttcttagtggatgagttactgggaagaatcagagataaaaaccaacccaaatcaaaag

SEQ ID NO: 46385 - DNA, 2139 bp, Homo sapiens
actagttgaaagttttatttttataaaattaacataaaagattgtttaaaaatctgcagttatttacagcagtattgcacaagtaaagtggcaattaccctgtcaaaattcatcagtgcaaaacacaagtaagccagggaaactgcaatacaaatgctacatacgctgggtcctagaaaacaggttatttacagcagtattgcacaagtaaagtggcaattaccctgtcaaaattcatcagtgcaaaacacaagtaagccagggaaactgcaatacaaatgctacatacgctgggtcctagaaaacaggttagtgatggatcagtatacagccagatcagtgctatttataagtgggtacctgatgagttctgatacagtaactagtggtcacagaatctggacataaaacataagagagcttctatagtctgaaattcccaaataaaagtagtcaagttacttaactgggagcttgaggatgcttcttacacacaatgctgtttagagtagaccccaactgatttagcgtcatctgtagacacgtttcccccaccccacgtgtacgtgagtggacacacacaggcaccaggctaaatcagcagggatggcagaaccacctgcatggaaccaccatgaagtctccttaaagctcccataagctttcacatcttgacacccagtccagtggggccccaacctcccctgaaggagatggagtatcagaaggagggcatcgacctgaagaagcaggctgaccaaatgcagtgaccgtatgggtggggcgtggggagggctgtacagttaattagctcctgaagacaagttagtccaacctcaaagcacaggaagttgcacagcaggtgggggaaaacccagctactcacagttgttccacaaggggttagtggcctgaggtggtccttaggcaggagccacctgtcccacccattcacttgtcctgcctggccctagccctgaacaactgcaatgccagcacctctggaagtggcacattttatttcttttctaaacgcctgagttgtcagggataaattttcaatagaaaaatctttcccacctgctgataaatactttggtttttttgttttcctaaagataaagcctggagtcagcaaaatttgcttgcatgataagctagttgctttggaacaaacagaaggttgctgggtatttcttggagtagaattttgtagcctgccagactgagtttctcactggcatcaaacacacacttcatcataagggcggcaaagccccaagaattgaaacccacttgactggaaataccaggacccgaaggtggagagccaccctggaggaccacgtggtctgcaatgagctctccagtcacccccgacaactctcaggagttaacttcatgggacggcaggggagtgggagacagggatgttaatacttttcagaaattaagacattaaataagcagaaaataaatatacaatatttctacaagttacagcattatgaaacagtaggacacatcacacagaaaaagaatctacaatatttacaatccttgattttgaaaaagttgagaaaaacagtgatttttttacttatttatgctgtacaaaattttacaaggtaaaggaaacacaattgcacacagacatttggctcagttgataagtaatatgacctacgaatctaataaatactcacaatatatacattaagaaggggaaacggcagacaattgtattccactatatttttttaatcagaaggaattttaaacttgatttctccgcaacccccacccccaaaattcttgatcaactaaccagttaggaagggcatctgaagaatcactcatgaaactattttgtgtgtgtttattgcgtttctgtgttaagtcacaggacactttttacaaacctcacatagggagaggttgtcaaggcacaaaacctgcagtaagtttccaaaaaggggatttaattattttttctacaaaaatgttttttaaaaaaggtaaaaacgtataccacgggaggcatactttctgcacagaggcatcttgataaccagatacatacagtacagagacatccagtcatcgctttaagtctggtggcaacagccctggtctttt

SEQ ID NO: 46386 - DNA, 780 bp, Homo sapiens
gattacaggacatgaaaaagaactaatgtttgatgccaattttacatttaaggaaggtgaaattgttgaagtggatgaagaaacagcagctatcttgaagaattcaagatttgctcaagattttctgatcagaccaattggagagaagttgccaacatctggaggctgttctgctttggagttaaaggatataatcacagatccatttaagcttgcagaagagtctgacagtatgaagtccagatgtgtccctgatgctgctggaggctgctgtggcacaaagaaaagctgctaaatctatagccaaccaggggaccacagtagtgggcaagagtgatctgcatgttttttaacctgcttttccccactgcgcccggccataaatgaattatttttaagaggcattgattaaagattcacagcaaatcactagttaagcagattttttttctatttcctacttcaaagttctggtgccacatagtggtcagaaatggaacagagaagctgtcttaagccttgttcaagaagcaggaaaggcatcagaagtaacagttggcagagggtctcaggaaaaacatcttccttctgatcttttgcatagcaccttttggaattttcatcatgtttgcttattaaacaaagctcctactgccatcatactaatcatgcaaaaagattgccaaatcatgtttggtaggaggacttttgaggtagcttttgaacaaatgtttttttcttttttctttttttttgcaataaagaaaacaaattaatcat

SEQ ID NO: 46387 - DNA, 1033 bp, Homo sapiens
  misc_feature (1)...(1033): n = a,t,c or g
tttttgagagcacaactccaaatcatcttttattaatataaaaagggcatatttagcaaaagacacacagataaaagagtcactatggctcaggacacaaggcagggaggtgccaggcctgtgcccctgctgggggagaaggaggctcgggacaaagtgggagaagtgctgggaagggctgagcggtaggggccacaaaagttccggtgggcaacactgtcggcaggtcatgggtgggactcatggggacctcgctgctaactcttgttgtgggggggtgtccttagtgctgccacctggagggccactccttggttcctggaggggacccaccaagggacacaggacaggaagcccaggatggttagtgcaactcgggatgaaggccagggagaagcgggtgctctgcagtggccggataggtccagacgctgaggccgaggcgcttcctgttacgtgcgggcgttccgctctgtctctgccaggcactctctgactagggcccgggcatggatgatacctctcttcaggcgctccatggcgctcttgctgccagcataggtaggccggatctctttgcccatctcctctatgactgacagcaggtccgtgtaggtgctctgggagccgatgggcgccgggtggcttcatcgcctgcacgtagcccatggaaggcggtccaaagtcgttaaacagcggtctgaaaggagcgccggctccctggcactgagcccgacggcgacgggacgcttcctgtagggaccggggtgcccggcccaggggtgctggagccaggggtgctgctgggagcaggggcgatgggtttgtaggacatccccaactcctgggcgcggcggacgccagccggccgctcctcgggggttggctgcggggccgctcagccgcgctctgattggcaagcgggctgcacgcccctgctcgtgccgaattcttggcctcgagggccaaattccctatagtgngtcgtattaaacngtcttncncctagcgccggcaagggntcaannnnccc

SEQ ID NO: 46388 - DNA, 1986 bp, Homo sapiens
ggaaacgtcaaaattgggatagtcggcagttctggcccctgcagctggaggtaccctgagttctgagggtcgtagtgctgtttctggtattctcatcgcggtcacctctaccggtgtggacaagtaaagtttgaatcagcttctccatggcctgggcaccagttcccggctgagccattttccttttggctaaaagtccccgcccagaggccaattcgtcgcggcggcggtggagatcgcaggtcgctcaggcttgcagatgggtcaagggttgtggagagtggtcagaaaccagcagctgcaacaagaaggctacagtgagcaaggctacctcaccagagagcagagcaggagaatggctgcgagcaacatttctaacaccaatcatcgtaaacaagtccaagggaggcattgacatattatcatcttttgaaggcaaggaaatcgaaagaacagggaagggtttcattaattttggaaatgttgcctcctgagcttaaggttttaccatcttgtcctacctgaattgcaactgacctttgcttggcttcatgtgtttggcaggaccttgcgaatgatgaacttctctggcaagggttgtgcaaatccacttggggtcactgttccatatacaataagaacccacctttaggattttcttttagaaaattgtatatgcagctggatgaaggcagcctcacctttaatgccaacccagatgagggagtgaactactttatgtccaagggtatcctggggatgattcgccaaaggaaataggcaaagtttatcttctgttacaagaacactaaattgggaaaaaactggaggatcttattcttgatggaagggagagatgtcttggatgaccttgtaacattgcataattttagaaatcagttcttgccaaatgcactgagagaattttttcgtcatatccatgcccctgaagagcgtggagagtatcttgaaactcttataacaaagttctcacatagattctgtgcttgcaaccctgatttaatgcgagaacttggccttagtcctgatgctgtctatgtactgtgctactctttgattctactttccattgacctcactagccctcatgtgaagaataaaatgtcaaaaagggaatttattcgaaatacccgtcgcgctgctcaaaatattagtgaagattttgtagggcatctttatgacaatatctaccttattggccatgtggctgcataaaaagcacaattgctaggacttcagtttttacttcagactaaagctacccaaggacttagcagatatgggggttacatcagtgctggtcattgtagcctgagtatacaatcaagcttcagtgtgcaacctttttttcttttgccattttctattttagtaatttccttggggaactaaataattttgcagaatttttcctaattttgtttatcacgttttgcacaaagcagagccactgtctaacacagctgttaacgaatgataaactgacattatactctaaaagatggtgtatttgtgcattagatttgcctgaaaaactttatccatttccattctttatacaaataccatgtaatgtgtacatatttaactaaagagatttatagtcataattattttattgtaaagattttaactaaagtttttccttttctctcaaactgagttctgaaatttatttgattctgatctgaaactattgtctccgtaaaagttagatctgacttcagacagaaaccaataccagcttccttttcctttaaactttgaagagtgttgatttgttactatattactatgcaaaactggcagttatttttataatataaatttataatttgattttttattttaaaaactgggttaatcaagtctcggtaagtcctttaaaccatttaggatttttaaaacatcaaaatttatgatttacattcataggaataaaataaaatattattagaactctgg

SEQ ID NO: 46389 - DNA, 1698 bp, Homo sapiens
ggttcgtggccgcggtttccccaagcagctggcgctggaggcttcggcgtcacgtgctggtctggatttttctcgatgcactggggaaagcggtggactcttatcgtgggagggctcttgatctgtgatttatagataggcacagctactcccgttcgggaacccaacggcagacaggtcctagtgcccatcagatacccgcggccgggactcggagctgtggggtgtggggaggcggaggcaccaactaagagcgacctaggcatcgcaaagccgccctcggggcgctcatggcgggacgcctcctgggaaaggctttagccgcggtgtctctctctctgggccttggcctctgtgactatcaggtcctcgcggctgccgcggcatccaggcgttcagaaactcgttttcatcttcttggtttcatcttaataccaacgtcatgtctggttctaatggttccaaagaaaattctcacaataaggctcggacgtctccttacccaggttcaaaagttgaacgaagccaggttcctaatgagaaagtgggctggcttgttgagtggcaagactataagcctgtggaatacactgcagtctctgtcttggctggacccaggtgggcagatcctcagattcagtggaaagtaattttttcttcccaagtttaacgaaaaggatgggcatgttgagagaaagagcaagaatggcctgtatgagattgaaaatggaagaccgagaaatcctgcaggacggactggactggtgggccgggggcttttggggcgatggggcccaaatcacgctgcagatcccattataaccagatggaaaagggatagcagtggaaataaaatcatgcatcctgtttctgggaagcatatcttacaatttgttgcaataaaaaggaaagactgtggagaatgggcaatcccaggggggatggtggatccaggagagaagattagtgccacactgaaaagagaatttggtgaggaagctctcaactccttacagaaaaccagtgctgagaagagagaaatagaggaaaagttgcacaaactcttcagccaagaccacctagtgatatataagggatatgttgatgatcctcgaaacactgataatgcatggatggagacagaagctgtgaactaccatgacgaaacaggtgagataatggataatcttatgctagaagctggagatgatgctggaaaagtgaaatgggtggacatcaatgataaactgaagctttatgccagtcactctcaattcatcaaacttgtggctgagaaacgagatgcacactggagcgaggactctgaagctgactgccatgcgttgtagctgatggtctccgtgtaagccaaaggcccacagaggagcatatactgaaaagaaggcagtatcacagaatttatactataaaaagggcagggtaggccacttggcctatttactttcaaaacaatttgcatttagagtgtttcgcatcagaataacatgagtaagatgaactggaacacaaaattttcagctctttggtcaaaaggaatataagtaatcatattttgtatgtattcgatttaagcatggcttaaattaaatttaaacaactaatgctctttgaagaatcataatcagaataaagataaattcttgatcagctataaaaaaaaaaaaaaaaaaaaaaaaa

SEQ ID NO: 46390 - DNA, 405 bp, Homo sapiens
agagagaatgctaacgagctgtgaaatgaccaaagatctggcagcagaagggaaaagaaaaaataatgggaagaagaggatttatctgactcaactggagatggctcccttcccttatttattgttgcatcctgaagcttcccccatgctgggctcagtgtgaacaaacagcgcgggagaatgcaaccactgcagaggcatatgtttgagatacctggccactggaggtcatctcgtctactatattcaccgcagataaagaatgaaaagagaatacacaaccttgtgattgctagcagtgaaagctcagagttatgacataacaaagaggggcttgagcagagagaatgcttagaggctaagcgatgggcaagtgagagggaaagagccgcgacagatagagct

SEQ ID NO: 46391 - DNA, 3804 bp, Homo sapiens
  misc_feature (1)...(3804): n = a,t,c or g
tttttttttaaatacatttattaaccaatgttaacacattaaatgaatctatatattgctagtcagagcagcttacaaaatgccagaatgcatcatagaactggacagccacaatgaataattacaatgtgcatagtggctaagctcaacacctcgatatagctttatgatttgcagaaaatttttaataatgattcctaaaacaatcaattgtaattttacctaaaacttttacaaaaccagggccacaatctctttttttaattttgtttttttttaaacacacagttttcacgctgtagtaacttggaaatgtgcaacccgtgtcaacagagacagaaaagccaaagtaacacgaatctcactttcatgcagctatcagttaaatattacatactctggaatgattttacaccaaaaatatttccacaattacttgctctcataggggtggatcgaagtcttaaaacttgaaaaacaatcaaagaaggttaagtgttctcggttctgacatctccatcagcgccacacactgtggcaacactgactaattacacagcaacaaggagggaacgatgatgccaagttactgcataatttaggtacattgtatgaaatggggctactgggtactttttacaaaatattgtgcaccatttggcagtagtttgtcaattaacttgtgtcaccaccatctgcaacagcatcaagattagatggatgatatttcacagaagacttagttacatttttatctttagagtgaccctgacaaacctggagaatactttttaaaaggcttttctcctgattctttcacttccattgtgagtaattgctttaataaatatcaaaggtctaaataaatatgtacaaattattctctaacctcaaaaaataactaaatgataaatgggaatttgacttggtctaagatcagtctttaaaaataccacataaattgtgagatattttaaaagaaaagtaatttaagttttcctggctgtattttatatatctatgtataaaaaatcattattcaactatcgatccattcctattggtaatgcttcttaatccagacatccccgcaaaataccagaccttttaccaaatccacggcatccttaaataacaagaaaattaacatgcattattcttcattctgtgtacagtgatggagttcattagtaggcaatgaccccattacctacaaacataacggcttctgtgaaacttaagtgctttctcttcttttagtattaacttacgatacatgaggtgacaccagataataggcagtgagatgatatgtgggaagggaagggaagcattaaacaaattcgtatgcctcatctataatttcacatatggataaaggtagtttttggctttgtttttgttgtttattttgttacaagcactcatgttaggacaaagatgaaatgtgcaaactttaaaatttaaatattcattttctctaagatccagctcagtaaaagattacccccagttccctgcaattttaaactacaagatcaaagctaataatttgttataaaagttatatattgaaaagaaataatgaaaaacacaattgggaaatatttaagaaaaaatatgcaggactagccctgctgtgtcaaccctgttccctaaattcaatcatatacccactggtgtgaccaacagataatgcctttgaacagtaaattaagctgaacaaaaccagctcaacaaggttaagaaaaaaatgtcacatcaaggtagtatgttttatttctgaaacagntctgtagttcttacattcagatctattctaaatgtttctttgttaaactcacttgtattcacctgttttttaaagatctgttgtttaaaggttaaaatctctgtaaaacctaaaaatgttttaaaatttgctgaaaatgcaacaaattctcaattaaaatttatttaaaataataccctccactgatgttacttttaccccctgaaaaacttcggaggagcattaacaaaagatttaaactactgtgcaaaatttcttcacgaaaagtgtttaaaggctggtgcaaaatgggaagcaaattctaaacaattttggcttcttggaaacaaaaaccgctgtgtctgaaaagagtaatcatcggggtgactccgggaagggccagcttcatcttttccggcggcaggtgcgcttgtgctccgcgtgccagtgctcctgctggcacttgatggagcagtaggatgtgttccagcagcagtggtacatggcctcctcctcacagttgtagcaccactgcttcttcttggtctgagaaatcagttgcttgtgctgtgttgccagcttcttgatttcttctacaaattcctccttacacttttcctttacttgcttacattttctgtccatctcaccctgcatgttggctacagctttatttacagcttgtctcttttcttcttccatttcagaacgcagcttctccagagcttctcggacaacacgctctgtctcccgcttgtggtccgacttcatccggtctttgaagtcattgaagatcttggtgtatttgtcatggcacatgctctgacacacgccgtcgtttgtggtctgggtgctccgatgcagcattcttggtgaagaggcacttaacttctttgtctgagttgacacggagactttttcgatgggctgaggcatcgtgggtatttcctggctagaacttactgcttctgtttcaggctctggttcttcctttttgggctccacactttgattacgtcgtcctttctttgctcttggttcttgagtgacctttagctgctcattactggtggaggagatactggattctgcctcttcctcacctcggtcctcattcttagatttccaaaatctcccttctcgtaggaaacgctgatgcagctccagctcatcacaggcctttttccaacccatactgcgcttcacgtgcagccgatgaatgttgactgtgatatcttgaatgttttcagaaggaatccaggccctctggtggtggtggccaaagaagcgaacgtcgacttgattgtcttctttctgcatgactttggctggccaaaacccaaaacctttcattttagcccaaaccagctcatgattaggtatacaaggataacagaaccagttgtcaggacgagcatttgacaagtaaaagcaattcttgcaaagctgcagttcatccagctcatgacatgtgtctttatatagcatcctcgcaatgtcagcttgctcactgtctgctccatagaaaatcacggtattgtggagaagcaattgggcatcagctttgaactcttcataacttcggtatttcccttcattcactttctcttgaatggtgggaacgtccacagctgagtgcaccagcctcctgtacatcgggtgtttattgtccttcccctttttattaagatctatagccctctccttcatgcgggagacaatgaatctgaggtatgtgcccatctcctgtttgtttgtattcttcttcttaatgctctattgaaaaaaaaagaataaaaaaaggtacaaaatctgatcattcttatgtctatattcatgtaaaagacatatatgaaacacttagatagtatgcaaagagtttactaaaagtgctctttttccaacatatctgacagaaatctttgacatttgcataaaaaaaacagcatctaatgtaacaaggtgagaactttaaaatattatgttgtacctgatataatatccttacaggattatatattttttcttttctc

SEQ ID NO: 46392 - DNA, 610 bp, Homo sapiens
cggacgcgtgggctcggggcgtctgggcagcctacgctttccggataaaaatggcagaatgaaagaattatgagtggaactagagaataggaaagacatgaaccaacgcccaaaatgagaaagaaggacatataaagaaaaagacaaatacaagtgaaaaaaatagactaatggattaacgtccctgtcgtgtgacattttctgactggaatcagccattttaccaagaaagttgggtttcttttactggcaaatagtacttcaagagcacagtcttatgtaagaagtacagtctatataaagactgtccaggacaaaaactggccactccattcagcattgacagcagtatttaaagctggtgcatgggtgaggtgaagtttctcaagggcaaagacaatgccttcatgcatgttcagtgtcttgcccccgtgggcttttggaaatgatccgctggacaatggggggatctgcagtgacttctctggcctctgcccaaagcccagggggtgctgctccctaaattcttaagggttctaatgagattcagagcaggtgtaacacagggcatggagcttcctgagcaagaggctggctaacaaactggtga

SEQ ID NO: 46393 - DNA, 982 bp, Homo sapiens
gcccataggtagaaaaaaatagcttactggatttatatctgcttcataagagacttttatctgccagcctgacccctcttaaaacttttttttttcttttttggtttgatatactcaataggcactggcttttttttgtgatgtggctttttttgtgatgtggctttccacactattgtagaagtccagaatcccatttaataagatgcatgagctattagtcaatgaactttagggctggatggatcaacgaagtgtttttcactgccccagcttccttatgaaccagattactgaccagcggtgaactacaataaattcgaagacacaactaacaaaaacttaggaaggcctggaagagaggtgccaaactgcactgcaaatacaaaataaaatattttcatgttcttgataaatatttataaaaaaatatacatataatgaataggccattttataatgctagttaaaactttgaagagctgttaaatctgtaggtccatcaatatcctggcttcaaatcaatatgtagaaatatttttaattaaatttcaataaatacaccagagggatttaaatatgataaaaacagtaatttcaatctctgtttttaccaacaatatgtttaattagttcgtgatgggcttgaactaatcaataaactacagtctacaaaaaggtttttgtaaaaatgcattcatttctgataataaataaatgcagattgattctgtacagtcagaaaaaccaggatggtggcaaatagcaaaatagagagatgataaatcttggatccaaaatcaaatgatcaaagaagacagttaaagatattttcagactgcccacattagagtcatgtaatctgcatcattctttctcaaggtctctcaattgggcaccagaataacatcagatctaaaaccttgttcaatatttcctctggttcaccttttgattatgtaacaaatactttttgcaaaag

SEQ ID NO: 46394 - DNA, 1474 bp, Homo sapiens
ttttttttttttttcttctgtagaaaacatttaataatagggaggtgacagggaaaacaaagcaagggcagtgttggggcatcagaccagggcagggctggaactagggagaagcaaccagttaagaggcaggctactacaggtagcaaatggagagccctctcacccagccaactccaagagttcctcttgtcccttgtgctctaccccaaactttagccccagcacctgttcctcatctccagcaaagaacagcagggcaggacctgaactggtctcttttcaggggctgtcttgaagatggctgttttagcagacatgaggctgcccaaaggtttctacaagccacctgcgtggactttgggggttgttgaacacatgccctgataaccatgaattggagacctggatctaaacatgggctagctacccatcctggcatctttggctaatacccttagcttgggtgcccctatctgagaatgatactttggggctgttcaagatcctgtctgaggagcctcacatgggtttccccagttaagttgtaaagttcaccctgccagagaaggttatcaccgcaaaaggcaggacctggtgggctgggctctccatacacttccagctctgactgcctggtataaatgttcctcttgagatggatgtgtgttgaggtggatagtgagagcactgggcggtggctagggatagggcaggcaggatttgctcttggtcacactggagggatgcccagaccacacccgggcactagagcagttctgggatacagtgtctgaatcctcagtggtcactgctctcttggccctgactgtgcaagggaatcacgaacacagagacgtcatcgtaggacacctgcccttcctctgtgagactgtcttcctttccctgtgtgctgtgtatcagcatctgggccagctttgagaacctgtgaagaccatcctgcagatagactgtgtgggtcctcttggttcccagggaggaagtccgcaccagccatgccacctgctcgttggacagtacatcccagagtccatcagttgccatgacaaccacatcatcctcctgtagctccagctggtccacatccagcacagtcacctgtggcacagagagcaagaagggcttgagctggatgtttgtgtccaggactctgagctgatggtctcccaggccccgggagacagccagtgttcctagtaaccgagcctgcctaccctgtccatggatcagtgggtacttgagatccgatttctccacacgtttgtagctccagccactcatgtggtgatccctgaacaaaaccttctgtcccaagtcatcccccttcagccgccgagggaactccagtcgggtgaactcaccagccagaagctcaggatagacaaaggccagctgctggatccgctgccgctcagtctctggggtgaactcgaagctcagtggccgtatctca

SEQ ID NO: 46395 - DNA, 607 bp, Homo sapiens
aaatgcctttcctgaaataatcttggaaaattttttaaatgtcaaaatgatgagtcatgctaatacattgagggtttgtttttttgtttgtttgtttgtttttgagacagagtttcgctcttgttgcccaggctggagtggaatggcccgatctcagctcaccgcaacctccacctcccggattccagcgattctcctgcctcagcctacattaagggttttgtcagacaattgtcacacgaagaatagtgtcacttatctgctcttgacacacagaactggcctggcatatagctttccagattttactcaaacttggtactccagtttgaaaatttaaattttgactgctgattagctggaaagcctagttttaatggaaagaaagtttgcttttaaaactgaaagtagtttctttttgctaacaaatctaacttcatacataattggccatattagtaaaacacctcatgatagcagtgtatatatagtcttgtttgtagttggaagtcatcttttaggagttattctcaaatatatataatagctacccatgcatcattattaaaatccccaaattcaaaaaacctctgatatatatatataa

SEQ ID NO: 46396 - DNA, 1185 bp, Homo sapiens
tttttttttattagaaatgacgttgttactaaaaagccacacaatatctcatttagagaatatgcttaacaaaatatacatcttaaaaattcagcactccagaatgctttttcaggtgtttccatttgagaaataaagaataaaaattggtaataattatagacacaacttcatacaataatctggataatatgcaagaagcatcatgttgactttcagatatttctctttgtggctaacgaaccacacatcaaaggatggaccaaagttcagatgtacacagtccagggcacctccgagcacagtggcagtgcccttggggattttctttccctcagtgagagacacgggggatggggaggagcccaggagtgtcaccagaaagtacacaacccagcttcttacccagcctgctgccatcatcaactatcaaaccatttgctcctctttgcaagaggtgctcctttagaaggtcccaataatttctgcttatattgttcgaccagctggttgaagcgggtttccgtcttatttcccttagcttttttcctagatacctgctcggacgataattgctgcttctcctgcttccactggtttatctgtggctttggctttttgggatggacgggcttcactttgcctttgtcccgcaacctgattttggggcctcggtgtgaggggagcgccaggacctttcttctcttctttccatcaggcagctccacctgctccacttcagccttggtctggaacccggtccatgaggtagagcccgcctttctcttctgctctgggggcaccttgctttgttcctctgtgtggtgttgagctgccttctgttgctggtcttttgcaggctctggttgccccttctgaggctcaccagttgcaggcttggatctcattttttgcaagctgcgctggatccttaattccttcattttaagttttcttcgatcttctaaagagaactccactattggtctcttcagaggcccaaagatttctggattgttgttgatgaggcggagggctttcagggcatgctcgtgctcttggaactccgcaaaggcgtagcccagggactgacccttcatgttgccatgaactcctttgaggtatcgcatcactctacactccttgatgcgcagtcgacgcggccgcgaattcggatcctcgaga

SEQ ID NO: 46397 - DNA, 1174 bp, Homo sapiens
ttgactttttatgttattatttatttcttttaatacaaagctttggcattagcaattttatgaaaaaaataaaatgtactaaaaataaatgcttgtgtggcatgattggtaaatgatgcacaaaaataggttcttttttccttcaaggcaaaatcagtcagaaagcaggttttttcttcttcaaaaccattctacctcattagcattcaagctagctgtggctctgatgatcatgtagcagagtgtgagggcactgaggaggccaaaactggcaataataaaccattcttttgttactgccaatgttgatttctcctgttctcggagtgagctcccccatcctgaggaagaggtgagatccccgaagttcgaagtggctcaaggccaagggagttgtcgccggcgaggtcgccgagggctgatcttcggttaacagcttgggttctggtgagcctttccatatcgaatgctacgttatcagtacatggcaaattcggcacaattcccagggccttcaatatattaagtttgcacataggacaggtacaatgttcactaagccagggatccacgcaggatttgtggaaaacatgcttgcaggggagaattcggacgacatcattctgcttatagctctctatgcagactgcacaatgatcaaagtctgggtcagtttccttgtcacccttctttactgtccctggttgtcaatttactgatggctttcttggctgcatctccgagacgacgctggttcctgtcgccgtgcatttgtgtacctgatcttctgaatgaagtagaatatgagccatgctgaagaaataatcatcaaaacaataaaggatattgacacgaagactagagagccacggctgaagttcttcggtggcattcgagttccaacagctattgtcatttgtacagagatgtttttctccagataactcaaaatatccttacccctcaattctgttatcatgacagcaataatatctccagtgcctggatgagtcatggtaactggctcctctttggatttattattgtagatgactacagcaactgcattgtggaaagcggcccgtgatattttctctttaaacgtgcagtttcccctctgcagcaaggcaatccactgtttgatattaggagggacaaagaaccgggtttgtgc

SEQ ID NO: 46398 - DNA, 2913 bp, Homo sapiens
ccttgacaatctactgtgccactgtgctactaactcttgtttacaaaatttgattctaagttgaattgcttcattcaacacccccaccctccctcccctcgaggtggtacctaagctgtggatttgctaaatgaattaagcaacctagaagatacagagctaatgaattatcaaaatgtgattaatcccagtaaggaaacactcatttagtgtctgtatttttgggtgtgaaaattatttaggttgccagtatattctgaagggaatgtcttcttgatcagtcagataaacttgctttttttttttttttttttcatgaatcatgtttggttcctgtgaaagtccctggtccagggatcctcctcctttctcttttacttctgaattctgaaattcagttagttacttttgcctttcgctcttctatcacagccaccttgaccttgggtaaaacccaaggtctttccttctggctaccttcctgcaggtccaccctgtctgccattggtctcctctgcctctgactacatctgccaccaacaaccctcccctcacccctgccagggcagatcaggcttctcagcagaactgtgactgaaatcagagctgctgtctggggcagtgttaactacacagaggcacatcctgacagggtttgccccagagatctaaattccagaaggagggcaccacacctaggaaggtaaatccagtatcagaaggttgctaaaagattaaagatcaagaagcttggaaacatcccatgggtacaatgtcttagaaagtctttaagtcacataccatgaatttttgcttcattactgaccatatatgaccttggaggaactattttttttttttccttctactcatttctgtttccacctaccctgactcaccgtatttccagtcttctacccctgcagttatcctagtccagcaaagtcatttctttcaaaagagacatcatgtctgaaaataattactggtagtctaatatgagccagagtaaacagctcctcatggtcaatgaacatgttcaggaagcgatcaccttgatgcttgaacccaaccccagacagtggacaattctactttgaaatatccgtgaatatttactgtgggatccaatttaaacttctttcttctctagcctttaaattacacaactttgaactgacacggatctcttacaaagaacaatgcggcactgaaggaagagatgattcctttactcaaacctgcaggaatcagcctattaacaggcaggggaaacggtactttccaatgaatggtaactgatccaggctcattatcacacttcctagtcatctccacctttcctgtattgcctgtggcttgttgtttaagattaagaatcaaagagattaagaagtatcacttcaagtcttgctctgctcacttctatgtttgcagtcaaattattccttatgttggtgacctaaagagaattactttcattcatttcatttcccccgtagcagatggaagtgagaaacctctgagaaaatgaaaacatccttaaccactatctttcccttttatttgattattttatgtcagaaatttgcaaaagtttttttctcctccttctcttccttgttgcttaactttttaattcatgccatatgcagatatccaattatgtgcatcctgtgaataaaccacgtcttggtcactgtcatattttgaaccatctcatcagagatgaataatatctttttaccagagagagaacgaatgttagccacatgcccaagttaacaaagaaaaaatgttctcaaggttgtccttttgggttaaatctggcccttccttgggcaaaagcaaaaattctccctgtgagagctcaacatctcaaatacaaccacaggaaaaatggcccaatctgccagtttagggcttaccagcatataatttttaatatctttacttctatcatcccaaatcaaagaactcttctctattatgtttaatcaattgcaagcaaatagatttttctttgtaacaatttgttctgcagaaggctgtttttcacttttcctttcttttgcttctttctgtctttccttctcttttgtctggagaaatcacttagactctgtgtgcctcttctacattgcattctgctctgctatgttacctgctagggctgggcttctttggactccctatatgattgatgatgtgaaaacctaaattacttgcagcatagtattacttctttgatgttctcattagcataatgttatttttgaaaaggaaagatactatcacataagttttcctcatctgttgtgatatacaccaatggataaactaacggaaactgctttttgacattaaaagacaggagaaattatatttaactaagtaaaagttaagtcagaattacttgggtgatgtgattcaatttagttaaaggatgatatagagaaaatacattatttagcattatttcttcagctataatgaattgctatagaaatcaggcagatctttctaatgtgtattgattggtcttttcagctactctgaacagattactaaggccatctcctcatctctaagggagaaaaatagtctgtagatgaataatgtaaggtaaagagttgcatgtcagtctttgtaattatttacactttaactttctccagaactcagacatgatttcaacatggtgttagatttgtgcattttattttcctgaccacctcattccagccaatgtatggttatccactctgtgtgccaaaaccaatcatgcctttcacggccctttagttcagagaagttctgcactgatttttagtctcttgatgtctcaatcttacatgtataccaatcacaatggaataaagtgttgagttgtactgtgaaaaaaaaaaaaaa

SEQ ID NO: 46399 - DNA, 5209 bp, Homo sapiens
  misc_feature (1)...(5209): n = a,t,c or g
ctgtgacaccagtgacaccgagggccccgtgccggtgaacagcgcggccgtcttgaagaagagccagcgtgccccgggcagctccccctgccgagggcatgtgctgcggaaggccaaggaatgggaattgaagaacgggacctaggggacagcagcaccactccagcctcagagactgcacacccccttgcctgtatcctcatctgtgtgacggcaggaagctctgcccagagtggcctcagctgcacgactccagaggctccacgactgagctctgaggccagtgcctgtcccccaggcccacttgtattctttctactgtaaaatggcgcctttaaaaaagatgtaagactttggttcccaactttgttaaaaaacaaaaaaagtgatggaaaggtgtttgaaaggatgctatcaggcgacgtgacatctttctaaccagacaggccattgctttcaccgattccaacccagccctggactgaggatggatggttccatgagcccccagatgaaaacctggattcgacagggaagagcttggatccccggctgccccgggcatgagtgtggctggcgcatgggcactgggctcgccttgcacgcccaccaggagggccaggggcatacgcagtcctgacgtggactttgtgtcttggagtaccctctccacgtgcccgtccccctcgtcatcagaggtaaaggcatgagaaaatcgcgctgtgaaacgttttttaccttttattattattttttggacagatgcttttgtcaccaagacatgaaaagctgccattcttcttaacctgttttttaagaatgtctttttactgtgtgtcacacttagatcaaggagttttcagaggttccttattttattaattatttgtgctgcttttgacaggtagcagagggttttaatacttcactaacagtacaccctcctcccccttgggctagcatccccagcccttaatccacgtcggagccggcaggtgcttctcacaccaggagcctctgggggcaggggctggctcctcgccgctgtacaggacgtttactgctgcttggggccagggcagtcctttgaaagggaagcaagttccggaatttgttccctcatggaactataacaccttagagcaagaggcaggaattccagggcctcctgcccctccccttcctccagcttgtcaagttaaaccactaatgtgttggtgggcctggccgtgctgcctctcctgagtagggtgggtgcaagtagggcctctttcccagctttcttgcttgccttctgtgcaatatttcttggagaatttggatgcctaaggcataaaggaaaaaaacagagttcatagtttgagctggtatttaccccctgggtttaaaaatcagattaacttcttggtctcccggaggctgctgtcaggaattctccagtacgggaagatgcagtcacttatgacgaaataagtcacccctgaacgcctccgcaggcagattcatggagaccagtcccagtagcaaccgccccttccccaagcatagaatacagaggtgccatacttggtgtaagccttccttctgtccactgtccagaatgtcctttttcacacggaggaagagatggcgggaaaacactgactgactccttgggtttcccccagacatactttcagagcgctagctgtgtggtgcacgggactttacagttaggattcatgtttaaggtggtggcgcttgaggcctgcaagggccacgttggattactgaagcggaaagcggtctcccatgtataagaaaaagttttacaacacgaattggaagctgcttgagtccacctgaacttgaattgattgcaaagccatctgccgggaacggttttgggttcctgagccatcagccagcctttctttcccctctgatgcacgttcctcccggcctagtccgtggaggcccatcacaccagcatccgtgacgccagcttcccactaggacatccaggcaggtcgggcggggacgccacacgcctcagggccgtccgctgcattgccatagaggagccctccctccagtggtcacttcccaccattgcaggcagacttcccaccattgcaggcagctgggcccacttcatatcacacaaaatgaattttctataaagggaaaaaagtttgctcctccatagattttttagctgccttcgggtcaaatagtttccctggttgacgctcttgggccactctgattggcagcctgctttgccaaagagaactgtgtgaggttttggtggttagtaagagaagggggagatggccagcctgaagtcacggtcctggcccagcacaggtgggcagcagcgagctggcaggtgaagtgtgagcagcacgcaaagtgtcacgtgggccttagccgtcacccaccagcttcctcaccaggcaaggaggccccggagccttagcagggacttgcccgacggcacagctgattggtgctcgactcccagcatgcatattttgttgtaaaaacccaggtttgtaattcacatccacaaccctaagccttttaaagcggaggcaaacgttaacgaaccccatcgtggtccatggagcctttcaaaatgggtgccctggaggggcctgacagtgggttccttccatggcggatactcccttgaaatttcacattccatcaaagtttaaagcatttacttcagaataagttatttatgtgtatatgttcaataaatatagtttttaatttatatctgtacatattagacacacgcgagccatcttgccagaattctgacagtgatgtcattttattcccctcccaaaacatgccccaggaacaagcaccccttgcctctgtggcagctgcgagtgtgtctgatttcataacgaagccaggctgagggcaagaggcccgacaggcaggccagggtccccggagaagccggatttcttcgcaatgtcactggtacttagcagatggtcgtgttcacaggggctagccacctgtactacggtgccgaccgcaatgcgaggaatgtggtggccacgcgatggagctggccggaggacaggtcaggtgagggggccgacccctgcggggcctnagggctccttccattctaaccttgagccacagtgtcactcttcagggctctgccccctggctctattttgttaaggtgtcatcagccttcagcctccatttatatatttttaataatgttaagccactgaccaactttttcatagaaacaactatcagatttgagggctccctttgtccccctgaccctgggcacaggcatgggccatggctccctcttcccagaatctgcggggaactggggcaaggcccatctgtctgcaaggctggtagctctctccctcggcttccagagtccacggcagttgcaaggtaaccagtgtggatctgctgagtcaccccaggcaccagacttaccccaggagcatgggccactgtccatggggccttccttgagaccttcccttggggctggcgggcggcggcttaccagctgggtcagtcccatctcgcccctctgtgcctatgccctggcgttgccaggcttaaccttcccctgtatcttactcatcccagaattattactggccatttctaaatagacaaaaactaccctaaaatgtggagatttactccttttgaaaagtctgtttcaaaaagtgtgggcctcagctctggaggccacccccagggaaggagtttgaggttcattgtcattatggccacagtttggtgcttgtgcacgggactcaaagggcagcgtcgaagctggggttaggtgtagggttgtgagcaaagctcccctgtttgtggccacaccttccctttccaaaaaggctattaattctactcacccactatttggggggatgtaaattttgcccacagactttgccacccaggtgaggtgctgtgttcatgcacggaactgatgtcattagacaccatccaaggatggggcagcctgcagtgtgggccggcgactgccattccagagaaaaggcaccttgtgccacagggcggggccgacaccctgagctcacaggtggcccctgcatttcaggttggatgttccttccttgaaacagcctcttctgggaacacagcactggaggtctccagggcatcagggttggcccggcagggtgccctgcagcttacataaaggtcgtggcaatgtttcaatgttaaactaaactattgccttcctcttacttttcctaaaatgattttctaatgggaacagtcacttcaagttcatgacatagtttgaaggaggataattcattttttcctggttgtcactgtcttcttatccccttggtgggctgggttcatactgtgaaataaactaaaatgaaaccaaaacgttcctgccgtaaatacggtggcacagcactgcagaaaaagcagtcacctctattcgtgagtccccaagccatagcagggcgtctgtaaaagaagggaaactgcacccaggaagtggtgggcgtcagacgcatcctttcgcccgtagttcatgaaatagttccggctttggtcttccagaaaatctcaacttcaccgtgcacaagtgttaccgggtctttttagtgtagccatggaagatactttcaaaaggacatcttcagatcataagtcttaggaccaaaggtgtttttaatgagataatctttttgattttctaacaagaaaggaaatattcactttacattttaacatcaacttttaagtgatattcagaattaattgaccatggtgatacgttgtaaaatgttttcatattaagaatgtaattatttccttattgtattttttaaaagctaaagtcatatttaaaattctctttgaaagaaacaggcaaagaaacagcaaagatttttttaaattaaatatgttagtagtgcccacttcaaatgactgtaaatatattttcactgtttctcaatgtatttaattcataaagtaaaaattttatgaaaagaaacttgcaaggaaaatcctagttttcagtccactcgccccactttgtagtagcttcactgaatttcctgctttcctggttgaattttctactgtttcacgtggtgtaaccctagactggcgcccttggcgtgcccctttgtgtatgaataaacttctctccccc

SEQ ID NO: 46400 - DNA, 359 bp, Homo sapiens; identical to SEQ ID NO: 16939

SEQ ID NO: 46401 - DNA, 753 bp, Homo sapiens
  misc_feature (1)...(753): n = a,t,c or g
agaggagcagtgtggggagtgcccagggtgacagtgacacaccaagcacggggagaaaccagtccagattggggtgggtcaagaataataactgataaatgatgtcatgatcttcagatatgatggggttgaattagtgacaaatagaaaaccaagcaaataaaaatgcaagaggattactttcagggaaaagttccacagtaatctagtctattgtatgactcagctgtgatcactatgacactgtcatatttttaaaaagtttaatcacatcttaataatttgacactgaatatgatctaaccagaattacaatatcagggagatgggtgagaggaagtaaattcatggtgggcaggaggaagagaggattcaaaagataatgnnnnnnnnnnnnnnnnnnnnnnnnnnnnnnnnnnnnnnggccgaggcgtggggcaccatgtttggcctgaagccctattttaaacgtctattgtatctgaccaactcactgatgcttattcctcagaataccagctctgtaacctccaggtagtatcataagacaaagcttattagaacctcattaattgatgccaggttaactaatgtgctggatttttttcccctcctctttcattacttgaataatctgttcaatgagcaatattctaaaagccaataattgatcagtttcctcttgaaggcttatgctgtagctcataccataatgaatacctggcaaaactcttttgggtgatttgatttttc

SEQ ID NO: 46402 - DNA, 1234 bp, Homo sapiens
gaggcccagcccttaggagttagggctgagaggggagcccacgctctcatacccagcaagctgcagagtgatcagacagcccattccctaggatcgcaagtcctacagctggaaacagcggctcttcatcatcaacttcatctccttcttctcggcgctggctgtctactttcggcacaacatgtattgtgaggctggagtgtacaccatctttgccatcctggagtacactgttgtcttaaccaacatggcgttccacatgacggcctggtgggacttcgggaacaaggagctgctcataacctctcagcctgaggaaaagcgattctgaacccttcagtcctgcttgggaggacgcagcccactgcccagaaacaagaaacacgataccattctggccttccccaccccacatcctctcttggccttactgaagatgggggaagggtaagaaggaagggtgtaggccaaggctcaccccagtgctgctggcttctctccacccctcatatgggcgtggggtcctcaaacatcacctttacctgagaggccccaagaagctgagctggcagagagctccaccatttggtgctaaaaaaaaaaacgtcctgaggttcatgaccaccatccagtttctgggcctttacacagtcacctttcactgaggtcagggagcccctgaggcagtggctgctccctgacaaccacagccatttctctgcacgggggtcattcataggactaatgtatttcatgatctactgtgcacatccaggcctgtggccacagtcccctgctaaagttgctcaggtgttctagtcctgacttcacctttttgatttggtgtgtgccctagggtatgtacccttccccatctgagcctcggtgtgtccatgtgtctggcgggggatgggtggactgtatgatttccaagggctctaccagtcagtggttctgatgtcatcgggtggaggtggtgttctatacctaaaggatgacctgctccagaaacagcaccagcacagcatgtattttcttctcttctgaaagttctggcttgtagacccctcccttcctttgcaaaggtatgggatagaggggtcagatgcagatctctactgtaaaatgggctccctggtatctcctgtcttccctactgctccaaaccctaaattttggttgtacattttatttgaaaggaaaataaattttttttttgggccaaaaaaaaaaa

SEQ ID NO: 46403 - DNA, 2387 bp, Homo sapiens
tttttttttttttttttgcagaggaagagcacgcgctccacaggcgtcactcttatgggtccatctttaattatgttaaatattaataaaagtacagcgtaactgcgattcacttaacataccttacaggactaagggagtacaatttaacacggtcacaacttttgagaacaaaaaggaacttcaataccatgttgtgagaaatgctccaatttgctttggttttgaatggcaggctcgagaaccaccgcccagaacggaacctattctgtcagcaagagccgggcctcgaatgagaggaagcagaggcagccgaagtgccctctggagagaaaggcccctggagggaaaaaccatgtctggatggcattgagtggcacagaagggatgggactgcatatataaaaaagatcccgcataataaaccaaataatattggaaataataccttcagtaatacttctgtaagaagcagaattacaccacatgttattcacatgcataggagtgcataagaaaaatcccttgttgtaattatggttggtgtggaatagtaaaatatgtactgaaaatgacaagttaattggcagagaaattaatctataaaagggttgtgtccagagcggaggagcctcattagcaactgaacagaacccactcagaagacgcactcacccacacgtgcgcgtacacacacacacacgcgcgcactgtactgcaaataaatatacacacacactgaagtgatctctccctaaagcatccttgtgctcaggccagatttccctgctggcggctgctcccagtgccggctatagagaaggtggggactgtccctgcaagtgggagttcaggacacacgctccttcagtagcaaaaaccagccctgggccatcctggcgctcagagccctctgcacacctttgaacgggctgtgtgtcccttctctgatggcagaaagacaacaccagcagaaagacggctgaacaactgcagatcctcctacccccgaagcctggtctgtctcacacatacaagttagagctgggtggacagggtgcttgcactttctggctttggtgggcgagaccttggcctgagaactttggttcacaggaagcttcccttgacaatacttgagtgcaaagcttcatccaggtcccacctgggctgttgccaaggatgctcaagcgttctcttcaatcttccctgtgacttccaagaaacgacaagatctctagcccatccatcggtaaaccaagctgccaagtggcctggaaaattccatgaagaacacggctcttagaaacctcattccaaatctcaacacgccacgttcagcccaagttcagcttgtgcattgtgttttggaattgggacacgagtatctatagtcccttgctgggtgaggaactttgaccacacgcagtggagaaatgtggaaaataaactatttccaatgggaaggcagagaaatggagcctgtagccggccagaactaaaaattaaaatcctctgtttctctgatgatcttgtaaacctgatgagggcttgaattacctagattttccaagaagtgttcaattccttgaggttgctcattctggcattaacagcaaaaatttctcttccaattataaactgaagttcttgagaaaacgtatgaagaggcagcagagagagagccaggactggttaaatgcagaaagtggttttgttttaaacgcattcattttctatgttaaacataagtccacaaggacagaataggaggaggtcagaaagatgaaggtgctgccaaaaactgacttatttttttccttttggaaacagtgacgttaacagggtttacatctgaagaaactggagggctgagtttggagtaaaggagaaaaaaaaaatgaagagcctccattctcgaaagactgcggttctctgtcccagtgaggttagcgatcgccaacaagagtgtttcagaagtgaatgtggtatgatcacacctgtgaagatagccattgaatacagacagtctgtgcaacacggcgagaccccatctctagggggaaaaaaagggaacgtgaagtgtaagttccagccaggcctgtggcatgacctctggcttgctgactcagaacccagaggctctccagaaggcggaggcgggcagggccaggctgccttccctaggtgttctctccacacccagtgcaggccagctggctgcatccccaagctccaggacgctcagagcagagctgaattcttgagaaactggggtctccaatggcctcggatagaggagctctgtgaggggtccattgctgagctctcgaacatcacgaaggaaattccaaaatggttataattcatgtgtgcctagagtggca

SEQ ID NO: 46404 - DNA, 815 bp, Homo sapiens
agcgctgagattgtctaaagccccaggaaaaatggtggaaaattcaccgtcgccattgccagaaagagcgatttatggctttgttcttttcttaagctcccaatttggcttcaaaaatctgaagggatctcgtgtttgctgagtgttccgtgtgccagcactagcctaggaggttttagtctctacaaatatttatacagcaccagacgcgatggcaaagtggataaagcctgggtccctgcccttaaggaggtcgtggtcttgtggaggagacagatggtactttacctcgtgtgggcctttattcctgaatcttggctaaactctttaggtttaacctattggcctcaaaaatattgggcagttgcattacctgtctacctccttattgctatagtaattggctacgtgctcttgtttgggattaacatgatgagtacctctccactcgactccatccatacaatcacagataactatgcaaaaaatcaacagcagaagaaataccaagaggaggccattccagccttaagagatatttctattagtgaagtaaaccaaatgttctttcttgcagccaaagaactttacaccaaaaactgaactgtgtgtaaccatagtaacaccaagcacgtatttatttataagtttttgccattataattttgaccataaattaatttgaccatctctcttattaatagagaagtaaaaaatgtaagttgaccttctcttagattatgttcaatgaatattgtaaatgttcaagtattgttaatgaatagaataaatacaatattgcattcccataaaaa

SEQ ID NO: 46405 - DNA, 671 bp, Homo sapiens
aatctgcagtggaccaatttttgtatttttttaaatgcttgaccaagtgtctaaaataggcaagtagtaccttttgttctttcattgcaatttgatacagtataggctacagtatttttacagggtaaaactagttatggcagtagtatgcacagcagtgttagccatttcatatgtatgtaatatgcacgtgtgtatccaatctgcctgtgacatgcattttactctttgcagagaatgagctgcagtccagtttaatgtcagtttaataagtggtctctttttagcagagcaaaaaaatatagcgtaaatacttattttttttaaaaacttacttaaatttgtgtgtaaaatatttatttgaaggactttaatatgtaaaaataattgtcttctatgccaccctacagattttattttaatgtgaattatttttttcatttcatttttaccagtatagtaaaaaagtagaaaagccagtatggatatttttggtaagataatttatttggggattcatgttccctgttagacaatcatgaccttttctacttgtctttttatatataagtagtagatttccacttgtttagggattaagaagatgttctagaatgtagataccttgtccagccataggaatcaaaataaaaaactaaaaaagttcaaaa

SEQ ID NO: 46406 - DNA, 324 bp, Homo sapiens
gagccaccacacctggtctgacttcctaatctttagggccccaactctgcccttatccaggcaactctcctctccccatcttccactaacttctttggaatattccagagctgtaaaagccttagagagtatcaagtccaactcctatgtgttacagacagggaaactgaggcctaaagagggtaatggacttgcctaagatcgcttagtgaggtgagagaagaaagagctagagacagcctagcctgtgcaaggacatagttccaggcattcagagctgcgctctgctgccggcatgtttggggcctggtagttagttcactg

SEQ ID NO: 46407 - DNA, 2673 bp, Homo sapiens
  misc_feature (1)...(2673): n = a,t,c or g
tttttttttttttttacttttaaagaacatttttattactttcaagtttatacagtaatctggcacaagctattgccagcattcctgccaagtacaaatgcttggacctccccttaatcaacagataaaatacataacttacatttaaggggagtggatacctcaaagtgcttaagtaaaaatttgttctctttaatagtttgaactgtcccttgttagtcgtgtctaaaacattgacctgaataatgagaaatcacaagctaatgttttacttattccttatatggtaagagactaccttttaaagcaccattttccatttggcatttcaccaaggtctaatgtccctggaattagtttttttgttttgccttttgaatatcgataggtgttcatctgaattaaactacgtttagtttgatggcttcctgcctccaaattggcaacagtgtacctcactttgtatgggagctatcaggatctccataggttgcaaagtagatgaccattaccttggggttggggcaaatcagtgaacaagtctcggcaaggtactggcatttgtatttttaaaaaaatctctagccattttgttcttggtgtaaaagtagaatggctgaagtatggcagctgagtaataactgttcttcttagcatgatgtagtgcttagcatgtctctatgggtccaactttgaacattattaagaactggtttgtcttgttttgctataactgatatgaaaaatggtttgggtggggcatggtggctcaccactcttacagaggcagaggcaggaggatagcttgagccccggatttcgagacctgcccaggcaatataacaccatttgccaaaaaaaaaaaaaaaagaaaaaagtggtttgaatattcatatttcttcctggccattactgattttcaattaatttatgcataaatgagacccaaactatcactaattttcagctatatgaattgatagccacttgacatcagtgaaaggtacagtagggagtagatgaaattgtatttttaatgaaaaggctttgatgggagattcaagannnnnnnnnnnnnnnnnnnnnnnnnnnnnnnnnnnnnnnnnnnnnnnnnnnnnnnnnnnnnnnnnnnnnnnnnnnnnnnnnnnnnncctcaagtgatcctcctgccttggccccttaagtgccagggttacaggcatgagctaccatgcctggcagaaattcaagatttggataaacttacttctttgccaagcctgttcttcaagttattcagaactgggtgtataccttgtcctcatatgtatcttgtccctgctgtcttttaggttagcaaggtgtatgaatacttttaagttttgtttgttcttttcctcgtggtatcagtgaaatactgatctattctctggctagggtcaatttacaaaattgccatggaactgagcaaaaggcccacgtgggataaaaatcactcaccatcgacgccaccagtatttttcaagttatggcttttgaagtataacaaatttcagtaaacaaaatcaaaagaaaaaattcctctgcgtacaacaaagaagcacctgttatattttgaatgcattcttcatgttgcccagctttctaaacttgtttttttgatgcctcaacagacagaagtgaaaattatatgccactcttaagtacatccaggttctcctctacatattcccaatatgggaatgctggctagcaatcatggcactctctcagaaaccagccactggaagttaaaacttctggatttcaaaagctagtacaggctgctaaatttaacaaaggaacaaaccttcataaatggtacaaactacctgcccaacacactcttctattttccagaccctttaatattgagtagtctagtcttggattgactatggtgggttaggtctaatctaagtatcttaatagctatctagggataatgaataaaattaaatacaactggtacctcaagtatcataagagaataaatttatgaagacaagcagaccaaagcaactcaagattttctacacctgactactgtagctgtaacttcaaataatgtgttacctatgaaacttattatgtacgaattagttcttaaagacagaaatgatggaaacatgtaaaaaaaaaaaaacaacagtaagtgttcaaacagatccctgttttgttataaagaactggagctctaggtggcatctagtggatattttaatagcaataaaaataaaaaattgggtgatattccaactaaataaaaaatgcagctgctttttaaaatttaaaaacatactttaccaccctgaattataaactcaaggcaagtagcttattattccaataaggacgtggtgtgataaattctctcacacaggttgtcatcaatctcaaatagataaaaggcacagaaccgatctaattctttcaatgcattttaaggctttgtcccgctaagggtcaactttcactgtggttaaagttaaatttattttctctaaaactcttcttttgaaaggatctgttatagagatcctttattcacctgctcctacagttccacatcaagactaaaataaagataaaagaattagggtcttagtattaaaatgcttttaactggtgacaagaaggaagaagcctatagtt

SEQ ID NO: 46408 - DNA, 1606 bp, Homo sapiens
tttttttttacaacaaagcagtttatttgtgatcagtggttgagactctatacatccttcacaaatttaattttacataatctgatacgtctcttaaaacttaaactttgaactgctagacttttatttccctagaacagaagggctggtataagttattttccagaaatgaggtaccgttttcacagaactggtttctttttttttttttcaagttttagagaactaaatttgcatttgttaaaatcaaaaagtaggaaagatgttctttacaaataattttgatcaagtatgtgttcaaagaaagcaggataaaaaggctttttctctaacattctgtgttgtactgtattgttgttcaataggaattagcttctgtcatttgctaaaagaatgagtagtggggaacaggatatgttggaaatttcataacgggtaacagaaccattctcttgggtaaaccataggcaggggcagctgtgctgtaaccatatggtgttccatagcctggagctatgtagccaggagcagctgtcgccccaacaaaagctccccttgttagagttcctcttcctctgccccgaacagcttggactgctgcagacacagctgtattcacaacgccctttgcctgagggataatcttctttttcttattatttgccgcattgggtccagaaaacagtttcctcccaaaagggctaaagctgcactcgccctttgcccactttcttatttggacctgcgcctctgaatttctgtccatctacttctacctccattacaaagcgcttgtcatggcttccaccagtctctgagatgagttcatacttgagacctcttcttttttcattgagctccattacagggtttttgccacttgctgtgaggatagggccctgagttcttacctctaaggtactggaggtttcagttgtagaatttccagtattattgcttgagtttgaagacactgtttcatttttactttcattatctgatttttcatcggaactcatacattcaatatctgcatcaaagcctgttggatatcccattgcctgcaataccttcaccgctacgtgaagttttgctgttttcttggatggtcctgaggcttcatatgttgtgccatccacatctacagacattgtgaagactggggcatgaacggggccagactgagataggagcttatactgaagcccaggcctgatctgatttagcctcattagtgcattcataaggtctattgctttactatccagaattttccttaagtttcgtttcatcttcttgttggggtctttatcatcccctaatccatcttcaaatggcctctttagagctgaagacccagcaccttctttatcagtaactgaccaggaatacttctgaaaaggcttactagatggaagggggtccatctccagcactttgtaaatctggccaaaggctgatagtctgagtgcatgctgtgcactgtgggtaatatcttctttttgctggatggtcatatagctcagagcatctgttgggtctcgctcacaaggatcatgaagaccaggacccccaggaagtagtattccagatgccaaacactccc

SEQ ID NO: 46409 - DNA, 790 bp, Homo sapiens
ttttggttatttgagattttactttgtaatcgagtaatttagccacactcttgtgagggaacaagccagagccaggaccgcatattacccggtaaagctgcagagaagacttgagacttgtaagattggacctggctgcagtcccgtggtcagtaacatctgcaacattatacagccagcagatcagctcttccagctgacagcaaaatgtcttcacacattgcaccagtgattcttttccctgttctcctcctttcctgggaagctgcccttcaacatctgggtctgagaatggccaccggtccaacctagctggcaaggaggggcgtgttttcagcagtccagaggagaccccgagggcctggctgctccccagactgccttcccctgcggagtcgtgggcacggacgaaggagcgcaggaaacagggattctggccctcaggatccccagatccttggagggcagctccagggggaagctggctttggctggagcttgaagggaaggaagctggcccatcactgtctgacacttccaaggggctctgccctttgatatccccagtgggcagggtaaccaaggtagaaatggatcctagatacgaaaccaggctagaaacctgtgtcagccgagcggggagggcaagatactcgtcatcactttccacttcctcttctgatttccacctagactctgtgcaggtagggcgccgggcactctggctggtcctcttctccctctctggcctgggcgagggccaccctctgtcccgtgtccttagctgggc

SEQ ID NO: 46410 - DNA, 1684 bp, Homo sapiens
caatttgctaaggaaattcagtgatattagagctaggttattaaagattatattaaataatttaactgtattttgaaaatgattatgctgtgcatttccttctctgtataaaaagtgctgggattgcaggcatgagccactgcacccaacccctggaaaactaaatttttaagtgcttatttttatagaagtttgaaaatttaatgcaggcaggtgtgtaataaattatttttgaattgaacattaaaattctgcttcttaaagtcagcactcaacttggacatgttgaaattagaatctattcttgtatttgatagacaaaatatgtggggaaagattttttgcatgacttttctctcattttattcttccataatgtatttctactataaaatagaatcaacttgggttatatttgtcatttactttgttctgttagattttttcagttgtttttggaaaaattctagaaatcaggatgaaaaatgcagcttttccagggttgctggactgggggttttatttgggcctccttattataatttgtcactacttataaaaaacattctgttgcaaacagtggtgttgcattgaattgaactttggcaatgagaacacagcacacagctcccttttcaaaaagggtctcaaccccagtgtgtatttttgtacatcaacatttagaatacttatggcagataagtaaggcatgtcactgtgtccttcagtaacctctctcagtaactggtttctttatccctaacatgaattcatttctcctttgaagtcatttattattttataaattgagaacaaccacaccaccaaatgtcacaccttcttataaagtgtgaacaaggaaggtcatgtttttgtgggtattttgtcagacttagaggtttcatttcagggcatagtcaaaggcatcatcctcccaactacccacttgattatgtatttcagatccctccgtgggggccttcttctgacagagaattctttgaggtacgcagtagttgcttttgtcagcacagactgctaatctacatcttgctgcgttctgtttgctgaggttggggcttattcatttaacacgtaccaaccattatccagagggcaccatgggagagttagttcatggggattaaaggcactgtccttgcagatgaaaaaagtctccagagcagacttctgacaggaaaggtttagatgctggagagttgaagaggtgtaagaagagatcgtgccctcatttttcacttatttttttggttattcatttataataaaaggttggcattgatatggtacaacctgcaaattacttgcagttctgagtttcagataaaacattataaaacattaaattcaatacatactgctcctttgaaatttgggtaaaaaattgtacaaccgtatatatagtcatttttgtattttttctatgttgtgaaaaccaaaattgtaattttataagtctttgattcactaaaattatataatttaaatgtattttttgtatatttagaaataaggagtccagagactacgcttaactttctatgcatgcatttgaaagctgtttttacctgataatgtagtaataagttgtattcataaaatactgatctgtgttgcatttcaaaataaactggtgtgtgctctgcctggatttgaaatacct

SEQ ID NO: 46411 - DNA, 454 bp, Homo sapiens
gattttctaaatgcctgcttatatgactttttgctgtattaccttcttgatctaataaacactccaaaatgactcctactaatgagaacgtgactgttgctaaaagtgaggtaataaacttcacaccgttccttgtttttacagatggagaaccacgaatatttaataggtctttgtataaagaagtaaagttaataaggccattgtgcttgcgtcttctctttaacttgtatttcagctcaagaaaaatattttatttgctatcattttctttaatgttgtacttagaaccatatttttgtgtaagaatattgaatttcttacttaagagaaactgtttcaatacaaaattgtaggcttttcatccccgcggccctgattttgacaaaggcagaaaataccatgaaaattaatcatccaatatttacttaaagttaactttttatacttacat

SEQ ID NO: 46412 - DNA, 450 bp, Homo sapiens
cggacgcgtggggaaaccgctgtgctgtgggcgcagcgccgagattgattcaccttcacctgtgctgcactccagctgacccaagtaggaagccagacgagctgtaaaacatgaacggaagagtggattatttggtcactgaggaagagatcaatcttaccagagggccctcagggctgggcttcaacatcgtcggtgggacagatcagcagtatgtctccaacgacagtggcatctacgtcagccgcatcaaagaaaatggggctgcggccctggatgggcggctccaggagggtgataagatcctttcggtaaatggccaagacctaaagaacctgctgcaccaggatgctgtagacctctttcgtaatgcaggctatgctgtgtctctgagagtgcagcacaggttacaggtgcagaatggacctataggacatcgaggtgaagggg

SEQ ID NO: 46413 - DNA, 1929 bp, Homo sapiens
tggaagttgggacatacagtcaaaaatatcattattagccagatgaattctttcctgtgtttttttttatttgctgtattaattggtcgaaaggagctttttgctgcatttggtttttatgatagccaacccactcttattggactattgatcatcttccagtttattttttcaccttacaatgaggttctttctttttgcctaacagtcctaagccgcagatttgagtttcaagctgatgcatttgccaagaaacttggggaaggctaaagacttatattctgctttaatcaaacttaacaaagataacttgggattccctgtttctgactggttgttctcaatgtggcattattctcatcctccactgctagagagacttcaagctttgaaaactatgaagcaacactgagatgtccaggatctgtgactgaagacatttctgattatttctgtcctggcagcatgttccagctcttgatgtttttaaacttttttttagaagaaaaattaagtacagaaaagcccagatttaaatacatttaatatgtcattttaaaaatgattttaataattcatttcttaaaacactgaatgaattttgaagcttaatgtttttaaaggcatagttttatctttgacatctaatttaccatcaagttgtaaaattatttggaaaaatacagaactcgttttatttgtatacttatatggaatctgcatgtgaggtgtttgagggcatatgtttgaaagagggagcatcaccacaggaatcctttcctgtgaggtggaaacagtggtcctgaatcattgtgctcacacctaacttgaaatctggtcttactttcatgctgttatgatttcacctggtgaatcagtgttttaaataagaaaggtaatagttggtaaggccaatgttatttaaatgaaagtagttagaaaaatgctctcctattctaccaaatttttaatttctttcttccctttcttgctacacagtgatcaagagtttctcatagtgctttgaagttagaaattatgtataggatattttaaatcattgagttttgtggggtttttttgtttgtttgtttcttttgttttttggaaaatccgtgtctttatctttttttcccacgtggtagatatgatcccattggaggtaaattgtagcttcttctcattcatgcagtaaataatacatcctttcactcagcagagatggccatattaaacacgttttgctatgttaaaagtggcagaacaggaaagacgaattaaaaataacattttttaagcgacataaggatgaaatactgatgaatctctgtgacattacagggaaaaaaatatagttttctatctctttcaagggcagaagagttttcatttttatttttgtaattttatctgtaagtcataaatattacttaatcaggcctgattctacttttgaaaattacagttcttgaaatgcagataatgtttactttgaaaacaaatgtcatgaatgatttccagtttttaaagctatatgtttcactgcttcatatctctgtccactttctgaatgagaacttattttgtgcctagagctctcactcactgataatgcttattaccttctgggcatttattccaaagtgggatcaactgtacgcctttggtatctgaccataaagtcttttgctccgctgacatttgggtgatgtcttcacatggaaatataataaaaataaaaatctagtttaatactgcattatttattttcctaaggctaaagaggagcagtcctatgcttttattcagcatcctttatctgtgacttcatgctctgataactgcctttccttccttctgtgcctttgaatacaaatttcagttctgcaaaagtgaaacattaaacattgccaacgcaaatgtatgtaa

SEQ ID NO: 46414 - DNA, 2324 bp, Homo sapiens
tttttttttttgacacttaattactatgtttaattcactgaacgcaagattagattgaggcatatccaaaaacgctattgcaatgctttaaaggacagtaaaaatgttgtcatagtaacattatctttagatattgctgaacacaagactttccctgaggtgtaaacatcaaataacttgaacagctttacacatcagccccattaaacagtttattacaacactacatctattgtaatcaaagtgatgctgtttacagacattatcatataaacatttttaacaagaacaaactactacaaaaacaagcatttacttgactttttttccaattgcttgcacatcataatggccaaatgtatataaccagtaataaagttgcaaaagctataactttttaaatcacacaggtttccttcaaataaaacagttaagcaacataaaaaataaaagtagagctactggttaccatttatgcagatttgctttattcagatctattcctgttcattttatccatgaatccttacaggttcagttcaatcacaagaagcaaactgctggacaagcgtcatttttcccccatgaagactgttttgtcttggaaggtgatcctcttccttcagcttctaacgatgacgatattcgcgctctcggtcacgctctcggtcacggtctcggtcacgatcccggtgcctctctcgttctctgcttctctctctgtaataatcgtcatgacggtctctactacgggatttatgacgtcgactcttttctcgtgatctactatggtccctctctcttgatcgttcacgtcttgatccagaaccataagacttggactcaattccatgaaggcaatcttgcaaagaactaataagaactttgcaacgatcatcagcagatactttggattgtttaattaaagaaattgcagttaccagtgtctcaatagcactcccataatcaccagcactggcatcagacacagctctcgaaatagcactgcttgagattgccctatttctattcatgatttcttcaaattcagcttcactcaatggcgttcttgcagtatccatttcccttccaggggggccatagtcacccctatcatatggtggaggtcgcccatatggatctgttggtggtggacctcggctatctgatgtaggcatgccactgttagttggtggaggaaagaaagctgggttcacatgcggaagctgggcggtggggccacctggaggtggtcccaggaagatgcggaggaggagctagtgtaaggggtggcccaagtggaccgggtggacgaggtggaaaggggcctggaggtggaggtggtccctgttgtggaggtggtgggccaggaggggggccgtagcctggaactggaggtggagggccaggaggaagtggacccaatggaggctgcccaaaaggttgtccaggaaaaagaactggtggtggagggcgatctcctcgattaggaggcccagctagaggaggaggcagaacctgaccaggaggtggaggacctggtggaaccaggtgggcctggaggacctaagggtggacgtggtggagtctgtccagctggaaaaggtgggggtggccctcctggtcctgctggcccaggaaatctgtccccaccaggaacagcccctggaaaacggccccgtcctctaccaccttgtggaaatgctgcacgggaactgcctcctggaggaccagctttaccttccccagacatttgtcctgattgtgtagttttcctggactgcatttcaaattgactcaggaactgtttattgcatggagttacaacaggattctgaccatgaagttctcttttaggtaacagatccattaacttttttgaagatgcttcagatccaacaccaacaagggcaaacccctttgactggccatttgctcgattttcaaaaaattttatctccaaaatatcatttactcccaaagaatgaactgcttcagttaagtcttcatctgttgtccaccatgttagatttccaatatataatgcaattctctttccagtatatgtatagacaacatttggtgctgctcctttacccacatcatcaccaacagttggtgggagagtatccatgtaatctcggtcttctggggcatctccattatttgcagatggagatatgacatcgtcatacaaatctatctgatcatgcccaccatattcagcttcctggttgaactcttcgccgacatccgcgtaaatgtttatgtggtccacgccgtccgccatcttccttcagcctcggccgccgccgcccggaatt

SEQ ID NO: 46415 - DNA, 1026 bp, Homo sapiens
aggggactcgccgcagatccgctgtacttgcgtccgctacagtatgtcaatcgcttgccccagcacagctgtcattcttctctacagaagagcttctcctcatcaactggggatgattacagttcttcctaaaaaaggatggctgctctttttctaaagaggttaacactacaaactgtaaagtctgaaaatagttgcattagatgttttggtaaacacatcctgcaaaagacagcaccagcacagttgtcccctattgcttctgccccaagactctccttcctaattcatgcaaaagcctttagtaccgctgaagacacccagaatgaaggaaaaaagacaaaaaaggaataaaacagcttttagtaacgttgggaaggaaaaattagtcagcgagttattcacttatttgatgagaagggcaatgatttgggaaacatgcaccgagcaatgtgattagacttatggatgagcgagacctgcgactggttcaaaggaacaccagcacagaacctgcagagtatcagctcatgacaggattgcagatcctccaggagcggcagaggctgagggagatggagaaggcgaaccccaaaactggaccaaccctgagaaaggaactgattttgtcttcaaatattggacaacatgatttggacacaaagactaaacagattcagcagtggattaagaaaaaacacctagtccagattaccataaagaaaggaaaaaatgtagacgtgtcagaaaatgaaatggaggagatatttcatcaaatactccagactatgcctggaatagctacattctcatctaggccacaagctgttcaaggaggaaaagctttaatgtgtgttcttcgtgctttgagcaaaaatgaggagaaggcatataaagaaactcaagagacccaggaaagagacactttgaacaaagatcatggaaatgataaggaatcaaatgttctgcatcagtaattttaataaagaaaagcatgctctgagagaaaaaaaaaaaaaaaaaaaa

SEQ ID NO: 46416 - DNA, 1685 bp, Homo sapiens
ggtgattttgaaaactgctaacatttttaaaaggctagaacatcctttgacttcttgaaaatctgcatgtctggcttgggttttattaccacatgcctgagttcttcaagaatggaaggctcaagtattctcatcttccatttgccaaacttccttcctgatttgagtcacgtgttccacttggaaagaaagggaacagagagcctcctccatggacagtgtatgaatttcattgggaatcttgctctctcccgcctctatgcctttctctctttttaaccttactttacataatattatagatgggccaagaaaagaaaagatgacataacattttgatgaatttcacctattccattcttcacgtttcagaattggtcgactttgttagaagataattgaagtagccttgggtcaaaagcaaccttttcaattgtgatcatacctaaaacatataaaaaccctgccgtagattaaaagcaattataaaatcataaaattgaatgtttgcagaatcctggagcagtagatttctttgtctttggcctgcggactagaaagagggcagcagtagtatgctggagcttccctgggataccagccacatggtttcttttcattagatctgatttttgtttcccactgtagatctgattttgtagttgaaaacatttcaccaccatcaaacactatttctgaatattgtgcctttttatacctagcctagatgaaaaccgatgccattcttattcagaaaatctccccatcctacatgactgttatctagacataaagcaaagtgcatttaattcaaaatttggttcacaatataagtattttgtaaaagccagctgaaccagcattttatcaggtggaaatctctgcaagccaaattgctgatactccttcatgcagatcaacttggtgtcccagtcagaatagaacagcataattacctggagttagggggagtatttctgcactattacttgtcagggagagaagaaacttagaattgtccctcaaaggagtgtcaagaagtatgaataaatgtcctttcaccagctcacaggccagaaatggaggacccaagtcaactaggtgaaactactagcagacccagctttcccataataacctaatctgcaaattgttctattaaagtctcattgttttcaggatgcaatgaaagtggatttcaaaaggctttggaaaaataagtggaacatgactgatcttgaaaaaaaaagcaaaagcttaaatatttgatacaagtttacttagctacaacatactttacattgttgcctttagttatctcacaggcactgacattttatatttagaaaatacttttaatctttctaatctttttttgtaaatattagtgtccattctgtatgactcgctaacctactttgcaaggctttgggcaacattttagctcattaacttcaagatgatgtgtcatctgtataggtcaaagaatgggacttctgaactgaggaatttgctgttgacagccaaagtatagtgtacaagattgatgtaacttgatatgtatttttgttgaagttttttgtaaaaaaaaattatttacaatgttatttgaatgatttttttaaatgctgtgaatctatatttgttgttttgtatattaaaattcatttgccaaactcgtaaaa

SEQ ID NO: 46417 - DNA, 2751 bp, Homo sapiens
gcacccggcagcggtctcaggccaagccccctgccagcatggccagcgagttcaagaagaagctcttctggagggcagtggtggccgagttcctggccacgaccctctttgtcttcatcagcatcggttctgccctgggcttcaaatacccggtggggaacaaccagacggcggtccaggacaacgtgaaggtgtcgctggccttcgggctgagcatcgccacgctggcgcagagtgtgggccacatcagcggcgcccacctcaacccggctgtcacactggggctgctgctcagctgccagatcagcatcttccgtgccctcatgtacatcatcgcccagtgcgtgggggccatcgtcgccaccgccatcctctcaggcatcacctcctccctgactgggaactcgcttggccgcaatgacctggctgatggtgtgaactcgggccagggcctgggcatcgagatcatcgggaccctccagctggtgctatgcgtgctggctactaccgaccggaggcgccgtgaccttggtggctcagccccccttgccatcggcctctctgtagcccttggacacctcctggctattgactacactggctgtgggattaaccctgctcggtcctttggctccgcggtgatcacacacaacttcagcaaccactggattttctgggtggggccattcatcgggggagccctggctgtactcatctacgacttcatcctggccccacgcagcagtgacctcacagaccgcgtgaaggtgtggaccagcggccaggtggaggagtatgacctggatgccgacgacatcaactccagggtggagatgaagcccaaatagaaggggtctggcccgggcatccacgtagggggcaggggcaggggcgggcggagggaggggaggggtgaaatccatactgtagacactctgacaagctggccaaagtcacttccccaagatctgccagacctgcatggtcaagcctcttatgggggtgtttctatctctttctttctctttctgtttcctggcctcagagcttcctggggaccaagatttaccaattcacccactcccttgaagttgtggaggaggtgaaagaaagggacccacctgctagtcgcccctcagagcatgatgggaggtgtgccagaaagtcccccctcgccccaaagttgctcaccgactcacctgcgcaagtgcctggggattctaccgtaattgcttttgtgcctttgggcacggccctccttcttttcctaacatgcaccttgctcccaatggtgcttggagggggaagagatcccaggaggtgcagtggagggggcaagctttgctccttcagttctgcttgctcccaagcccctgcacccgctcggacttactgcctgaccttggaatcgtccctatatcagggcctgagtgacctccttctgcaaagtggcagggaccggcagagctctacaggcctgcagcccctaagtgcaaacacagcatgggtccagaagacgtggtctagaccagggctgctctttccacttgccctgtgttctttccccaggggcatgactgtcgccacacgcctctgtgtacatgtgtgcagagcagacaggctacaaagcagagatcgacagacagccaggtagttggaactttctgttccctatggagaggcttccctacacagggcctgctattgcagaatgaagccatttagagggtgaaggagaaatacccatgttacttctctgagttttagttggtctttccatctatcactgcattatcttgctcattcttcagttctctactccctcttgtcagtgtagacacaggtcaccattatgctggtgtatgtttatcaaagagcacttgagctgtctgaagcccaaagcctgaggacagaaagaccctgatgcaggtcagcccatggaggcagatgcccttgctgggcctgggggttttccaagccctcagctggtcctgaccagggatggagcaagctccttcccttgctcatgagctcctgatcagaggcatttgagcagctgaataacctgcacaggcttgctgtatgacccctgggccacagccttccctctgcattgacctggaggggagaggtcagccttgacctaatgaggtagctatagttgcagcccaaggacagttcagagatcaggatcagcttttgaaggctggattctatctacataagtcctttcaattccaccagggccagagcagctccaccactgtgcacttagccatgatggcaacagaaaccaagagacacaattacgcaggtatttagaagcagagggacaaccagaaggcccttaactatcaccagtgcatcacatctgcacactctcttctccattccctagcaggaacttctagctcatttaacagataaagaaactgaggcccacgggtttcagctagacaatgatttggccaggcctagtaaccaaggccctgtctctggctactccctggaccacgaggctgattcctctcatttccagcttctcagtttctgcctgggcaatggccaggggccaggagtggggagagttgtgatggaggggagaggggtcacacccaccccctgcctggttctaggctgctgcacaccaaggccctgcatctgtctgctctgcatatatgtctctttggagttggaatttcattatatgttaagaaaataaaggaaaatgacttgtaaggtcaaaaaaaa

SEQ ID NO: 46418 - DNA, 1049 bp, Homo sapiens
ttttaaatacactgaaactttattaaaaggtcagggtatatagaaaacaaaaggcatgtttgcaaaattatttatttacatcttaagctcacattaaaatctttctaggatagaatggctaagatgaaatatacaaagctgatataaacacagaactcattaatctttatctgaacagaaacatagagatggctttagataatctgtttttccttcacaaaccaatgttcccttaagtcatgccatgataatgtctccccattaagaacttaacttgtattgcccaaaaaagctgagaagcaaaaagctaactttgatttgttaaacagctattcatatgccacaaaaccaaaactattttacagtgctgagaggtccagataggtccaaacatgatgatttttaaatgagtgctttggttaattaggctttgacttggtttttggcattacttgtataattatatcattccaatgagtcactacaggtaatccattcaaaacatgacttgcttaatactatcacaaagcacttagccttgccttgactggaaatacctttaagatgctgacaatagcaacaatttctcctttccttcactcagcaaaagaaatcacataaatcacaaaataaaaaattcatttctcacatgttaaaaaagcaaagtctgccataaacccttagagaagaaacagtttctcataatatctgccctgggtaatagtgcattattaaaatactagacctgcaagatctcttcctatgccttggaagcctatgacttcatgatctattcatgaaaaatatgccgaaggctaaatatgcaatgcattgaaatttctgggaagaattcacatttaaaacagtttaaaaaatctggatttagtaagagttttagaaaaataaataaaacactgtggttctacttctccccttctactctcccttcacaaatctaagcttaagtgcaggcttctaaaaagcagaagagagtacaataggatgagagaggtgggttttactatccacattttccttttcttagtgta

SEQ ID NO: 46419 - DNA, 1956 bp, Homo sapiens
ttgacatgattacgaatttaatacgactcactatagggaatttggccctcgaggccaagaattcggcacgaggcgcttgagagattccatcgtgcctggctcacataagcgcttcctggaagtgaagtcgtgctgtcctgaacgcgggccaggcagctgcggcctgggggttttggagtgatcacgaatgagcaaggcgtttgggctcctgaggcaaatctgtcagtccatcctggctgagtcctcgcagtccccggcagatcttgaagaaaagaaggaagaagacagcaacatgaagagagagcagcccagagagcgtcccagggcctgggactaccctcatggcctggttgggtttacacaacattggacagacctgctgccttaactccttgattcaggtgttcgtaatgaatgtggacttcaccaggatattgaagaggatcacggtgcccaggggagctgacgagcagaggagaagcgtccctttccagatgcttctgctgctggagaagatgcaggacagccggcagaaagcagtgcggcccctggagctggcctactgcctgcagaagtgcaacgtgcccttgtttgtccaacatgatgctgcccaactgtacctcaaactctggaacctgattaaggaccagatcactgatgtgcacttggtggagagactgcaggccctgtatatgatccgggtgaaggactccttgatttgcgttgactgtgccatggagagtagcagaaacagcagcatgctcaccctcccactttctctttttgatgtggactcaaagcccctgaagacactggaggacgccctgcactgcttcttccagcccagggagttatcaagcaaaagcaagtgcttctgtgagaactgtgggaagaagacccgtgggaaacaggtcttgaagctgacccatttgccccagaccctgacaatccacctcatgcgattctccatcaggaattcacagaccgagaaagatcttgccactcccttgtacttcccccagagcttggatttcaagccaagatccttccaattgaagcgagagtcttgttgatgcttgaggagcagtctggagggcagtatgagctttttgctgtgattgcgcacgtgggaatggcagactccggtcattactgtgtctacatccggaatgctgtggatggaaaatggttctgcttcaatgactccaatatttgcttggtgtcctgggaagacatccagtgtacctacggaaatcctaactaccactggcaggaaactgcatatcttctggtttacatgaagatggagtgctaatggaaatgcccaaaaccttcagagattgacacgctgtcattttccatttccgttcctggatctacggagtcttctaagagattttgcaatgaggagaagcattgttttcaaactatataactgagccttatttataattagggatattatcaaaatatgtaaccatgaggcccctcaggtcctgatcagtcagaatggatgctttcaccagcagacccggccatgtggctgctcggtcctgggtgctcgctgctgtgcaagacattagccctttagttatgagcctgtgggaacttcaggggttcccagtggggagagcagtggcagtgggaggcatctgggggccaaaggtcagtggcagggggtatttcagtattatacaactgctgtgaccagacttgtatactggctgaatatcagtgctgtttgtaatttttcactttgagaaccaacattaattccatatgaatcaagtgttttgtaactttattcatgaccgtgtttttcacactagcttatggagaagggtgggtcttttatatttgccgaataattgatatccgttacgttaagccggcggaattttgtagttattcgccccggaatttccggcctgggatttttatgggtcccgctttccc

SEQ ID NO: 46420 - DNA, 1466 bp, Homo sapiens
ttttttggcaaccagagattaaattattcacattgcagtaaacttctttttaaggtctctgagagttacaataggaacatcatgtgcaaaactgacagccgtccaagggcccagccgacaggactggctctccctgcccgctcggccgggccctccccgagcggggacacactgcagggcttggctgagccctggtggacaaggcaaagagccttccaccccgcactgaggctcgtgtccctcggcagctccctgctccttcacagtagaggacctgggccgcccggggcaatctgcaccgggtgcctctccctggccaccaccaagggctgacacgcaggtctgggcagctccttctgggaaggcctatgacgactgcgcggaaggtgtgggtgcccccccatccactgtccatcatgctgagtcctggtccatgctgcagcccagcgcctcaatgtcgctgctgatgtccgagatcatgcggtcccactcatccccctctgagggtgccgaccggtcatcagagctgcccgtggccctgttcccattggtggtggaactggatgtggtgctcagggcccgccggtgcctgccaaagctgtcagtgatgatgccgcggccatccttcacgccaatggtctccaggaagttctcgaagtgctggctgtccttctcagggatgaagggcctcagaccaagcagcaggaacttgcggctgtccccgtagacgtgccgcaggttgatgcagaactcgtggatagaggccccattgcggtactcgtgcagcagtgctgcaaactgctggatctcctgtgatgacagcttggtgcgcagcgtcagcatgtagtcctgcagcagctcacgtggcgcctggcgctcagctcgctctcactgatggtcttgctgtggggtgatgcaccacccacatccacagattcagggaagcagaaagtgctggcttccacctcgtaggtctccttaatgtccacttttgtagaagagtcatctgtcttcaggaccaccaggtgtgcagcgtcatcccgaacataggagacggcggcgatgtcatggatgggcaccctgaggatgatatcctccccgtccctccaggccagcttgacgttgtacgcagacaggctgagcacagcatcgtgctcctgagtcaagtgtcccggaagctggtgggctctctttgcattgtctatgaaatgcaggatttcagtcctactggagggattcaggtatcctggtatggacgttaactgacctaaatactttacctccttctcaatatagtcgctcagcagtctgtctggctcgacgcgctcaggcaatgacaacaccacagtgtgcagagggcgcctctctgtcaccttctcatgggctttcttatctctactcttttcaccttttaggaatactcgtttaaatggcgagacaattccaggctcattctccatggaata

SEQ ID NO: 46421 - DNA, 4349 bp, Homo sapiens
  misc_feature (1)...(4349): n = a,t,c or g
ggtctcttagaatccattgattagaccagtagcttttggtagtaccatgatgtttccatttgacttttcaaacatttttcagctgaccattaccagctttgttgggggtaaactcaagagagttacatcttttacacattgatttttccagattttgcaaatgtcactataaatggataatattttctaattgggagttgtggcaggggtagttattactgttttttgcttgttcgtgctattttttactttgttactaattgtattttttccaattccaggncatttcataattctgaatcatgtctgataacggagaactggaagataagcctccagcacctcctgtgcgaatgagcagcaccatctttagcactggaggcaaagaccctttgtcagccaatcacagtttgaaacctttgccctctgttccagaagagaaaaagcccaggcataaaatcatctccatattctcaggcacagagaaaggaagtaaaaagaaagaaaaggaacggccagaaatttctcctccatctgattttgagcacaccatccatgttggctttgatgctgttactggagaattcactggcatgccagaacagtgggctcgattactacagacctccaatatcaccaaactagagcaaaagaagaatcctcaggctgtgctggatgtcctaaagttctacgactccaacacagtgaagcagaaatatctgagctttactcctcctgagaaagatggctttccttctggaacaccagcactgaatgccaagggaacagaagcacccgcagtagtgacagaggaggaggatgatgatgaagagactgctcctcccgttattgccccgcgaccggatcatacgaaatcaatttacacacggtctgtaattgaccctgttcctgcaccagttggtgattcacatgttgatggtgctgccaagtctttagacaaacagaaaaaagaagactaagatgacagatgaagagattatggagaaattaagaactatcgtgagcataggtgaccctaagaaaaaatatacaagatatgaaaaaattggacaaggggcttctggtacagttttcactgctactgacgttgcactgggacaggaggttgctatcaaacaaattaatttacagaaacagccaaagaaggaactgatcattaacgagattctggtgatgaaagaattgaaaaatcccaacatcgttaactttttggacagttacctggtaggagatgaattgtttgtggtcatggaataccttgctgggaggtcactcactgatgtggtaacagaaacagcttgcatggatgaagcacagattgctgctgtatgcagagagtgtttacaggcattggagtttttacatgctaatcaagtgatccacagagacatcaaaagtgacaatgtacttttgggaatggaaggatctgttaagctcactgactttggtttctgtgcccagatcacccctgagcagagcaaacgcagtaccatggtcggaacgccatactggatggcaccagaggtggttacacggaaagcttatggccctaaagtcgacatatggtctctgggtatcatggctattgagatggtagaaggagagcctccatacctcaatgaaaatcccttgagggccttgtacctaatagcaactaatggaaccccagaacttcagaatccagagaaactttccccaatatttcgggatttcttaaatcgatgtttggaaatggatgtggaaaaaaggggttcagccaaagaattattacagcatcctttcctgaaactggccaaaccgttatctagcttgacaccactgatcatggcagctaaagaagcaatgaagagtaaccgttaacatcactgctgtggcctcatactcttttttccattttctacaagaagccttttagtatatgaaaattattactctttttggggtttaaagaaatggtctgcataacctgaatgaaagaagcaaatgactattctctgaagacaaccaagagaaaattgcaaaaagacaagtatgacttttatatgaaccccttctttagggtccagaaggaattgtggactgaatcactagccttaggtctttcagcaaacagcctatcagggccatttatcatgtgtgagatttgcattttactttgctgactttgttgtaatagatcccattcattgtcccctttggggtatttccaatacttgaatggcagattggagtttttcagagtatgtgtttcatctgctagtctttctctccttcatagcttttcttttcctggacttgctccttttgagttgcttttgcgtttctcatgcctaggcaagtgtaatagaaattatgtagctccttatgttggcaaaggagctctatatagtttcactttgtataaaagttaggaccagctgttgttacatgtaatattttagttcagaacttgacctgaaggaagggaagaaaagtatgtgatttttaccttttttaacaaatgtgaaaaagtcagttttagaaatttcgtggtagtaagttcggcatttgttacatgtatagagagaagactaataatctctatttataactaaatcattgagatagaaaaagattcccattgactgtagacttcttcccattttgtcttcccttctgcctgtttccccttcaggcttggctctaggaaccaaagtgatttgttgttgttccaacctgggctttgtgactttggttagtgccactaccttcttccctcctttcccccttcaatttggaaataaatttctgtatatgttgcaattttaggtttaggtttgttctttttctttttcattaatcctctctcacctcacagataccccctcccatggcaaataatataataaccagtgaattttcaggaatttaaaaattagcttttttccacttaaaggagaaaaatatttgggactagcagcagaggcagtaagagatgtgaaccttggtgagctctgatacagtgagaagagattatactcatgaaagagaatgttagtgttacagagaagcagccgatagcaaatcgactgtagagacttggcggcggtggcattgccccaggtcgtcagcagtgtggtattatctatgagaacttgagcgacagagtatttcttgatgaatttatagatcatttgagatgttgagttactttagtttagttttgttttgttttttcaaataagtagagactattgtaaaaaacgagaaaggaaaatgaaatgtgcgtgttgatagcaataatttgtttcttttaaagattctaaaaggtctgagacctgtagcattaattatttgagtgccctcccttctcccctcccctcccttttctcttctcttttttcctctcctctccttctcctttattcattgttttgcttttggagtgggtgttgttcaagtatctgtggtttggttctggcattttgttcccaccatccccttcccccattaacttcccccctgcttgccatcctgcagtagtataaatcatgaataaaaaataattttgctgttgtagtatacattggagaaactggcaggttttatttccattattttatttccactatatctatgataagatgcaattataaggagagaagtgactgttttttattgataaggcaagattttcagaaaaatgagtaaaataattaatgaaacatatttagagcacttaatggtctctgttttcaatataattcttgatttcatttttctctggaatatattggccttctacagctattactgaattatagaaactggtttatttctggcagaaagctgcagtgccacctgagttccaaattttaccattctttgtaaacagttggatggattatgataaagaagatgctaccaatgaaatagaaaaccaacgagatgagaagactgtgatcctcatgtactcagaggcacttccctcctaagtcaaagaccatcctcactgactatgtgccaacgcctcgtttcaggcttgtgactcaacaaagggcttttccattgatagaagcagtttgggatttgtagttgcgacttcttcgatagttacctgcacgtccattgctggcaactgacttgtcattaaaacctggctctttggttaagggagctacgctgtggtttattcttaagttacgtggataaactaacctctaacagaaatatactttggttaattttgaaatgtgtcatttttaaacaatcttaaaagtaatacagaattgtgatttattaattttaaaacattcagaacttgttgaaagaaaaattatatctgaatc

SEQ ID NO: 46422 - DNA, 327 bp, Homo sapiens
ggttgagccaccgcacccagccgaaaaatcttatttaagcctgaccttgggagagttactcttatgcttaggatatagaaagctacaaaatacattgtttccatcataacaacaggaaaaagccagatagataagccacaaaaacataacttttcttgagtccagcagagagctgaagtcaaaaggtaaccaagtaatcaagtaatctgatttcaaaagaggaaccagcccctccagggagaaaagggacataagaacagtctcagctgtagcagggcccagaaagaataggctgccatcacaccagctggtaagaatgtaccagct

SEQ ID NO: 46423 - DNA, 338 bp, Homo sapiens
ggttcatgtctgtatcccaagtgcccagaacagtttctggcattgtagataattaagaaatgtttatcaaatggctcagtttcatttgtggttttctctcccttaaaaacaaagaaatagcctgggtgcggtggctcacgtctgtaatcccagcactttgggaggctgaggcaggcagatcacttgaggtcaggagtacgagaccagcctggccaacatagggaaatcctgcctctactaaaaatacaaaaattagctgggtgtgatgatgcatgcctgtagtcccagctacttgggaggctgaggcaggagaatcgcctgaacccaggaggtggagg

SEQ ID NO: 46424 - DNA, 2199 bp, Homo sapiens
  misc_feature (1)...(2199): n = a,t,c or g
gctttgacacggatcggcccctgctcagcaccttagaggagtcagtggtgcgcatctgctgcatccgcagctttggtcatttcatcgcccgcctgcaaggcagcatcctgcagttcaacccagaggttggcatcttcgtcagcattgcccagtctgagcaggagagcctgctgcagcaggcccaggcacagttccgaatggcacaggaggaagctcgtcggaacaggctcatgagagacatggctcagctacgacttcagctcgaagtgtctcagctggagggcagcctgcagcagcccaaggcccagtcagccatgtctccctacctcgtccctgacacccaggccctctgccaccatctccctgtcatccgccaactggccaccagtggccgcttcattgtcatcatcccaaggacagtgatcgatggcctggatttgctgaagaaggaacacccaggggcccgggatgggattcggtacctggaggcagagtttaaaaaaggaaacaggtacattcgctgccagaaagaggtgggaaagagctttgagcggcataagctgaagaggcaggatgcagatgcctggactctctataagatcctagacagctgcaaacagctgactctggcccagggggcaggtgaggaggatccgagtggcatggtgaccatcatcacaggccttccactggacaaccccagcttgctttcaggccccatgcaggcagccctgcaggccgctgcccacgncagttggacatcaagaatgttctggacttctacaagcagtggaaggaaattggttgatactgacccccaggccctgcagtggggctgactccagatctctcctgccctccctggcagccaggaccagcacctgtagtcaccccaccacacgcagactcatgcacgcacacaggagggaggcctagctgctcaaaggctgcagggagggcccaggagccggctgggagggtggggtccctttgttgccaagacgttaggaaagcgaggaaagtgcttggattaggagagtcttgtgggcccctggccagccttcctgcctcagctcccctgctgtctccaggggcaggtggtaggcatgggtaccctgcatttcactggagtgggttcttggatctctgaggggaaggaacagcaaaagaggcccttcttcctcacccaagatgcagggtggttggggccaggagtttggaccctctaggtcttgggggaagagctgggtaatacctggtgtctgagtgattctctgcagaccctttcccctcctcaaggatcacccatcctcctttcagccccctttatggggaccaggcagctctggagccagccacaggggctgttagagaagcaaggcctggagtggcctgcaccgagtagcagggtcagggttcgtgtgctcctcctcctgctgcaggggctgcacatcccattgccccacttctgctttgtgtctccctctgtctagcttccagggcagggagcaggccccacctagggctgcaggcagtctggcctgtgccagcacggtctcctgtgcccaccagccccacaggtgctgtgctttgtgctcttggctgctgtgctgggacagaatgggatgccaggaagagaagaaagggggtgcagtctgaggccaccaccccccttcctatctaagggagggctgaagacaaggggccggcattcagtgggcagcagaaaggagaggccccttgaagctgctcagtcagaggcccccgtccctccttttgccttccgcaggactgaagacctgaaggggctggctttaggagtgttgaggtgaatatctgggagcagagatcatgaatagctcagggcagtgaatggcgcaccaagagcagggctgtgtgtgggaggctgcagccaggattgcctcagctcctccccctcaggctgggaggatagcacaggctaggggctcggggtggagggtctcagctctgctgcccccaccccagtactagcctagcttcccaagctgtggcttagaggatagttggcttcctgcctctctcctctaaaatagcaagtctgggaaatcctggggtgagtggagtcaccccactcccagttgctggcagagactgagactaaagcatcacttaataaaccccccaagcccaaaaaaaaaaaaaaaaaagtcgacgcgg

SEQ ID NO: 46425 - DNA, 3342 bp, Homo sapiens
cagctggaattcggggcggcggcgcagactgggagggggagccgggggttccgacgtcgcagccgagggaacaagccccaaccggatcctggacaggcaccccggcttggcgctgtctctccccctcggctcggagaggcccttcggcctgagggagcctcgccgcccgtccccggcacacgcgcagccccggcctctcggcctctgccggagaaacagcaggatggcccaatggaatcagctacagcagcttgacacacggtacctggagcagctccatcagctctacagtgacagcttcccaatggagctgcggcagtttctggccccttggattgagagtcaagattgggcatatgccggccaagaaaaagaatcacatgccactttggtgtttcataatctcctgggagagattgaccagcagtatagccgcttcctgcaagagtcgaatgttctctatcagcacaatctacgaagaatcaagcagtttcttcagagcaggtatcttgagaagccaatggagattgcccggattgtggcccggtgcctgtgggaagaatcacgccttctacagactgcagccactgcggcccagcaagggggccaggccaaccaccccacagcagccgtggtgacggagaagcagcagatgctggagcagcaccttcaggatgtccggaagagagtgcaggatctagaacagaaaatgaaagtggtagagaatctccaggatgactttgatttcaactataaaaccctcaagagtcaaggagacatgcaagatctgaatggaaacaaccagtcagtgaccaggcagaagatgcagcagctggaacagatgctcactgcgctggaccagatgcggagaagcatcgtgagtgagctggcggggcttttgtcagcgatggagtacgtgcagaaaactctcacggacgaggagctggctgactggaagaggcggcaacagattgcctgcagttggaggcccgcccaacatctgcctagatcggctagaaaactggataacgtcattagcagaatctcaacttcagacccgtcaacaaattaagaaactggaggagttgcagcaaaaagtttcctacaaaggggaccccattgtacagcaccggccgatgctggaggagagaatcgtggagctgtttagaaacttaatgaaaagtgcctttgtggtggagcggcagccctgcatgcccatgcatcctgaccggcccctcgtcatcaagaccggcgtccagttcactactaaagtcaggttgctggtcaaattccctgagttgaattatcagcttaaaattaaagtgtgcattgacaatctgtgttcttacaaagactctggggacgttgcagctctcagaggatcccggaaatttaacattctgggcacaaacacaaaagtgatgaacatggaagaatccaacaacggcagcctctctgcagaattcaaacacttgaccctgagggagcagagatgtgggaatgggggccgagccaattgtgatgcttccctgattgtgactgaggagctgcacctgatcacctttgagaccgagggtgtatcaccaaggcctcaagattgacctagagacccactccttgccagttgtggtgatctccaacatctgtcagatgccaaatgcctgggcgtccatcctgtggtaacaacatgctgaccaacaatcccaagaatgtaaacttttttaccaagcccccaattggaacctgggatcaagtggccgaggtcctgagctggcagttctcctccaccaccaagcgaggactgagcatcgagcagctgactacactggcagagaaactcttgggacctggtgtgaattattcagggtgtcagatcacatgggctaaattttgcaaagaaaacatggctggcaagggcttctccttctgggtctggctggacaatatcattgaccttgtgaaaaagtacatcctggccctttggaacgaagggtacatcatgggctttatcagtaaggagcgggagcgggccatcttgagcactaagcctccagcaccttcctgctaagattcagtgaaagcagcaaagaaggaggcgtcactttcacttgggtggagaaggacatcagcggtaagacccagatccagtccgtggaaccatacacaaagcagcagctgaacaacatgtcatttgctgaaatcatcatgggctataagatcatggatgctaccaatatcctggtgtctccactggtctatctctatcctgacattcccaaggaggaggcattcggaaagtattgtcggccagagagccaggagcatcctgaagctgacccaggtagcgctgccccatacctgaagaccaagtttatctgtgtgacaccaacgacctgcagcaataccattgacctgccgatgtccccccgcactttagattcattgatgcagtttggaaataatggtgaaggtgctgaaccctcagcaggagggcagtttgagtccctcacctttgacatggagttgacctcggagtgcgctacctcccccatgtgaggagctgagaacggaagctgcagaaagatacgactgaggcgcctacctgcattctgccacccctcacacagccaaaccccagatcatctgaaactactaactttgtggttccagattttttttaatctcctacttctgctatctttgagcaatctgggcacttttaaaaatagagaaatgagtgaatgtgggtgatctgcttttatctaaatgcaaataaggatgtgttctctgagacccatgatcaggggatgtggcggggggtggctagagggagaaaaaggaaatgtcttgtgttgttttgttcccctgccctcctttctcagcagctttttgttattgttgttgttgttcttagacaagtgcctcctgggtgcctgcggcatccttctgcctgtttctgtaagcaaatgccacaggccacctatagctacatactcctggcattgcactttttaaccttgctgacatccaaatagaagataggactatctaagccctaggtttctttttaaattaagaaataataacaattaaagggcaaaaaaacactgtatcagcatagcctttctgtatttaagaaacttaagcagccgggcatggtggctcacgcctgtaatcccagcactttgggaggccgaggcggatcataaggtcaggagatcaagaccatcctggctaacacggtgaaaccccgtctctactaaaagtacaaacaattagctgggtgtggtggtgggcgcctgtagtcccagctactcgggaggctgaggcaggagaatcgct

SEQ ID NO: 46426 - DNA, 1184 bp, Homo sapiens
ttttttttttttgaaggagaaaggctttaataatattaaaaataggcaaggtaatgcttttcatagtatagtaagatttgcctaataccatcttatttctttgattaaaagttacttagcttcagcatgcgtgtacattcaaaatacaaaattaaagcatgagttgtcattaatttgcagaattctatgattgaagcctctaaatgaattgtgcaggagagggagtttgtaaacaactgactacagacattcacattgggtcatctttaaaaagctggactctgcttttggatgcttctcggaggcgagttggattttggactgaagtactgtcgttccattccttttttttgaggtgttatgagtggggctataacatcgcccatcctgcggcttggtgaaatttctgtctgcacaccactgaacaaaatattgtcttgcggcatacaaactctttctgtccaccttcttacaatatactcgaatcagctgctctgcaaatttctctggcagaagttgtgaaacctggtttttagtaatcctgattgctctgttgggggcagtcttacaatagaagctaacatgatcaattggattcttttcttgcattccataatccatgttgataacatccactataaaatcttcagccttcagtttcacgtctagcaatactttgggtttagcactggcaacctcttttggaagagattcatagtcctcccttttaatctttatttgtcctgttggctgcgtctcacccacatacttgaatagattacggtattcaatttgttttaaaatctctcgtgcgtctttcaatttgggatcagtagagtataaaatctccagaaaaatgttatctgtcagcttagtataggcttccatgtcgtcaattgctgtagaaatgcgatacttttttcctccagcacctgtaatctctatgtagtcatctgctttgaggaaagcatctgtaatcattgtatcaataatgttgccaactttgtgttgataagctctacggtgtaaagagttgcgagtgtggaacatgtcatacagatttccaacttccttatctctagcacaaatacgcaactcattgtctacttcacagacacgggcaaacttaataaagcgcttgtaatcaaaattattttggattccaagatgatggcagtccctgc

SEQ ID NO: 46427 - DNA, 730 bp, Homo sapiens
ctgctttgcttgcttttccctgaaaggggtctgtcttttcacgggagtttctctaacgtgctttgcagagtgatgcttgccttactgcaggccgctgattgttttgctaatgctttttatctttgctttgggaaactgcagatctgaagctgtcttatttatggcaacttctgtttgaggccctaatgcttatgttggtgtggaacatcaaaagaatgcttcttaacccattttcaagccccaaaaagttgatatttcactagaccttagcttttcagctgttggagaagtatgcgtttttccagaaccattgtccattcactttagtgctactcaaaagagctgctcccagaaagctctggaggataaaaacagggcttccttatctggggatttgctgttaggctgacagtgaccagctggtgacaagtgtgacgccgggcacagcagtcctgtgaggctggtctggtgtcttgctggttccgtctggtcagaattaaagcagccccccgggaaagttggcctagaatgtagaacttaaaatggcagtcctctttttttctttttggttcacatatatttaatgtaatttaggtacacttttttacatctgtcagatttgaatgaaataactgatgtttttattgaacattgtgttcatgcttttgaagaattaaactgctttttctaaaggtgacgtgggattgtgtgtatgtgaacatgaatgtct

SEQ ID NO: 46428 - DNA, 782 bp, Homo sapiens
  misc_feature (1)...(782): n = a,t,c or g
gggtatctgtacccctctaagaccgcatggcaagaatacaattttatatttaatagtgatcagcatggatgttggtgcgtcacaaacattgactcagcagtgtctaaacctgggcatttagaacaaggcctcacagaatcttctggaagtgcttcaaactcctttccaaacctagtcgtcagttgttttttgtaaccttcccatgttaggcctgggtggatcccctcttaaggctgtactttagggaaatattttttatcttcatatcactttatctgtcattcattctcctattccctgttggctgcatggggcagattaaaacagactctgattggactaattagaataattacttcaaggctaattgcttacttgctgctatctttaatcactgctacgtggtctgtggtgtggtggccacatgcccagagacccaggcctaggccagncgtctggaaatgactgtatcacccaggcacggggcatgcactggtgagctcagcctgtgactcttccagttaacggttggtattgggtggagtgggcacccctgtcagttctgggatagtctgatcttgttcagctggttgaaagcaaaatttagctttctggcttaaaatagttgggaaagtacggcagataggtcctgggccacatctcttgtgtggactcttctgattccactggagggggaggaaccacaggatgaagtcagggctgtgcaccgtcaggaggagctctgggccaggggggttggctgccttgctgctgcagacctg

SEQ ID NO: 46429 - DNA, 1889 bp, Homo sapiens
gaccgatgggagcttctccaggcccaggcattgagcaaggagttgaggatgaagcagaacctccagaagtggcagcagtttaactcagacttgaacagcatctgggcctggctgggggacacggaggaggagttggaacagctccagcgtctggaactcagcactgacatccagaccatcgagctccagatcaaaaagctcaaggagctccagaaagctgtggaccaccgccaaagccatcatcctctccatcaatctctgcagccctgagttcacccaggctgacagcaaggagagccgggacctgcaggatcgcttgtcgcagatgaatgggcgctgggaccgagtgtgctctctgctggaggagtggcggggcctgctgcaggatgccctgatgcagtgccagggtttccatgaaatgagccatggtttgcttcttatgctggagaacattgacagaaggaaaaatgaaattttccctattgattctaaccttgatgcagagatacttcaggaccatcacaaacagcttatgcaaataaagcatgagctgttggaatcccaactcagagtagcctctttgcaagacatgtcttgccaactactggtgaatgctgaaggaacagactgtttagaagccaaagaaaaagtccatgttattggaaatcggctcaaacttctcttgaaggaggtcagtcgtcatatcaaggaactggagaagttattagacgtgtcaagtagtcagcaggatttgtcttcctggtcttctgctgatgaactggacacctcagggtctgtgagtcccacatcaggaaggagcaccccaaacagacagaaaacgccacgaggcaagtgtagtctctcacagcctggaccctctgtcagcagtccacatagcaggtccacaaaaggtggctccgattcctccctttctgagccagggcaggtcggtccggccgcggttcctgttcagagtcctccgagcagctcttccccttcagcttctcctgctcctcctcatcgggcttgccatgccttgtaccaatgtcagaggaagactacagctgtgccctctccaacaactttgcccggtcattccaccccatgctcagatacacgaatggccctcctccactctgaactaagcagatgccatctgcagaagtgctggtagcataaggaggatcgggtcataagcaatcccaaactaccaacaagaggaccttgatcttggcgaaagccctcgggtgtggcagctttagccctcctccagatcacatgtgtgcaaattatggcttcagaggtggaagataaacagtgacgggggaacaaacagacaacaagaaggtttggaagaaatctggtttgagactctgaaccttagcactaaggagattgagtaaggacctccaaagttccccggactcatgaattctgggcccttggcccattctgtgcacagccaaggacttcagtagaccatctgggcagctttcccatggtgctgctccaaccatcagataaatgaccctcccaagcaccatgtcagtgtcgtacaatctaccaaccaaccagtgctgaagagattttagaaccttgtaacatacaatttttaagagcttatatggcagcttcctttttaccttgttttcctttggggcatgatgttttaacctttgctttagaagcacaagctgtaaatctaaaaggcacttttttttagaggtataaagaaaaactagatgtaataaataagatcatggaaggctttatgtgaaaaaagttgaatgttatagtaaaaaaaaaaagatatttatgtatgtacagtttgctaaagccaagttttgtttgtattgatttctttgcatttattatagatattataaaat

SEQ ID NO: 46430 - DNA, 2037 bp, Homo sapiens
  misc_feature (1)...(2037): n = a,t,c or g
tttttttttttttttttttaccagggtaaacccgtatttatttactagcactgttaaaacattacacaaaacacattcaagtggcaagtaattataatgcaagcccttgcatggcaatccaaatttattgaactactgatgctaagttatacaaaattgcaccactttaattaaggcttttagtttacatttggccacctcaaagtagttgtaacattaggttggtcaatttaaatactgtggctccctgttggatagacacacaatctttacatccaaacattaatgcatacaaagcaacaaggcattgttaaataaaacagcaatagttactgcaaattaggccttgtgaccaattacatatgattaaaattacttcccacattcacatccacagtactcgtccaccatttaacatctcaaccaaaacgttacacatgtgaaacaatcactaacaggcaaaaatactaaacctgtatatttggtattgcaaatacacttatgcatgagcaagcaagggattcacagtgagaatctacagctgcagaagcctgaaaatgatttacaaaaattgttaaatcattaaaaaattgtttgaaaatatacacttcttgttgtagacccccactgtacacacgactataaacattgttccctatgtaaacaaaaaaaggaaacatataataagagatttgaaaagtctggacatttccttcccaacagatattaaaggcaacgtctttaatctaagacattatactgaaaggactatcatgttttaaagacaagatcaccgtctccacaggttttttaaaaattaaaaaaactatatagctgtgttaatcaaagcgcttattttgtacaataataatgaccttgaatttcttaaaaaaaaattacaataagctacaagtatcaaagaagcgaagttatctggagtagtctatataggagctctttggactttcttttattatgctaaaatagtggtgcttttaggatttacattattgtactctccaatacaaagtatggggcatgttaaagtatacagtacaccattttcatacatgtacaacattggtggatgaagaatgtctcttagcagtaatactggatgtagcctctggttttaccagctgcaaactctaggactattatataagtaaaaatctctcttgtgatactggaaagtgattagaatgtgcaaactgatatagtagctttcatccgcctcttaaagggtaccaccacaggaaagtccatttaagatgttggtaggtttaaccaaagttggaatgctggcactgttgaattgggcaacagttccttcagacctggctcagagctacaatgcatttagtatattaaagcagctgacatgatgactttttgcgagccttcccaggcactggagtttttctgttaatttgccgcactaggtcataaaagatctcattaacatttatttttgattttgcagaagattctaagaatgcacagttgttccattgtcttgctagattttgaccttgttccttccctacaactctttcatcttccaagtcacacttattaccaacaagaatcattggaacatcatcagtgtctttaactcgaagaatctgttctctcaggtcttgtaaatcgttaaatgtggactgtgctgtgatggaataaactaatgcaaatccttgtccatttttcatgtataaatccctcattgctgtaaattgctccgttcctgcagtatccaagatttcaagcatacactgttgtgcatctacttcaacttgctttctataagaatcttctatcgtaggatcgtatttttctacaaaaattccttgaacaaattgtacagtcaaagcagactttccaacgcctcctgagccaagaacgactagcttatactcacgcatgatgcaagcttgtcaaaacctagtactctgcgaacctctcacgctgtcaccgggtccctgcagccagctgtgcccctgcgtccccccgggtcgctactctatggnccacgcggtc

SEQ ID NO: 46431 - DNA, 458 bp, Homo sapiens
  misc_feature (1)...(458): n = a,t,c or g
anatcccttnngtttggataaccgttatgacatgattacgaatttaatacgactcactatagggaatttggccctcgaggccaagaattcggcacgaggccgatatgtacaacagaatgaccagttcctgccaccggaagtgtgtgcctcctcactacaaggaagcagagctctccaagggcgagtctgtgtgcctggaccgatgtgtctctaagtacctggacatccatgagcggatgggcaaaaagttgacagagttgtctatgcaggatgaagagctgatgaagagggtgcagcagagctctgggcctgcatgaggtccctgtcagtatacaccctggggtgtaccccaccccttcccactttaataaacgtgctccctgttgggtgtcatctgtgaaaaaaaaaatannaaaaaaanaaacaaaacanatnacnnnaanaaaagantttttttt

SEQ ID NO: 46432 - DNA, 3409 bp, Homo sapiens
cacattcctggggagtcctcagctgcccagcatctgattagaaccatatctctcgccgggagtgggccgcgcggctccgaagctccccggccggcggtagtttaagcgaggccccgccgcatccgctgcgctgtagcctggaggctccgggcgcggggaagtcatgctcgcttcacggaggcaatagctagccggtgtctgtgggaggttatgtttatttgagacttctccatcgggatcgcctggtgtcaccaagtgtccactggtactgaggtttgctgcctgccttcttgccatgtctaacgaagtagaaacaagtgcaaccaatggtcagcccgaccaacaggccgcaccaaaagcaccctcaaagaaggaaaaaaagaaaggccctgaaaagacagatgaatatctcttagcaaggttcaaaggcgatggtgtaaaatataaggccaagctgattggcattgatgatgtgccagatgcaagaggggataaaatgagccaagactctatgatgaaactaaagggaatggcggcacgtggtcggtctcagggacaacacaaacaaaggatctgggtcaacatttccctttctgggataaaaataattgatgagaaaactggggtaatagagcatgaacatccagtaaataagatttctttcattgcccgtgatgtgacagacaaccgggcatttggttacgtgtgtggaggagaaggccagcatcagttttttgccataaaaaccgggcaacaggctgaaccattagttgttgatcttaaagacctttttcaagttatctataatgtaaagaaaaaggaagaagaaaagaaaaagatagaggaagccagcaaagcagttgagaatgggagtgaggccctaatgattctagatgaccaaactaacaaactgaaatcgggtgttgaccagatggatttgtttggggacatgtctacacctcctgacctaaatagtccaacagaaagcaaagatatcctgttagtggatctaaactctgaaatcgacaccaatcagaattctttaagagaaaatccattcttaacaaacggcatcacctcctgttctcttcctcgaccaacgcctcaggcatccttcttgcctgaaaatgccttttctgccaatctcaacttctttcccacccctaatcctgatcctttccgtgacgatcctttcacacagccagaccaatcgacaccttcttcgtttgattctctcaaatctccagatcagaagaaagagaattcgagtagctcgtctactccgctgagtaatgggcccctgaatggtgatgttgactactttggtcagcaatttgaccagatctctaaccggactggcaaacaggaagctcaggcaggcccatggcccttttcaagttcgcaaacccagccagcagtgagaactcaaaatggggtatctgaaagagaacagaacggcttctctgtcaaatcctccccgaacccttttgtgggaagccctcccaaaggactgtccatacagaatggcgtaaagcaggacttggaaagctctgtccagtcctcaccacatgactccatagccattatcccacctccacaaagtaccaaaccaggaagaggcagaaggactgctaagtcttcagccaatgacttgcttgcatcagacatctttgctcctcccgtctcagaaccttcaggccaggcgtcacccacaggacaacctacagccctgcagcccaaccctctggatctcttcaaaacaagtgctcctgccccagtggggcccctggtgggtctaggtggtgtaactgtcacactccctcaggcaggaccatggaacacagcatctttggtcttcaatcagtccccttcaatggctccgggagccatgatgggtggtcaaccttcaggttttagtcagcccgtcatttttggtacaagtccagctgtttcaggttggaaccagccttcaccctttgcagcctcaactccccctccagtgcctgttgtctggggcccttctgcatctgtggcacccaatgcttgggtcaacaacaagccctttggggaatccttttcagagcaatatttttccagctcctgctgtgtccactcagcccccatccatgcactcctctctcctggtcactcctcctcagccacctcccagagctggccctcccaaggacatctccagtgatgccttcactgccttagacccacttggggataaagagatcaaggatgtgaaagaaatgtttaaggatttccaactgcggcagccacctgctgtgccccgcgcggaagggagagcagacttcttctggggactttgagtggcctttgccagttatttcaacagcaaggttggcattcctcaggagaatgcagaccatgatgactttgatgctaatcaactattgaacaagatcaatgaaccaccaaagccagctcccagacaagtttccctgccagttaccaaatctactgacaatgcatttgagaaccctttctttaaagattcttttggttcatcacaagcctctgtggcttcttctcaacctgtatcttctgagatgtatagggatccatttggaaatccttttgcctaaattctgaacttggtctgcagaccatccagaggaataaaaaggttggccttagtagtcaaaaacaaagctgatagccagacacgttctgatttctgcccttgttccagctttgacgtattatctgttgccttatttctcattgcctcttctacttgtaaaatgcttttcactttctgtctaggttaaagctaaactgaatctatggctttaaataaattaagatcctaaactctctagcttaagtgtaaatgaagtacagtagtttccctactgaaccctgcctcttgtgtccctggaaccttctagaacacctgccttctaccctctggttgggagatgcagccaccacatcccttcatatcatactgttttgaataaattttcaaatccttattgttcagagttgtttgggggttctgtttcagagcataaaacctaaaggttatagtagaacaaggcaccttcttaaaagaaatcttgcttcagaccatcagttacagagaatttcctaaagtaaaattgaagcaactacaacttctccttagacactttggaatctaaccacttaaggacctttttaaagagatagcttctcttctttctgaagatcaatttctcccaaggccaagattgtccttttctcccatttcttgctagctattgcaaatgagggaagaacattattcatctctcctccccttttttttctgattcttttttcagtcagttttgctcctgggttcaagtagtattaccaccctttcacaagcaacagactctcacagggcaaaaaaaaa

SEQ ID NO: 46433 - DNA, 981 bp, Homo sapiens
gctcgacttttttttttttttcacattttctttagtactttattgttttacaagtgaacctttaagtttctccccacctactcccgcagaaaaaggcatattcaattgtcccatactaatttttgaataacctaactctccctttgtttctactaagagaggtttctttttggctacaagtaacaatatacatatacccaaagcaaatggaacaatataaagaatatctcacataacaaaaagtccaaaggtaaagcagttcctggattggttaattcaggaggcacaattcaggtgctttctatctacatcccactattctcagtgtgatagctttcatctccatacttgtcctttcatggccatcagaagggctgttgcagattagcttcaaacatccatatcacatatcttcactgagaagcagaagagggatgctggcaaatccctaacttgtatcaattgttaagagcaacagaaaatttcttattcaaagccttcagacttcctttgtctcgttagcctagattccatcaaatgatcaagtaagccaattaccatgattggcacagaatctaatcaacactcaccctctctaggctagggaagcaccctattctatagcacaaggcagccatacagagttttaggccaaaaaaaaagaaaaaaaaaatggggctttgtcagcaaggaagggagaacgaaatggctgatgggtaggcaaaagaagaataacaaaccaacttatttgaacccagctttttcacacatacaattctcacacctgttttattttgaagttctctattgtgttctattttgatctacttctgtgtcattagctattcctgggtcattaagacttttaataacctttatacatgtatatttggtaggaactttcctaaattttttcaaaattaaaattttttccccaaaacatgtgagaattaggattgcagtcatgcattgcttagcaaa

SEQ ID NO: 46434 - DNA, 854 bp, Homo sapiens
ctcactatagggaatttggccctcgaggccaagaattcggcacgagttttctctgggccttgtcctccgcctttatctgatgctgcagatgtaattctgtgttccgcttgtttgcttcatgttgtgttatgaacatgtccccctcaaatctccctgggagccttccagcgatcagccccctttgactgtgtggctctggccttggggaagagctgagggtctcctgccctaacggatggtttcagggtgtgaaggtcaaaggcctcatcctcatcagcccccagaaccctctgggtgatgtatactcccctgaagagctacaggagtacctggtatttgccaagaggcacaggctgcatgtgattgtggatgaggtctacatgctgtccgtgtttgagaagtctgttgggtaccgcagtgtcctaagcctggaaaggtgaggctcactgacacagctaactcccccagtccctattatcccacggagccctggccactttctggctcagcccacagcgatggcctgcccagagcaattccatttccacccagctggtcccactggtcctcagatctaatgagaagcagggacggttgggctagattagtgattttcaagttgttctgtggaatttctgagaactccaagaagaggcctcaggatcccttaagttagggctgagtggatggcaaattggcctctttgctgtttccttttcctccagagtcgctccagttttattcattcattcatttactcattcatgctctcattcactcagcacctctggagctccttacacacagagtgtgccaaacacctctggatatttaaatgttgggctttttcatta

SEQ ID NO: 46435 - DNA, 904 bp, Homo sapiens
gagataaaatgactcaatctaaaccacgtgaaggaatgtattaccattaatccaaccaaaaatgaaattaaacaatccagagttttgagtgttttttcacacttgtaataaactgaaaaaatatttcaattaaaacaaccatatgccacaaaaagccactcccatcatccacaatactaaagtccttatacaacactagataaatttttatataaaacagtagaaactagcataccattaattagaaacctcaaaatattcagaaaacagtatcaagtactcaagagaaagctcaagaagccaaaacctcaagaatccatacatcctggttgttaccctaaattgtaattaactacccacacatttaatcataatcaactttttcaaagatatacaaatcaatgcatctatttaaaaggactactctttatagttcagaactttacattaacttttatattctactcagcagggtgtctgtctgtactccaaattagctctcatgttccaggaaataaatacaaactcatatgccttgtgatcactgatggcctgcttatgtaattctagtccactaaatgttaattccatagaatatgctcttgattatgtaaaaactctaatttcttgatgaaatactgtaattctccaaaggttacaattttgtaaagatatgcaataactgagtatcactcccatgaaagacaaaaaaagtataattttgttccaagattaacttagtctcatgtatctctattaagtctttcaaggattccagagaatcttttcatatctccatttctggaaagtgaaatcagtatagaagtaatttgggaacttgaaaatggcattcatttttttcagcagatgccaaatttttgaccgacatggttcctcgtgccgc

SEQ ID NO: 46436 - DNA, 1503 bp, Homo sapiens
ttttttttttttttttcttttgaatggatctttttatttctaattttataagatgcaacatctcaccccgttgacacggttagtttgcatgcacacacagagcggccagccgccccgagcctgtgggcaggccagcagggtcagtagcaggtgccagctgtgtcggacatgaccagggacacgttgtacagggtgggtttaccggtggacttgtccacggtcctctcggtgaccctgttgggcagggcctcatgggccaccacgcaggtgtaggtctcccccgtgttccattcctcttcggacacggtcaggatgctgtgggcgaagtaccggcctggggcctggggctcaggcattggggcgctggtcacatacttctccggggacaagggctgccccctctgcatccactgcacgaagacgtccgcgggagagaagcccgtcaccaggcacgtgatggtggccgactcccgcaggttcagctgctcccgggctggtggcagcaagtagacatcgggcctgtgcagggccacccccttgggccgggagatggtctgcttcagtggcgagggcaggtctgtgtgggtcacggtgcacgtgaacctctccccggaattccagtcatcctcgcagatgctggcctcacccacggcgctgaaagtggcattggggtggctctcggagatgttggtgtgggttttcacagcttcgccattctggcgggtccaggagatggtcacgctgtcataggtggtcaggtctgtgaccaggcaggtcaacttggtggacttggtgaggaagatgctggcaaaggatggggggatggcgaagacccggatggctgtgtcttgatcggggacacacatggaggacgcattctgctggaaggtcaggcccctgtgatccacgcggcaggtgaacatgctctggctgagccagtcgctctctttgatggtcagtgtgctggtcaccttgtaggtcgtgggcccagactctttggcctcagcctgcacctggtccgtggtgacgccagaccccacctgcttcccctcgcgcagccaggacacctgaatctgccggggactgaaacccgtggcctggcagatgagcttggacttgcgggggttgccgaagaagccgtcgcggggtgggacgaagacgctcactttgggaggcagctcagcaatcactggaagaggcacgttcttttctttgttgccgttggggtgctggactttgcacaccacgtgttcgtctgtgccctgcatgacgtccttggaaggcagcagcacctgtgaggtggctgcgtacttgccccctctcaggactgatgggaagccccgggtgctgctgatgtcagagttgttcttgtatttcccaggagaaagtgatggagtcgggaaggaagtcctgtgcgaggcagccaacggccacgctgctcgtatccgacggggaattctcacaggagacgagggggaaaagggttggggcggatgcactccc

SEQ ID NO: 46437 - DNA, 1958 bp, Homo sapiens
tttttttttttacaaataattatgttatttattttgaataaaaaagtggccaaaataacaatactaatggctctgtatacaaaccacaacatattcaaggttatctcacatttacaaaactgccattatgtacagcactacatattcacagcaactctattagactctaagtaccagaatcatgtaagcaattgaggggaatcccaaatgagaaagagctaaaaccaatggtagttcatcaattggagaaatggccaaccagcgacttggtaaagaaacagaggttctgttacccttttaacaagtaataactaaaatatgattaccccacagggccttatactgacaaaccaccctccccaaatttccatttcattttctccataatcttccccacttcaaaattttcctaggaacctcagctctaatattagataaaaacgcaggacactgatatgtaatcttcaggaaaagaaggttaagtagtgctaaggatgtgggatgatctggttcaacccaaaaaagccagttcaaacccaagaaagaactctgccctcttctggcaggagtagctttgtagtgttgaacacaggggaagtgaaccacatttcatcctgatgaggcaggaagttactcactcattcttacacgtcatgagcacctacccttgcaaggcactttacattaggtgctgcaggaacaacaaagataaaacaattcctgcccttgaggagcttacaatctagtaatgaaaactatgtacatatatacaatggagagaagtcaccaacttttctggattggggggtattccaagcaaaatgcattgttatcaaacttttttttttcaacaccaaaagtctataaaacattccacctaatcagatggtaagaattgaaaaagcatctcctttccaaaaccttatgtttttagatgactgttctgtttatttcaaaaaaaagtcataggtaaacacatatataattcaaagccaagcacaagatttagtacaggcattgggtaaacataaaacatgtatcactatacacaacacagacttatttttctatatagtcttttctataaacaagtttgatattcactttcatacatcaaagtacaaatctgagtcaaagccttgaaaacaacataattcttaggacgtttagcatttaattttccattagtggagagaaccctaaaccttaccagtctgctaggccaaatgtaaactggtaaagtatgaaatgcctcaaagccatcattatctcttacattatccaatttgaccattttacaggatttttttttaatgaaagtaacaggatttcatgacagtgaggcaactttttactttaaaaataagcataagatttagagttctaaactttaattctaaccaacccatttacagtatttcacttagcctataccttattttagcatgagagtataatcttacactttcgtcaactcttctcaaacccagaaagaatgaataccttcttagatcatgttggcaaagcatatcatattgatctaaacaactctctggttaggaccccagattttatagtaggtcttggccctagagtatagttatgactcagaaaatacaagataagctgaaccacctaattaaaaggattggaggagaaatattcatataccaaaagaattaacctctttctaggacagctttacaaataactactcttctgtcaaatttatttccacagcaagttttcaaaaacagcaccatgttaaaccatctatgcagatggcaggctacatcctatcaatgagacatggactggctaacaagtcctgacgatgatttgtatctgtgccatggaaatgagtttacaatcttctgaaaaaccccacttcttcatcgggatagtgattctgtactactttagataactagaagcaactcagtatttttggagtttgg

SEQ ID NO: 46438 - DNA, 1088 bp, Homo sapiens
tttttttttttatatttaaaacatttattttattatacatatttaaattttagaaagttattaggtagatgtacattcctctgttgctttactttgatcttcagttaccattttccgagatctttccaatagcttatcccatattgtaaaatgtgctcttaagtgaacaggtaaagacacaccctggaatcttcgtatgagacttggctgggtgggttgaagattgtgaactgctgacacttcatactggaaacaaatacttgttcttggaataagagggccctcactcacatcaatgaagtcacctattctgtgtagcttgactattctctcaggggttctgagatgccttctcttctatgaaatctactttgtacttgctgtgttgaaatatttccaatgccacttttgcttcaacttccagagtttcaaatggaagatctttataaattaaagcatgagcatcctttgtgaaggaacgtaagttctcttttgttggcatccactcatcaagtttgctatccaaaactacgtcataacagaaggcaccagaaattacaggaacttctggagctctgaccaaattgaccatatattcatctttggaatggccctctctatcacacagcccatcatccataggcacagggaacgccaatatgccttattcacttctccctggatcacaaatcctttgaaagtaagaaatttaattccacaggactttgttaaaggcttatacatgtcccaaggctgtccatccaccagagcccagaatggacttcctgcaataccactcgcttaaatgcatggcacaactgtagggagttgaaatgtttttattcatcacgaagacagtaaccggggtcagttttcccaacatgcttaacttctatcttctcagttcggggagttaatgataactgcctggctttctctttattaaagagatcattccgcatttctgtcaattctgtcggtgacagctgagaagctggcgatgttgctataaatctccatttgatcccgccaccgggtgcgaccagccagagccgcagcgcccgtgaacccatggccagcgcctccat

SEQ ID NO: 46439 - DNA, 850 bp, Homo sapiens; identical to SEQ ID NO: 592

SEQ ID NO: 46440 - DNA, 2137 bp, Homo sapiens
ttttttttttttactgtcaagcgaaatagttttaattagtaggctgatcataaataaatctacataaaagatttaacagaattacaaagagttttgtgttcctttgtggactcaattcataatatgcattagtcaacctcattctctaactgtgacaaaaagagttgtcatccaacaatgcagcacagtttaagcaattcatatgctatagttacatttttacattttctttacaaatgtaacatttatgtacattatatatagatttttttctatagttcatgtactgaaactctattgtttttacgggggaaatgttggaatttcatttaatgaataagaaacattccttggttaaaaggtaattcatataaacaaataacacgggtaccaatgccttttggcatctcttgccagagttcaaggtccagaaatgttatattaattataagaaaaaagaatttatctaattttacattatgacatatcattccacatagctacataaatttgccagcttgcaatgaacagagcactgtactgccatactactggaaatgtgtagaaaccaattcaaaatatacttggtgaaacagcatcatcgttaccattaatttgagttgaaaaagatctgtcaagttctttcttccccttttactttttaccaaagcctcagacagagtgctgtgcgttgcatcttgtattaacaaatgccttcatttcaaatttctcacgcgcttctctgacagattatgctttacctaggttatagatctttttcttattcaattttattctacttcacttacaaatctgctgctgaacatgaagcaaaaattcatagtaagaaaatgcagcctctgtccggtcttcaatcaaatgctgaaaaaattctgctttggcaggactctcatcttttactatgtgaaggattggacttaatggtctgctgtctctaagccaagttatgaaggatctggctctttctgatgaaagtgtatctagctctggaagatgtgtcattttctgtggtattgatgcaaaattagtatatccaagcacatcctctatgaagttattgtcacagcctttcccaacccaaatgtaaaaaacagagccacagtccataaggaaagcaccttctcttgtcagcttctctgcagacaatttttgaagaggtggctgtggtaacaatcctgtcattaacatgtactgcaccctcatctgtcaatctgtctatcctgtataagttgggatgaatcattttcattagatgaacaagtggcctgaagactttatcctgaacacatggccataatacacgatcatcccagccgtgtgccttgtacccgttcctaaatgctttcctgtttgagaagggcccaaaacatagagaggaaacaacttgagggagctgggcgccatcaatgcagagtgctgtaaatttgagaccagttgagccatatgcagacaatgagtccactacagcattcactaaggcatctcttgcatctgacagacttgatgaaacggaccgatccacagccatgtttgccagaaggcagatggcagcttgtacatccactcccgcatatacatctgctagtgaacttaccactggcaaacaaagtgtatgtactctaattctccgctcacctttgcttgatgtatataatagggctgtttgaaaacatactaaggaagtatctgttaaactttcttcaattgacaactgcaccgcaaatccagcatcaggattgatgttggcaagggataacaaatcagtagaacggacaaagaagttaccgtgaaaagtgtgcattgaaagacctttagtacaccttattctcataacagcttcaaacccaatttttcttgtgagataccgttttaggtctttttgtaacttttctgcttgtgaaggattgtgagtatagtggaatgatggataataatagatgcaccctgcagaatacttggacatgcaagctagagaagcaagatcagaatactgtgaacttaaaaggaacaaatccactgcagtttgctgtcccgagcaatctaatgcaagtttcttataaaaatcagttgcagggccaagatgttgtaccacctttgtacttgatctctgcctgtg

SEQ ID NO: 46441 - DNA, 1908 bp, Homo sapiens
tcttcttgtggcgaagggctgtcacagtgagaactgcctctggaactactctgtcctgattcatgttgtgcatccaaaagaatcttctccatgtctccattgtggatggaggatgaggatggtacgtgttccagccccccatttttcccattgccattatcattgccattgctgctgttcatgggtagctccacccaggaactgttgaggccggccggcgggggcagagactgctcattttcctcgcagttgttgtgttgctgcctgagtgccggagacggtcctgctgctgccgcagtcctgccagctgtccgacaatgtcgtcccacctagtcgagccgccgccgcccctgacacaacaacaacaacaactgcgaggaaaatgagcagtctctgcccccgccgggccggcctcaacagttcctggggtggagctacccatgaacagcagcaatggcaatgataatgggcaatggggaaaaatggggggctggaacacgtaccatcctcatcctccatccacaatggagacatggagaagattcttttggatggcacaacatgaatcaggacagagtagttccagaggcagttctcactgtgacagcccttcgccacaaggaagatgggcagatcatgtttgatgtggaaatgcacaccagcagggaccatagctctcagtcagaagaagaagttgtagaaggagagaaggaagtcgaggctttgaagaaaagtgcggactgggtatcagactggtccagtagacccgaaaacattccacccaaggagttccacttcagacaccctaaacgttctgtgtctttaagcatgaggaaaagtggagccatgaagaaagggggtattttctccgcagaatttctgaaggtgttcattccatctctcttcctttctcatgttttggctttggggctaggccatctatattggaaagcgactgagcacaccctctgccagcacctactgagggaaaggaaaagcccctggaaatgcgtgtgacctgtgaagtggtgtattgtcacagtagcttatttgaacttgagaccattgtaagcatgacccaacctaccaccctgtttttacatatccaattccagtaactctcaaattcaatattttattcaaactctgttgaggcattttactaaccttataccctttttggcctgaagacattttagaatttcctaacagagtttactgttgtttagaaatttgcaagggcttcttttccgcaaatgccaccagcagattataattttgtcagcaatgctattatctctaattagtgccaccagactagacctgtatcattcatggtataaattttactcttgcaacataactaccatctctctcttaaaacgagatcaggttagcaaatgatgtaaaagaagctttattgtctagttgttttttttcccccaagacaaaggcaagtttccctaagtttgagttgatagttattaaaaagaaaacaaaacaaaaaaaaaaggcaaggcacaacaaaaaaatatcctgggcaataaaaaaaatattttaaaccagctttggagccacttttttgtctaagcctcctaatagcgtcttttaatttataggaggcaaactgtataaatgataggtatgaaatagaataagaagtaaaatacatcagcagattttcatactagtatgttgtaatgctgtcttttctatggtgtagaatctttctttctgataaggaacgtctcaggcttagaaatatatgaaattgctttttgagatttttgcgtgtgtgtttgatattttttacgataattagctgcatgtgaatttttcatgaccttctttacattttttattttttatttctttatttttttttctctaagaagaggctttggaatg

SEQ ID NO: 46442 - DNA, 1455 bp, Homo sapiens
tttttttttagagtcatgaccttatttatttacaagcacaggataagtccctaacctcccccaaagactgagcaaccctacccagcccagttaaatactgcaactgggggggtaaaaaaggtcgggaggaggaattaagggaaatacaggaataggggaacatatcccacattaaatagttatatacacatcagttcctgtggttctgtacagagcagcggctgaccccacccccacaggacacaatgtggggagaggagactgagggtactgaggccagagccaacctctggtgaagtgcaatagcagcagcaaagtcctaatggtgcacaagagggaggggaacccccagggctacccacccccaccctgccctggaatgtgtaagggacaggaatggctctcagggagcacacaggaaggacaaggctggaaccgtcttcagggcccagttttaagggcaacgttttgcctacttcaccctagacacagcaacccttggaggaaagcagatggtcagcagtgctcttatctgcccctccaaacctaagtgagggcctggttccttcctacctctccccagggaaaaggaaggcagctgcttggcttccttctagaagccccgggagcctttaactaccccagctcccttcgtagtgtcactgtccccaccagggaggggccaggcacagtctgtgggtcatcaggctcaggagaagttctggacagggtggctgaccttcatacaggcccaataaagagcccggcccaaacacagcacagccaacaggatgacaaatgcccaggctgcatagatgcctccatatcgccgtgcatgcttccatgtgccaaaggcaaggccagtggcagtgactgccaaaagcaagccaagcaagaagcagcagatacatctcttacgtgggtatctgcgcccaatagatgacactttcctgcagtgaggacaacgtgccaaagtgcggtctgtgaactctgtccacagaaaagtattcttgcaatgtccacagataaccctgacacccatgggttggggttctggactcagaggtccgggatgcacaggccccaggttgatgattcttttgcagtagggccgagggcatgcaatccgttgggatgtcactttgcagataaggagacagttacaggggcatcgaacatattttttccctgggggtgcattcttgattggggtggcttcattgcagacaccacatttgactacatgctgatgcatcttgccttccacgttgatgagagattggcagactcggcaggtgatcataggggcactcccactgtccgggctagttaagggtgaataggggggtgggtcctccccaggcaacacggctggatgcccctcgggaaacgggggaaatgcggctccgtacggtggtgcggagggggtcaggcctcccccgggcccagccccac

SEQ ID NO: 46443 - DNA, 1465 bp, Homo sapiens
gctggaagcgggtgatgaaggtgctggcaggcgtcctggacagcgtggacgtccgcctcaagatggaccaccgcagtgacctggtgttcctggccgacctgcggcctgaggagattcgctaccgcctgcagcactactttaagttcctgtttgtgcgggagcccttggaacgcctcctctctgcctaccgcaacaagtttggcgagatccgagagtaccagcaacgctatggggctgagatagtgaggcggtacagggctggagcggggcccagctgcagggcgacgatgtcacattccccgagttcctgagatacctggtggatgaggaccctgagcgcatgaatgagcattggatgcccgtgtaccacctgtgccagccttgtgccgtgcactatgactttgtgggctcctatgagaggctggaggctgatgcaaatcaggtgctggagtgggtacgggcaccacctcacgtccgatttccagctcgccaggcctggtaccggccagccagccccgaaagcctgcattaccacttgtgcagtgccccccgggccctgctgcaggatgtgctgcctaagtatatcctggacttctccctctttgcctacccactgcctaatgtcaccaaggaggcgtgtcagcagtgaccatgggtgtggggccagcagctggtggggactggtttcaacgccagctttctgtgcttctgcctgtcattcggagaaactctggctctggggcttggggcttctcaggatcctggatggcagagactgccctcagaagttccttgtccagggtgggcacccacagtgactcagaggacagggctaggcaggagacctgctgctcctcattggggggatctcttggggggcagacaccagtttgccaatgaagcaacacatctgatctaaagactggctccagaccccgggctgccaggattatgcagtccacttggtctaccttaatttaacctgtggccaaactcagagatggtaccagccaggggcaagcatgaccagagccagggaccctgtggctctgatcccccatttatccaccccatgtgcctcaggactagagtgagcaatcataccttataaatgacttttgtgcctttctgctccagtctcaaaatttcctacacctgccagttctttacatttttccaaggaaaggaaaacggaagcagggttcttgcctggtagctccaggacccagctctgcaggcacccaaagaccctctgtgcccagcctcttccttgagttctcggaacctcctccctaattctcccttccttccccacaaggcctttgaggttgtgactgtggctggtatatctggctgccatttttctgatgcatttatttaaaatttgtactttttgatagaacccttgtaagggctttgttttcctaatagctgactttttaataaagcagttttatatataaaa

SEQ ID NO: 46444 - DNA, 481 bp, Homo sapiens
  misc_feature (1)...(481): n = a,t,c or g
cttcagtgcccggctgagttttggagacacacagaccatctgggcacgcacaggctacttggggttcctgcggagaactgagctcacagatgcaaatggagagcgccatgatgccctctacgtggtaggggcactggaagaagccatggagctgcggggcatgcggtaccacccaatcgacattgagacctcggtcatcagagcccataaaagcgttacggaatgtgctgtgtttacctggacaaatttgttggtggttgtggttgagctggatgggtcggaacaagaagccttggacctggttcccttggtgaccaacgtggtcctggaggagcactacctgatcgtcggagtggtggtcgtggtggacatcggcgtcatccccatcaactcccgtggggagaagcagcgcatgcacctgcgagacgggtttttggcagaccagctagaccccatctatgtggcctacaacatgnagtaa

SEQ ID NO: 46445 - DNA, 2398 bp, Homo sapiens
aattggtgataattgaagaaagatccatttcttaagaataatttgatctaaattattatatggaaataaacatacttgtgttaactaaattgatcataaattcttgttcctgcctcacccctcaccccccagagaatagtgagtgactcgtttagattctctgctttttttcagttatgtacaagacttcagcatacattaatgtctttagtttataaatttgccaatgctttaatttccataatttgaaagttaaaagatgtaactaaaatactagcttttttaattcaatttccttttggtggaagttggtatgattgaaaactttgctttttcttgtttaattcttccgccaccccctcttttgagaggaaaggtaatcgtggaatgagttataaattattgcctgtttttcctttatttctttcattcagtggcaaaaaacattttataactcctaagtttttggttaatcttccaacttataccttggtgtgaactctctttttacaccattttcaacactggataaaactttaatgttgactttttgctaaagaactttaatttttccaagaatctagattaacataaggatgttgatatttaaggaacttggaagagtaagtggtgaggctgtatgtatattttttaagagattaccttttaggaaattagtgaacaaacttaaccagtgttctgccttctttgactttgttactggaggatgataatctatttctattagattcgaagtattttggaaaatatttcaagtatatctgaactacttataattcttaaaacagaagtagtcagacaatatttgtatcctaagtgagatatggaaaattactctgtatactaaatgtcaggcaatgaaaatgtaagtttttgtgtagaaaacccattaagaagatgtgtttttctttctgaattagtttatttttccatcacataccaaaatataaaaatcagcctcacatttttcagcaagtttagcttatagccttgataaattcctctgtgcttctgagcagcatccttctgcctctgcttagcagctctgcatttggtggattgctgttgtgagtcattcatccagcactgggccttttaagctgaagattcacccagtgtctaaagttgtccttttcttatagctagctttcaagcatctttcctcctaaataaatatgtgacttgagaaaaaggtaataatgattttgtcagaattctttgaatttatatttactagctacttaaccataaactgctgtccgagattgttaatttcatttatatttattttaattaatttgcatgaatatggacaaagccttttctggggtgtgtgtgtgtgtgtatgtttgttttttaagtcgtcattattcattcgtattctttttctgtgtaatgtaatcatataaagttactttggacagagacccagttaattttctcttttgataggatacatggtttagataaggtataaagtgtccctttttattctagaggcttttcctttaattcagagattagtggagataataacgtcagtcaaggctaatgtggtacatggaacttgctaatggaggttggacattctgtttcagtcttacatggatattgtttcattggtgttgaggaagaaaaaaattagatactaccatgcattgggacagcataattctaatattacattgaatatggctttttaaaaataagtattaaaaagccaatcgttttctccatttatctatcttttttgtttgtttttaatttggttgattgatatgcacccaggccgtcttatttttacttgttaaatgtctgtctaggaagaactgtgattggaaaggaattaattattatacaaataaatctggtaggatatgagtggagtaagtttgcttgaaacagaagtatattttctactttgaatcacctcaccagagtcatctgtcaagaattatgtataacaatttatctttattgcctacatacaacatactttttctgaattaagataacttctatttgtgagttgaacttcattatctgccattttgtggaatcaaccttacattctttggtggaactagagctgattgtcaccacaaggttatatgacaactctgttctaagacttatacctattatatagggttatacgtttttttcttatgcctcagctctgtacctgacaatttatgattcagtggagccaagctagaaggaacaaaggtcatctaacactgtgatggggatgaattcctgagttttacctgcacaatgaggtggtgccccggaattcacaacagagtagtgatagagcataagatggctgctccagatgactcttgggtttagtgtacttgtgattgaacaagat

SEQ ID NO: 46446 - DNA, 809 bp, Homo sapiens
ggcctaccactaacttgaatacattcagaatcacctcctctccccaaaatttgtagaaatagtttttgaggaagccaaaagcaaagcagaaacctttacagtattgtttcttttctctttgttaactgtgtcattacagcaaaatactagcagtctgcctaaacatgttcattgtacatttctcaggctatcaatgaatggaggtttttaaaaagttgaatatttgtctgaacattttatttcaaagttcaaaaaaacagaggctgcaaaattcattttataatggctattttgtgacgataagatgtagttcatgtttttctgtagcactgggcccaaatattctttgtaaagaaaatcgctgcagcaaaaactgttactgtgtttattatatttgtagaagtattagaaaaatattctattttttattcagtgctgcgtaattacccatggtagccaaccctacaaaagacaggttttcacaaattgaggtggaggtgggcggttcagtatctgccactggacttgattataaactgtatttgaatatcagtggtattatcttttaagttgtcagcaagttaccaaggtattcattaaagaacttgtaatatcaaattactatttattcataacaattgatttgatgctaataataattttctttaaactctaccattcattatgtggtaactgtattgaacttactttatttggattttattttaatgtgactagatgtcaccacttcaaaaaatcaatttgttcttagaacctggttgaaaataccaggaaactgttacagacgc

SEQ ID NO: 46447 - DNA, 1666 bp, Homo sapiens
gtagacggaaagaagggaatcatggcaaaagctggcctggaagggatagccagagggatagaatgactctctctctacataccagcagcataccaaatgcgttctctaagttcctacctccttgacctgatcaccctccctcctccaaggaagagctcaaagttcccagccaatagacagcatgaatcaaggaacttgcattatatgtgctcttgaatctgttgtctccatggaccattcctcggagtagtggtgagatggccttgggttgcccttggcttctcctccctctactcagccttaaaaagggcttcttggaactttaccagcagcctcagctttacaaatgccttggtatgtacctctggcaaatgccccaccttggtgatgttgcaacctttccttctgctagggtgtacacctagcctgtgcaggtgtcagctctgctagggagtcactgtacacacaaactctactggaattcctgccaacatctgtcaccctgcagctcctttacagttcaatccaatgatagaaaccatcccttccctttctcccttggctgttcacccagccattccctgaaggccttaccaacaggaatatccaagaagctgttgtcctctctcgaaccctgaccagatcatcagccactgaggccagtggaatttccccaggccttgttaaaacaaagaaagcattgtacttctcagattccccttgtggaaaaaaaaattctgctgtgaagatgaaaataaaaatggagagaaaacactggaaaactattttcccctcctatttacttcctttgctgactgccaacttagtgccaagaggaggtgtgatgacagcctatggaggcccccagatctctctctcctggaggctttagcaggggcaaggaaatagtaggggaatctccagctctcttggcagggcctttatttaaagagcgcagagattcctatgtctccctagtgcccctaatgagactgccaagtgggggctgtagaaaagccttgccttccccagggattggcctggtctctgtattcactggatccataatgggttgctgttgttttggatgaaggtaaacgatgcttggaattggaaactgagacttatagagggattattacattattaaaatgcacgtgtgtgtgtgtgtgggtgctgatgggatgggtaaaggcttggggagtcctgaaataaggaaaggaaaccacagagaaacttgtgtcttcctgctctcctctccggctgcctggcagttattaacctaaacagatagccacaagaggttgggacagaggagggtaaaggctcagaaggaggttcaacctctgactcacctgcccatctctgggccctctgctgacacttggatgctattgttgggtggaaagataaatgagagtggagaggtggaggaaagtgactaggatgccatttaggaaggaatgtctgatcatcccgggtccctggaggggacaccttttaatctattgcctagcattaatattttctctccttctatctctgaaatgttttatgaaatgagtgttcttgaattagaaattctgtgggatcaatctttgatggtgagggttttagaaaggaaaaatatagtaaaatgtgtaatttgtcttaataaaatctatct

SEQ ID NO: 46448 - DNA, 1222 bp, Homo sapiens
ctcatagacaccttcagggtgtggggtacagcctccttcccatcttatcccagaaggcctctcccttcttgtccagcccttcatgctacacctggctggcctctcacccctatttctagagccactgcgtctggccttctataattttctggtagtcacgatggaaacaaacaaaacaccttagaaccagagatcgacccccctcaagcaatacatcaattcccttcacaagaaacgtcggggctacatgagtatctgtgttgaatgcggtctgaaatgatcctatggattttccccggctggttgccactactgtacaacattcagtgcccacatccatctgtgccattaagcttttttgagacatgagagatgcctcttccctgctgtatgacatgcatttgggaagttggaaagaaatgacaaaatcagggagaaaacatccaagcttcttacctgtagatagaatcagccctcacttggtgcttattaccagttattcaagaacaataacaacaacaaaattagtagacatccaagaagcacatattaggaccaaagatagcatcaactgtatttgaaggaactgtagtttgcgcattttatgacatttttataaagtactgtaattctttcattgaggggctatgtgatggagacagactaactcattttgttatttgcattaaaattattttgggtctctgttcaaatgagtttggagaatgcttgacttgttggtctgtgtgaatgtgtatatatatatacctgaatacaggaacatcggagacctattcactcccacacactctgctatagtttgcgtgcttttgtgggacacccctcatgaacagggctggcgctctaggacgctctgtgttcactgatgatgaagaaaccctagaactccaagcctgtttgtaaacacactaaacacagtggcctagatagaaactgtatccgtagtttaaaatctgcctcgcgggatgttactaaactcgctaatagtttaaaggttacttacaatagagcaagttggacaattttgtggtgttggggaaatgttagggcaaggcctagaggttcattttgaatcttggtttgtgactttagggtagttagaaactttctacttaatgtacctttaaaatagtccattttctatgttttgtataatctgaaactgtacatggaaaataaagtttaaaaccagattgcccag

SEQ ID NO: 46449 - DNA, 1350 bp, Homo sapiens
  misc_feature (1)...(1350): n = a,t,c or g
gcggccgcgtcaagccggagtgggcgctggctgaggccgcctggcaactctgcgactactacctgccctacgcgctgggcgcggctacgtgctctcggccgacctggtgcactacctgcgcctcagccgcgactacctgcgcgcctggcacagcgaggacgtgtctctgggcgcctggctggcgagataggacgtccagcgggacatcgacccgcgcttcgacaccgaataccggtcccgcggctgcagcaaccagtacctggtgacgcacaagcagagcctggaggacatgctggagaagcacgcgacgctggcgcgcgagggccgcctcgtgcaagcgcgaggtgcagctgcgcctgtcctacgtgtacgactggtccgcgccgcccttcgcagtgctgccagagaagggagggcatcccctgagcggccgcggcccggcccttcgggacaccntgattcacccggcggcgcttggggcaggtgcccgacgagcgcactacgcnccgccccaaggcccccgtcccgcagccacgcttgtggtcgctgcgtcccgggtctgcgtttgggagacccctgggggttgccggggcagcgcgccgtgtccaggtggaggtgcccgttcctggacctcagcgagcctgacgcgggcccggccgcacgctgacccccgtgctgtccccgaccggctcacggggctgggctccgatcttccgtgtctcttatcagtggcgtttctcacgtctgcgtctcagatctaacgtggtttcacatcaatccgctttcatgggattttggtctctgtccagtgacttcgtggtaaatgtaactcagtgtttgcttgcgacttatttataaatattgtaagtttgtgtcgatgagtgtaagttggcagtgcgcacgtctcggtttttttacatgatttaaggaaagacttttatgtcagaacttggtgcctgtaccgtcaaccccgctgctgcccgtgtttaaacgcaggagaactttaaaactggccatctatcttttcagtgtacaagtcactgaacccattgtttctttctgaagagactttcctttcaagggcttcccatgggtccgcgccacacagggccggtgctgctttattttcagactctgccccagggttccagggaatccgaaccccgggagtgcttgacgcgggttccccaacttttcgcctttaaggaaaacagggaccagccgggcaccaggcccgtctctcacgtacttttaacacatccttgaaagcccctcgtttaatgagaaaagcgaacactgcggtccttgccaaagtaaaatgaagctgccccaggacaaggggttaccatg

SEQ ID NO: 46450 - DNA, 1804 bp, Homo sapiens
ggcgcttcggctcctcccgagccgcctgctagccccgcgccgcactccatccccacaggctggggacgggccaggtgcggctgtgtgggttcgggagcggagttgcagaatccaaggacccattttgtttctttctccgcactgctttatgggaggcattatggcccccaaagacataatgacaaatactcatgctaaatccatcctcaattcaatgaactccctcaggaagagcaataccctctgtgatgtgacattgagagtagagcagaaagacttccctgcccatcggattgtgctggctgcctgtagtgattactttcttgtgccatgttcactagtgagctctcagagaaggggaaaccttattgtttgacatccaaggtttgactgcctctaccatggaaattttattggactttgtgtacacagaaacagtacatgtgacagtggagaatgtacaagaactgcttcctgcagcctgtctgcttcagttgaaaggtgtgaaacaagcctgctgtgagttcttagaaagtcagttggacccttctaattgcctgggtattagggattttgctgaaacccacaattgtgttgacctgatgcaagcagctgaggtttttagccagaagcattttcctgaagtggtacagcatgaagagttcattcttctgagtcaaggagaggtggaaaagccaatgaagtgcgacgaaattcaggtggattctgaagagccagtctttgaggctgtcatcaactgggtgaagcatgccaagaaagagcgggaagaatccttgcctaacctgctacagtatgtgcggatgcccctactaacccccaggtatatcacagatgtaatagatgctgagcctttcatccgctgtagtttacaatgcagggatctggttgatgaagcaaagaagtttcatctgaggcctgaacttcggagtcagatgcagggacccaggacaagggctcgcctagatatgatctatgtctctggaggctttgatggaagcaggcgtcacaccagtatggagcgctatgatccaaacattgaccagtggagcatgctgggagatatgcagacagcccgggaaggtgccggactcgtagtggccagtggagtgatctactgtctaggaggatatgacggcttgaatatcttaaattcagttgagaaatacgaccctcatacaggacattggactaatgttacaccaatggccaccaagcgttctggtgcaggagtagccctgctgaatgaccatatttatgtggtggggggatttgatggtacagcccacctttcttccgttgaagcatacaacattcgcactgattcctggacaactgtcaccagtatgaccactccacgatgctatgtaggggccacagtgcttcgggggagactctatgcaattgcaggatatgatggtaattccctgctaagtagcattgaatgttatgaccctatcatcgacagctgggaagtcgtgacatccatgggaacccagcgctgtgatgctggtgtttgtgttctccgcgagaagtgaccattgttggagcaccatccagagctagtgaccagtccagtggacagttagtgggagaatcaaaaatcctttccagaatgtctgtttctcactatgtgcaccgggtgattacaggcaccagtgcagtgatgattgtacttatttgacacatactccccgtcgtcctggttcttgttcctgagaagggtgggtaacagatattccaggaaaaataatgcacattgaatggatgtgagagaccacattgc

SEQ ID NO: 46451 - DNA, 926 bp, Homo sapiens
aatttttcgagtcactatagggaatttggccctcgaggccaagaattcggcacgagaggcagtgcatcagtcagctctaaatctggtgcagagggttaacagcataacccttgttggcaaaatggaatagatgttaagacctcaaatagggatttgggatgaaacagctgcagttagcactgttatctgagcatgaaagaactggaaacgctccttacgtcgagatgttggaccttgaagccctcctgaggccaacatgcaaatctggctgtgacggttcatctgacacctgtgtaaagctgaccagcctgctctgtacagtgacaatgaggagcccctctcttccttaagtaggaatctgtgaagcaaaatgtttgctgccaaagacaaatcagactgtcagtcattaaaaacagcattagcaggatgaggatagcaatggggaagggttgtgggcaatgcagtaacagggaaatggcttcagaaatggtttgagttggaagacaacattcttcatctctcaggacttctaattccttgatgctaaaagaagaggcatggattctatgagcttccaagtccctttccactttaaccttctacaaatctttcagaggactgcctagtagcaaaggttattcctggacacaggaaagacgggcattacagggaccaaagctctgaaaggtgacttttattaccaacacactggctggaaaagggacaaaccacatcacgggtgagtgatacttctcagtcttctctactcattcaacaaaggaaatgtgggctggggcagaggtcttttttcatttaatactggaaaaatattgaagagcatccatgttcacttatggctggttttgctatagaaattggaaaataaaggccacttttttgaaatccccagtttaattaaaaaaaaa

SEQ ID NO: 46452 - DNA, 2762 bp, Homo sapiens
tcgagttttttttttttttttttaaatggttctttattcataaacttgatgcaagtttacaaaatttactgtacattgccaaataaatctgcaattaaaaataaaatccattaaacaaagcatgccaaatgtgcagctatcagtctgcttgccatcaggatattaaagaattcaacaatgtattcaagatttagccttaggcttaaggaactttactgatttaaagaattctgccttgtcacttgttatctgagcaactgggcaatcagaactttatacaaatgtaatccaagtgaacaagaataccagaaaatctatttactgctctcttaaccaaaatggaatcaaaagaaattaaacacacacaatgtagaaatgacaagtctctcagatgtggtttacaaagttaaaaactgaatctcaaagctaatggcacaagaaacacttttggaactttggtaacttgtttgtgcagaaaaatgtgcttctggatttcttgttaaaagtgcttaagaactagaatttacttttaaatcaaacgtgggtgtataaaaaaatctattaccaaccaaaaaggactgattcaggtaaggcaataaaatggagagtaccttgatttgagtcaggttctataaaaaaattaacatatgtagagtttctattaatctttcaatgtaaaagccattgttttgacatggcaaaaattactgtaagagtctccaaattaagtatctttttgtacttaactgcacagcttttgctcaaggagtctttgtgccaatcactttataagtttattagtttacaaacgattgcaacatcccgttaataaaatggaaacgtaagatgacttagtattttaaataacttgaagctctgtactgtggctcttgttcataagaaacactgaaccaacaagcagcagattcagcccagccaagactctgatgccccagtggaaatcactactcacaagccttaattgatacagttttacactgctttgcctaagaagtacaatacaactcaattaagagtattatcttcaggaaacaattcatatcttcacatagtcattaaaaagtttaacaatttaatgagtaggtttcctatcacattttggcaatatcataaaatggttttagacatgaaagagctattatgatttagaaggccttaaatttcctaaaccaatattgaacatcgattaaacctgtattggctgtaaatggaacaatatattgcaaatccttgtaacccatgggctcaatataggaaagttaccctaaagcctcaacttcagtagcctgatgttgacttggctgctttaaaaagttcacttttcaagaaaaagagataaggagtggccagtatgtgtatttatcaggaaaaatacagtaaaggccccactgctcagtccaagatatctaaaatgagcaaaatgcgaaggctgtaacttatactggatgtcagatgacagattatccactaaaatatctattaactaacatcttcggtactgctgtaataggggcactcaaagcttttgtctgcatgttggaaagattttctttaaagcaacattagtccaaacatacaacagtcaacatatttagccatcttcctttggaggggtgtaccagccatttttctcatgtatctgtacaatggaattataggattgttgggctcttgctagattatattgattcttatttgctccaaactgcactctggctttgcctttgactaaggtggcatttatttgcatgatgaccgattctattgagtaggcactgctccagccctgttttgtgagaagttccatacataatgctcctccacccaatacataccctcctgagagaacaggtaacaccactcgaacaaatggaggatcaaatggaaagttatccttaaaagagaagttaagcaaaatatattctatgccttctttttcttttaagatctgaagatcactgtgcaaaggactatcagggtcaaccttctgcagtttaacatgccagtcatataaactgtcatttatgagttccactgaataaatccctgttttataactctgtgatctgtatatgtccctgagctctttcataagtctatctgaagcttgcactgacccagacactgcaccatttaaatggtcttgcctttgagtcttcctaattttctctaatattgccaaattttctttttcaattccttcatcctctgactttttcccactaataggctcttcttccttcatctcatagtgatctaagtcttctatatcttcagccatctcttcttcttcttcctcttcttctgaagtcacttcttctgttgtcccattctgacccgtgggtagtggttgatctagcatctcaacatccaggtgcttaggaaggttatataaactgcagagttcacatatcaaccacttcaattgctgacgaagcaaattgttgttcttagtatcttctagacgttccagaactgatgtcagatttgggtcttcagaatccacaaaccatatcggtgaagaagatggataggattccgtgatgttgcagtggagcgtgagtggcggcggcagcgagtgcgggctgccctgctgcggcaccaggaactggcagtgcagctcgtccagcttccaactgacgatgcggaatcgctcgtggttcttgtcgaagatggacgccaggaacttcagctcggccttgagccctgacacggacatcttcccctcatctccggcggga

SEQ ID NO: 46453 - DNA, 823 bp, Homo sapiens
gcggccgctcgtccgcccggcttgaggcccgcggggagcgcggcgcaattcgtcggcccgcgggggggcggcctcccggcatcttcgcggcgaccaaggactaccaggaaggggagcggctgggatggcgcgtccgcggccccgcgaggtacaaagcgggcgacctggtcttcgccaagatgaagggctacccgcactggccggcccggattgatgaactcccagagggcgctgtgaagcctccagcaaacaagtatcctatcttcttttttggcacccatgaaactgcatttctaggtcccaaagacctttttccatataaggagtacaaagacaagtttggaaagtcaaacaaacggaaaggatttaacgaaggattgtgggaaatagaaaataacccaggagtaaagtttactggctaccaggcaattcagcaacagagctcttcagaaactgagggagaaggtggaaatactgcagatgcaagcagtgaggaagaaggtgatagagtagaagaagatggaaaaggcaaaagaaagaatgaaaaagcaggctcaaaacggaaaaagtcatatacttcaaagaaatcctctaaacagtcccggaaatctccaggagatgaagatgacaaagactgcaaagaagaggaaaacaaaagcagctctgagggtggagatgccgggcaacgacacaagaaacacaacttcagacttgcagaaaaccagtgaagggacctaactaccataatgaatgctgcatattaagagaaaccacaagaaggttatatgtttggttgtctaatattcttggatttgatatgaac

SEQ ID NO: 46454 - DNA, 826 bp, Homo sapiens
ggagagctagcacatgagcttcaataccctggtgaacacttaacatttttttggttacatttctaatttgatagaaagcatttgtagtcaactgaattttaatgtagccaagaggagaaaaggagtggtttcaaatcaagcgttgtccacacttttagaatgggaaggcatagaacatggtatctcatgggaaagatcatgtttacagtaatgcattccagattaaaaagtaaaaggggcagagagagtagaggctgtttctcagcatgtgaggatctagtgactgtcaccacattatttgaggaaaactgctaccactaccacaggccaggatctttccatttttgactctcaccttctcccagaaccagtcatgctgaatgaccatcactgatcctacggaactttgacaaacgatgaaactagtggaggctttcaatgtagacatcctcagcagaggagtgtagccctcgtactgctgctacaagtcacacgctgagtcacattgctgtctgcagagtgatgtgaacctgtgtatacgtgcagtttcttctttacccttcgtcccttccccaacatcctcagtgagcaaatcgcatttctacctggtgagaacacccctgtaaagagcctactttgttggtccaacacagtgtgtctgcccaaatgccctttattaattaagtcaccttttggggagtaacataatcagtgtaaatcaaatgctgtccccatcccattccccaagaacctgcatcttgagaatttttggctgtgttttgtaaaagctttttgcttttacgctagtggtgatgttggaggagaa

SEQ ID NO: 46455 - DNA, 1293 bp, Homo sapiens
  misc_feature (1)...(1293): n = a,t,c or g
tttttttttgccagacacacacgaaagctttatgtgcagggcccagcctctgggccgccttgcccaggtttccactcaagttgctatttaggatgaaaagcctttggcaagaccctccgccgcactaacgccccctcccccagggccagaacccgcagggaagcaggcccaggacctgctgcagctggcagggtggctatgagactcaggacaccctgggctcctggccagtgactcacagcggtcctccagcaagggcagtggctgggagacacccgtgccgtggagctaggcccagcctggctgggtctcagggctgcttctcttgggtgaccccagcggcccagggtcgttgtgaagatcaacgtggcttgtgggaggagcccggggcccagaaggaagtggggtcaggggctcaggctggccctcgggctgctctgacattgggtgggcactcgctggatggaatcacagttaacacctcgatcccaacacctggactcagaagtggaacaggcgagtgcctgccccgggagaggaaggaggtggcacctgctcccaggggccccactgcagagcacggccactgtgagctgacgacagaatcacagtacagcaataatgtccctatcctcttccagaaccccagtggggccctcaggtcacgcaggacggagccagctgggtgggtcccaccaactcggcatgaatgagacgacggatgaaccgcagccccagcatcaggaggggcgcctgtgtcaacacccacgtgggctgggaccccgtgaatgccagtctggggccgacggacccccagggaaagcctgggtgcaggccaccttgtgcgctgcccaagcctgcaggccccgagaggtcagcctgaggaggcagcctcggctgccggtaatgctgcctgcttcatctgggccacctcccgctccaggtcctcgccggctcgctgcaggagctcacacctctgcctcagcacgttgcccgcctgctgcagccgctggttggcagccacgtaggcccggctttgctggtagagctgctctcccggggcctccgcatcctccatcatcctgaagggaactggggggtcttccggggccaggatggtgaacactggatcctctgccggcgcaccccgcacatcctccaggatctgctccaccgtggggggcgctgggcgggtgggcagcagcacgcgcttctttgccttggagcccatctctctgcctcagtttccccgcggtcaccccagtcgccggcctcttccnacctgggcgcggg

SEQ ID NO: 46456 - DNA, 1903 bp, Homo sapiens
acttttgcttcaccaatgtcttcacaactatcctgatcccgtaccacattctgatcgtaccaagcaagaagctggggggctccatgttcactgccaacccatggatctgtatatcaggagaattgggtgagacacagatcatgcagattcccaggaatgtgctagagatgaccttcgagtgccagaacttggggaagcttactactgtccagattggccatgataactctgggctgtatgccaaatggctggtggagtatgtgatggtcaggaatgagatcacaggacatacctacaagttcccgtgtggccggtggttagggaagggcatggatgatggaagcctggagcggatcctagttggggagctgctcacatcccagcctgaggtggatgagaggccatgccggaccccgccgctgcagcagtcccccagtgtcatccggaggcttgttaccatctcacccaacaacaagcccaagctgaacactgggcagatccaggagtccatcggggaggcagtcaatggcattgtgaagcacttccataagcctgagaaagagcgaggcagtctgacgctgttgctctgtggagagtgtggccttgtctcggccttggaacaggctttccagcatggatttaaatcgccccggctcttcaaaaatgtcttcatttgggatttcctggaaaaagcacaaacctattatgagacattagagaagaatgaagtagtccctgaggaaaactggcatacaagagcccggaacttctgccgatttgtcactgcaatcaacaatactccccggaacatcggcaaggatggcaagtttcagatgctggtgtgcttgggagccagagatcacctcctacaccactggattgccctgctggctgactgccccatcactgcacacatgtatgaggatgtggcactgatcaaagaccatacacttgtcaattccttgattcgtgtgctgcagacattgcaggagttcaacatcacgctggagacgtcccttgtcaagggcatcgacatctgacctcccagcaccagccagcagcaggactgagaaagactcaccctgcagctctgaccttttttcccaaagggacttaagcgattgtgcaggagtaggagacaaaatgtacactcactgtaaaaagaaaactagaggatttttggaataaataatctattttagagtttatttgctgatttgctttttacacactttcatgtgaaagagtgatagggagagggagcgaggctggtgccgcttattttgaagctggtgccctccctcgccgtggccacatgctggaagcctgaggcctccctggactgagcctgtggcactgcgtgcgggacagttatgtttccttgccccgtcgcattaatgaggcccttccacatcatttttaaactaatgtttttctatattaacattattatggatatttggctttcataggccacacacaggtgtgctgcgcgggaagccccatgctccaatcaaagggatttttagtagtgcctctaagcaagcaccgatgagtcagtcccacgtattttcttttttgtcagtattgtttgggaaggagacatgcccgggatgtgtcatcgtgccaaataccacatttcctgttggcacagtttcacagaagtaaacataagcatgttttaacaggtttttcttttcttttttcttttttaaaatgttttatttatttaacccgccattgtgtgtttttaagtattttctttttttaaggaaaggaaaagcttgtcacaatctaactggctatgttattattattaaatttatgttttgcaacttagaaaccagctacagtatggcccacttaataaaacacctgaaacaaaaaaaaaaaaaaaaaaaaa

SEQ ID NO: 46457 - DNA, 3821 bp, Homo sapiens
cggcgctgggctgaggggaggggttgtcttaaaagtctctccttccccctgtaggggcggccggcgagtcccagtgagagcggagggtgccagaggtagggggccgagaaacaaagttcccggggcttcctccggggccgcggtcggggctgcgcgtttgaccgcccccctcctcgcgaaggcaatggcttccaaactcctgcgcgcggtcatcctcgggccgcccggctcggcgaagggcaccgtgtgccagaaggatcgcccagaactttggtctccagcatctctccagcggccacttcttgcgggagaacatcaaggccagcaccgaagttggtgagatggcaaatcaagtatatagagaaaagtcttttggttccagaccatgtgatcacacgcctaatgatgtccgagttggagaacaggcgtggccagcactggctccttgatggttttcctaggacattaggacaagccgaagccctggacaaaatctgtgaagtggatctagtgatcagtttgaatattccatttgaaacacttaaagatcgtctcagccgccgttggattcaccctcctagcggaagggtatataacctggacttcaatccacctcatgtacatggtattgatgacgtcactggtgaaccgttagtccagcaggaggatgataaacccgaagcagttgctgcccaggctaagacagtacaaagacgtggcaaagccagtcattgaattatacaagagccgaggagtgctccaccaattttccggaaccgagaccgaacaaaatctggccctacgtttacacacttttctcaaacaagatcacacctattcagtccaaagaaagcatattgaccctgcccaatggaagaaccaggaagatgtggtcattcattcaatagtgtgtgtagtattggtgctgtgtccaaattagaagcctagctgaggtagccttgcagcatcttttctagttgaaatggtgaactgataggaaaacaaatgagtagaaagagttcatgaagaggccctcctctgcctttcaaaaggctggtcacctacacatgtttaaggtgtctctgcacatgtctcaagcccatcacaagaaagcaagtacagtgtggatttcaaatggtgtgtaacttccagctccagctgggtttttgacagctgttgctgtgggtaatatttttgacatgtgatgggtgatagtctctggttctccccatccccacaaaggctgttgaaccacagcaccaggaagcctgagaatgaatcctgagggctctagcccaggctttgtcccaggctttctggtgtgtgccctcctggtaacagtgaaattgaagctacttactcatagtggttgtttctctggtcttgagtgactgtgtccacagttcatttttttccggtaggaataactccttttctacatccacgctccatagagtctctccttttcagacatcctgggatgaaagaatttggcttttttttttctttttttttttggacatctgttttcactcttaggcttttaaacaatagttattgcttttatccctctcagattctaataactgagagcgatggggctatattgaatctctgtatgcactgagaactgagctatgaagaggatcttattaaactgctggtctgactttatggattgacactgttcctttcttttattgtgaaaaaaaaaaaaaaccctgaaagtcttgggaaccccctaaagtcttttgggaatcctcaaaaagcatgggaagttaagtatttagctacataaatgttgtaagatcatatcttatgtatagaagtaataagaccatttggaattactggactaattgaatagttaaggtttctattcgggacaataaaatgtattttgaaagtgctgctaactattgatgctgacagtgtttcactcctatgagtgacccaaacatattataaatatgtggtaaagggaatggagcctgtggggttgagcagaatgttgtactagctgtgcctggactgagtataacagctttatgattatgagaaaacaaattctttattttttttttctgttccaaagattcatcctatggggtggccataaagtctagaattagatactaatattttgtcattcattataacatatcaataaaccatttgttaaaagatttgcctgggtttccagacttgggtgggccaccttggaataattcttgctgtcttctgggaaggatgatgaaatttattcctgctgccttaaaaatatgtatcccttcttcacccatcatgactgtccccagtgagtgtcctttactattcttgggggagtgactcctgtctaacttttcatactggcgagaagaaaagaagcctattttaacactttagtggtgttgaaacacattacttactttctgaagatgtcccagtgaatcctctgtcaattcactgccatatgtaatctatatgataaggaatgcatcttccttctaagtactgcccaaactcttgccagctcctctcccattgtcccttcatgtgaatatttcttggctaccttagtggaaatatagatcagtcttctccccatccatcctctcaaacataatgagattgtttactttttagatttatgcagtgaaaatgcccagtcaggtctgaatcgtcagtgcattatattgactctgagcactttagaatttagagttgcaattgaatgccagctgtggagatggggtgcatatcagatatataaataaagctcaggtttgctagggaaccaggtatagagaaaaataagtctgatatgaggaaaattgcacaatttagagtagttatgccgtagagaaaatttccacaaactaggaaatgtagagagttattctatagaatactcaaaagaggaaagtatgtgatttttgggaaacagggaaaatcttcaaacttctttcttcacttccctttgtgtttagctgaccctccaatgtgatcattgcctttggagtttgggagaggtacgggaagtggcctgatccctgcttccatacttcactcctccatccatccttccctccctcttcccctccagctaaatggacaattctagccaacattgagtcactcaataagtctcaacagtgggtgtgtttgctgagattgtccagcagttgagcagtttggtctcacctccctcgctagttgagaccaaaaagagacaaataactttttcatggtctttgaaacataatgcttatttcgtggtcaatggctttaaaaaaatctgtttcttgttttcttcaacaaactcactagttttcccttaaatgatattgtaaaaattaaagtaatcttgaaaatgttttgacaaaagtaaaattaaagggacatcttttcttgttttgttttttttttctattgccacacatgaccgttccttcacctttaagcaaagagagtggttcagatggtttctaagatgccaacctgacctcgcattctgtcattctacccagctcttaattcaatttgcttccattatcctaacaggcttctttcttacttagaacttggaaaggctgctgtatttaataccctccaacactaacgcagacttaagataggtactgtttattgaaaacctactgagtgaaatgtgcggttttaggaccttcataaacatctcatttaatctttctagcatcctgtgaaacagccatgatttcacgttgataaacaaagaagacaggggtcccagggatggtgaaccatcttgcccagggcttcggctgctggtgaccaagtgg

SEQ ID NO: 46458 - DNA, 478 bp, Homo sapiens
gaagaatgaatataacttcaaaatgaggcaactagaacatgtgatggattctgctgctgaggatccccagagtcctaagacaccacctcactttcaaacacatttggcaaaactcctggaaacacaagaacaagagatagaagatggaagagcctctaagacttctttggaacaccttgtaacaaagctaaatgaagacagagaagtcaaaaatgctgaaatcctcagaatgaaggagcagttgcgtgaaatggaaaacctacgcatggaaagtcagcagttaatagagaaaaactggctcctgcaaggtcagctggatgatattaaaagacaaaaggaaaacagtgatcagaatcatccagataatcaacagctgaagaatgaacaagaagaaagtatcaaagaaagacttgcaaaaagtaaaatagttgaagaaatgctgaaaatgaaagcagacctagaagaagtccaaagtgcc

SEQ ID NO: 46459 - DNA, 1773 bp, Homo sapiens
gtaaactctgagactcaacagcagctaaataaaataaaccttcctgctggaattttggcaacaggtgaaaaacagacagatccatcaacaccacaacaggagtcttcgaaaccgttgggaggaattcagccttcttctcagaccatccagcctaaaatggagactgatgctgcccaggcggctgtgcagagtgcatttgcagttctgttgactcagttaataaaggctcagcagtcaaagcagaaagatgtgctactagccgagagggaaaatggatcgggacatgaagcgtcattacaactcaggccacctccagaacctagcactccggtgtcgggacaagatgacctcatccagcatcaagatatgaggatcttggagctaacgccagaaccagaccggcctcgaattctgcctcctgaccaacgacctcccgagcctcctgaaccaccaccagtcactgaggaagatctagattatcggacagaaaaccagcatgtacccaccaccagttcttcattaactgaccctcatgccggagtgaaggcagccctgttacagctgcttgctcagcatcagccccaggatgaccccaaaagagaaggtgggattgattatcaagcaggagacacttacgtgtccacttcagactacaaggacaactttggatcctcttctttctcttctgctccttatgttagcaatgatggtctaggaagcagttctgctccaccactagaacgacgtagtttcattggaaattcagatattcagtctttggataactacagtactgcttcatctcattctggtggtccacctcagccttctgccttttctgagtcatttcccagttcagtagctggatatggagacatttacctcaatgctggtcccatgttgtttagtggagacaaggaccatagatttgaatatagccatggtcctattgcagtcctggcaaacagcagtgacccttccacggggccagagagtactcatcctttgccagcaaagatgcacaactataactatggtggtaacttacaggaaaatccgagtggccccagcctcatgcatggacagacctggacttctcctgcccaaggacctggatattcacaaggatacaggggacatattagcacatcaactggcagaggcagaggcagagggttaccatactgagtatctgtttttcctcaggcacatcatttttatctggaaagacttttctagctgcaatttaaggcagcaatccaagagacttgaataataataattcaacaacagctttatttttatgtggagaagggtcttgcatacaatagtttaaaaaagacaaaaaaaacctttgcttaaattcatgctgttctaaaaactagatcgattgtacatcttcacaaattctagttaacaattttattttgtattcttgcagttttaagtggatgctaattttaggggcataagccttttatggccctcttgcagatcttctgaactatgcacatttgtgctttttttgtaagtttggaccaacttttatgtaacaaacagcccctccccacctccagttttacaacaatcagaaagggcactgatttatttggtatttttctttttacaaagctacctttagtcaaaggtcactgtcagtctttgcacctgctttcagtgttattgtgaaaggtgtactttgtgctcatttcagaaaataaaacacaacctttctcttgatgcaacagttttataaaaaaaaaaaaaaaaaaa

SEQ ID NO: 46460 - DNA, 1555 bp, Homo sapiens
  misc_feature (1)...(1555): n = a,t,c or g
gtctcacaattcaataattaattacaaagactgagacttacattaaaaaagtaaaaaccagaaccccccaggtgccgtcttctgctttattgacaggtaaattgttcaaaaatgttctcacaattcaataattaattacaaagactgagacttacattaaaaaagtaaaaaccagaaccccccaggtgcccatccagcagaaggcccaggagggcagtggggtggcagggctaggcggtgctgggccactcagtgccgacttggggaagtgcacgtcctgaacagccttgccaagcagccgaccggtgggaggacaggggaagcctggcccaagctgtggacaagctgtgtctgccgccacagttaatcacaagcctctgacgacacagggccacagagctggtcactcaacatctggtacaaagggtgaggtgaaatccacgcgcaggggattgctgtgccgtggggccggggccagtgtgcaggagtgtgttgggtgggtctacgtgatcatacgggctactaatcacgggggctccatgcgggggcaggactggtggggggggggcgggcagggcggggcggggtggggtatcccagtggctgcttcgtgggcgccctggggctctgacttccctcaagcccncaaagccacagggcctgcctgcaccacgacactcgctggttttatggcaggaggcagaagccgtggaagcgaatggaaaacagcacagctgacttcacagtagtagatactggtgacacttcatggctgcgacccagaatgaacttaacgcacacagggacgcagggtgtcactggtcctgggcctttgtccatgactaggtggtcagcaggacttctgcagctgactgtgcaatggctaaatgaaaaaaaggccacagactaacctccactttcctgtcttcaaaattctagtgacactgggaatgctataggacctcctactattctcttaaggtcctaggaaagtttcaggaactagggaaaagactgggtactgaggctgtgtccccagatgtctgcttccgaagcagccgcgtcatgacgggtttctgctgaggaagtggtgttggcagggccccatatgccctctcgggttgtcaggggtgggagacaggctgtatgggggtccttcatgtgcagatggaacagcatcgcctcacagctgtgcagacgaacagatgtggtctactgccacgaacaatgcggcataaaactgatcaatattataataaagatttgtcttcttcatctccatatctacaaagtgattctacatttccttggacaacactggagggcccgctcagtcttggcactgacgctggaggccatctccagctccctggcccctgtggcgagctggcggcttcaggtgtcacaggccggctgctccaggccttcgagggggagctggctcctgtggggggagttggggctcggtgggccgctggggttggagctattcgatggagttgagtgtttggtggagtccgaatcaggctctttgtcaaagtcctggtctggatca

SEQ ID NO: 46461 - DNA, 2257 bp, Homo sapiens
gtggttaagtagtgactaactgtgcatgtccttcatggtaggtgagcaccagtctccatgatcaaaaatgccccagtttcctttgaaaaagccactagttctgtgaattgtccttttccctcctgcccctaacagtcctacccctctagcctacattagcatatttctcatgtaatgtattttgctggtaagctcatccattagctgcgtccttcagctattcctttagattggaggaagtggatatgaagatggattgattcagctcaccttccatgattgcttttgagggaaaagctacagtggccacatttcagatgttcacttttgcaatttgtggagggtggagagaggtagacttttgttgtgtgttttataaagtactctcagtaaggagtgtttgagttgaagagtcatctgattcgaggccactcatgttctttgtaacttaaactttgaccaagaaattcttcacttctcacttcttcacttcttcccaatatacagtaagtacgtgagccagtcatccatacactaaggcctagttgagaaaaacctttgattcaggatggctgggttactaaccttgaaatgtaagagatctggttttgaatgtaaaagttgcaacacacaaacggaagtcttaaaaactttttgctctggtcagttacaggtggatccccaataatctgtttttggttttctgatggaaataatagaattaggggaaatcaaatctggttggtaggtgtctacagtattagaagagggtataagggcactgtttaacactaagttctaatacttccagaaactgtgcattccagatctacatactaaatgctcttatcattttgaaatgggctcttgattaatagacccatattttttagtggcttctatgttgtatatttgtctaaaatgaaagctcttttgcgttctaaaactacaatatatgtcatcttattttccctgagtatccaagtatagtgcagattctatgtaaaactactaaatgacactggaatatgtttagtagattagggggaaaaactataaaggtttatacaattgtttgtagttacatttaggatggacttatccctttggagaagagtgaagtttgttttttcgccatgtgatgaagaccactgtgattttttaaaaaagtagataatacttaaaatggcgtaataattctgcacttgaatttgtactgttaacagcacatttggaagattttaaaactttttattgtcttataaatagcattcacttattattttggatatttaagggttccattaagttaacactgtatttggacaaagtgtgaccaaattagccagtctgttttcttccatgtttaattagaagtgagaggtagaagtacttcaaattcaacaggccagcaagcaatcggcttaaaattccctttcttaaatgttgtgctcttatgttctcggctttttaatgactttatttttacagtacttgttcagtcacttgagatgaaatgcttggggtagcttttccatcctcaaacttaatgtttttactagttcatagtgtttgggaacagtatatgccaatcactgagactgcatcagagtttgcaattttgtatgtttcattgccaaagaaggcttagtggttgttgactgtagtataagtcagctttctgtagcataagatttgattttcccatacttacttcacttgttatacatcactgattatttgggttaaactggactcatttcaagcagtttgcttttgttcaaatcgtgatgagaaacctaatactgtaatttgatttgagccataaaaccccattttaatattagcttgtattatagttaattaagcttgtttttggggaaaaaaaacttactaaaccctaggtaactctagattaggcccagttcaggtgtatttttgtatcttagtaatggatcatatcgtaaaaatagagataagttgggaagatatattgattatgctgttctgttgagggaaaggtcatgtatttagaaatttaaacttttggttattgtgttcacatcatagtattcaagcatcatttatagtttggttttgagaacttttctggtattacgtttatggcaaatgtataaaagaaacaagttttggttatatttttatatttgtaaagtaagtttggttaaagtgatcactgttctttttttattttattgtcatttcaataaaaaatatttgaaagagaaaaaaaaaa

SEQ ID NO: 46462 - DNA, 2128 bp, Homo sapiens
tttttttttttaaaatggtagaatttattttaatataatgatatatatgtgtccacatatactattttaaaaataagcatgtaaattataatcattataaaacataagttagtcctaatttaatattatcagagtaaaagagcacatatagaagtcagtctaactttgttgcacttgtcttttaaagttagaatacataaaagatttagcacgttgtattttatcttatttcagttttcatgttatcatcaactataaatacccttaggaatgtaccaccttataacttacattgaaatagcccaatatttcttaggtggttattaaggtcccattaaatcaccctaaaccaaataatcctaaaaaaatactagtttaaattaaaaccctgaggaattaaaatttgttttacacaatagttttggttaagtgcaatttcatgtacatactactttgtttaaggatgtacttggtaaggcatagtaaaaataaaatctacgtaagtaacaatctaatactatatttaatttgttgctacaaagttgttttgtttctctaaaaagtagtttttgcatatcattctggacctcttcacccatctgctggcttatttgctttatatacaacagttaaaatttgtgcactaagctgagctgccttcacaattgtggttcagacaaaatgcacccaaagaactacatgttaagagagttcatgtccatgctcaaccatggcttgcacaaattgcttcgaagacacgatccatgtaagtggactgtcttggccagattccctccagaaaaccaatatggcctccataagaagtaaggaccaaagcaacattaggattttgcttagcagtttctattggaatagcatgactgggtgagaaaacatcatccacagaatttagacacaatactggaattcctactgacttcagtctaggactcggactggcatcagtataataatcatcaattgtttggtatccaaacatgactgaagtgaatcgcttatcaaactctctgatggatttagccttcatgacatgatccatatcaacttgttttacaaacatatgtcggtgcttattaactgaagactgaaggcaggttgtcaaatagtaattaaaaagtagccagttcagtggtttttccaatgactctgagcaagcgaaggtgttccaaccaacggaaaaagttgcagctgccatcaaaggcgttttggacccaattttgcccaagtaatttagaagcagcattctggggaaaaataattttgaaggccactgcagctggagagagcaataagtgattatttctgtaactggagtgatgaaagtcatgctacaagttcagcttcagaacgcagctccagggatggctgggagtgcgtcaggaatcagaaggtcaacatggcagccggtgagtgatgcaatcgacttcatgggcttcagacaaaccttcaggctcacaaaatccgcagtcacagagacccgtagttaagaaaaatattaaaattcacctgaattaattctttccttccttcgttcattcaatcaaccgcatttaataaaatatgataaacataatcagacatttatttaaaaagtgtccatacagctagcttatagtcctctcaaagagacagccaataaaatagcttccctctcagagattattttagaaagggaaaaccttaccctcccattgaaacccctgctgccaggaaaggagcagaagggtacaggctgtgtacatggtgaataactgtctccaagtcttcagtgttagcacaacaataagtccttggcgtcaagagattctcccccgccactcctctgttgttaaaaaccacacatctgtatcctaattcttcactaagatggatcatatgaaggatatatgactccttgcttgttcccgtgaggccaggcaacaataagatagtaggtctggtgctggcatccatataacacgtactgttatcattatcaaaccagtccagtgaaatctgtcctccatctgcagttttaataagttcattcctgtactgcaccgggggcttcgaagtgatgaaaggtctaagcagggtctgtcctcgaccctcccagcaccagaccgtc

SEQ ID NO: 46463 - DNA, 876 bp, Homo sapiens
  misc_feature (1)...(876): n = a,t,c or g
aattgccatttctgcaccaggcactgtagctagcttgctctccgactggcaggctggtnatgggtgccacagaggnaagaataccagtnggagggtccagggaaaagagagagtttattttataccagtagttgttttattttatacagtagttgtacagtaattgaggaaaaatgttgtcaggtggcagaaaacaatggagccacctagaagctggctgatgcagctggggcacacagaggaggggcctgggtaccccttttggggaaactgagacgaagctatttagaacagcttgaaaataagagacttttctagaatggggtggcagctaaagtagcttctttttctttctttcagaatgctcagatgcatcagttccttaatatacacgtgaaatttgaaaactgtacattcggtgagattaaattttatatacaactagcaattgtccagctttgttgctcattttcaattaaggctaaagtgttcaacatgagaaaatgtgatacatttgatacagtgtggggtgggagtggatgggcagctcttggtggtactggaccttccacaaggctgtgtccacccagaatccatgctggcaggagggaggcagaggtatcaaaccaaacctctcaccaagcggcccaggaggggcagctgttcctctcgtgacaggcacaggcccatgagacagtgtcttctttttgagcgggagctggtccgggtctagttcacttcaccaagaagtccatgctgtcgcaatagtttgttaagtctttcaatttcttgttccttctcagagcagctgaactcaaggtgttgaatcttggcggccaattgnacattcntctgttttngccttaagagttgccg

SEQ ID NO: 46464 - DNA, 413 bp, Homo sapiens
  misc_feature (1)...(413): n = a,t,c or g
tttggaanacatcttgacatgattacgaatttaatacgactcactatagggaatttggccctcgaggccaagaattcggcacgagctggaattagtcacagaaaagggccatacatttgccgaagagcttcagaaaatccagtgcacattgcaggacgtcggctcggccctggcgacaccatgctcctcggcccgggaggctcacttaaagtataccacgttcaaggcggggcccatcctggagctggagcagtggatcgacaagtacaccagccagctcccaccactcacggccttcatcctgccttcgggaggcaagatcagctcggcgctgcatttctgccgggccgtgtgccgccgggccgagagacgtgtggtgcctcttgtccagatgggagagaccgatgcgaacg

SEQ ID NO: 46465 - DNA, 1698 bp, Homo sapiens
atttgttacacatagttttctcattatttatgaaacttaaccatacagaatgatataactcctgtgcaatgaaggtgataacagtaaaagaaggcaggggaaacttacgttggatgacatttatgagggtcagtcccacatacctctttcaggagacaacttgcaccagtttgaccttttcttttctttgtttttattttaagccaaagtttcattgctaacttcttaagttgctgctgctttagagtcctgagcatatctctcgtaacaaggaatcccacacttcacaccaccggctgaatttcatggaagaggttctgataatttttttaactttttaaggaacagatgtggaatacactggcccatatttcaaccttaacagctgaagctatgccttattatgcatccacatgtatggtccctgtagcgtgacctttactagctctgaatcagaagacagagctatttcagaggctctgtgtgccctcactagatagtttttcttctgggttcaaccactttagccagaatttgatcaaattaaaagtctgtcatggggaaactatatttttgagcacatggaacaaattatacttcctcattcatattatgttgatacaaaagaccttggcagccatttctcccagcagttttaaaggatgaacattggatttcatgccatcccatagaaaacctgttttaaaattttagggatctttacttggtcatacatgaaaagtacactgcttagaaattatagactattatgatctgtccacagtgcccattgtcacttctttgtctcatttcttccctttgttccttagtcatccaaataagcctgaaaaccataagaggtattactttattgaatatggttggcattaaatttagcatttcattatctaacaaaattaatataaattccaggacatggtaaaatgtgttttaataacccccagacccaaatgaaaatttcaaagtcaataccagcagattcatgaaagtaaatttagtcctataattttcagcttaattataaacaaaggaacaaataagtggaagggcagctattaccattcgcttagtcaaaacattcggttactgccctttaatacactcctatcatcagcacttccaccatgtattacaagtcttgacccatccctgtcgtaactccagtaaaagttactgttactagaaaatttttatcaattaactgacaaatagtttctttttaaagtagtttcttccatctttattctgactagcttccaaaatgtgttccctttttgaatcgaggtttttttgttttgttttgttttctgaaaaaatcatacaactttgtgcttctattgcttttttgtgttttgttaagcatgtcccttggcccaaatggaagaggaaatgtttaattaatgctttttagtttaaataaattgaatcatttataataatcagtgttaacaatttagtgacccttggtaggttaaaggttgcattatttatacttgagatttttttcccctaactattctgttttttgtactttaaaactatgggggaaatatcactggtctgtcaagaaacagcagtaattattactgagttaaattgaaaagtccagtggaccaggcatttcttatataaataaaattggtggtactaatgtgtatccagaaaaaaaaaaaaaaa

SEQ ID NO: 46466 - DNA, 866 bp, Homo sapiens; identical to SEQ ID NO: 654
  misc_feature (1)...(866): n = a,t,c or g

SEQ ID NO: 46467 - DNA, 1366 bp, Homo sapiens
cggaaatctgaagaaaaaacagatacaaagcgaactgtgattaaaacgatggaagaatataataatgacaataccgcgccagctgaagatgttatcattatgattcaggttcctcaatccaaatgggataaagatgactttgaatctgaagaagaagatgttaaatccacacagcctatatcaagtgtaggaaaacctgctagtgttataaaaaatgttagtacaaagccatcaaatatagtcaagtatcctgagaaagaaagtgagccatccgagaaaattcagaaattcaccaaggacgtgagccatgaaatcatacaacatgaggttaaaagttcaaaaaactctgcatctagtgaaaaagggaaaaccaaagatcgagattattcagtgttggaaaaggagaaccctgaaaagaggaagaacagcactcagccagagaaagagagtaatttggaccgtctgaatgaacaaggaaattttaaaagtctgtctcaatcttccaaagaggctagaaccgtcagataaacatgattccactcgtgctttcctccaaataaaggactttcactcccaatagagacaaaaaaactggactttggacaccagagggtttttcaagtttcccaaacgtagagatgaaaagaatgaattaacaagacgaaaagactctccttctcggaataaagattctgcatctggacagaaaaataaaccaagggaagagagagatttgcctaaaaaaggaacaggagattccaaaaaaagtaattctagtccctcaagagacagaaaacctcatgatcacaaagccacttatgatactaaacggccaaatgaagagacaaaatctgtagataaaaatccttgtaaggatcgtgagaagcatgtattagaagcaaggaacaataaagagtcaagtggcaataaactactttatatacttaacccaccagagacacaggttgaaaaagagcaaattactgggcaaattgacaagagtactgtcaagcctaaaccccagttaagtcattcctctagactttcctctgacttaactagagaaactgatgaagctgcttttgaaccagactataatgaaagtgacagtgaaagtaatgtttctgtaaaagaagaggaatcttcaggaaacatttctaaggacctgaaagataaaatagtggagaaagcaaaagagagcctggacacagcagcagttgtccaggtgggcataagcaggaatcagagccacagcagccccagcgtcagccccagcagaagccacagtccttctggaagccagacccgaagccacagtagcagtgccagctcagcagaaagtcaggacagcaagaagaagaagaaa

SEQ ID NO: 46468 - DNA, 913 bp, Homo sapiens
ggccgcgtggctggaagacatggccactccagtcggtgttgagcacggcgagcagtctcaggcctttagtgatgatgattaaaggtggtggctgtggccttgaaaacagtcatgtgaaaactcatcaccttaaggtgttaagtgtaaggatcttcatgatgaaatttctgtaaatggtgcagtcagcctcagtttccaaagccggaaaaggatcctctagtagccacggtgtggcagctgctctgaaccaggacctggacccggacccaaagtgccatgtctttaatgttagctcccagcgatgccagatgggatcagcacagccctgcctctgctgctaattgttcctctaaagtaatcgccatgcgttctttgggcttcatctttaaaggaatgaagcaactgagattattctggaaaaccttttggcagttagtgaaattagagtacaactaagaacattttcagacctccactgtggatgacctgggtataatctcacaaatcgatgggactgcaaggattgtaaactgaaatgaacatgattatactctgttggaagagcctaagaggaaactgatgccatgagtttcagagagtaatgcttaaccccagttacacaggatgccgtcttgtgtttcctcttgtttagttacccactacagtgattttgtgatctgctaatgggttgccacccacaaccattgctttagcacttttacttcaaatcaatgaaggattgataaaagttctcctggtgtctccgcagagtgccttccaggaacagatctttgcatagaatatcagtggtttccttttttgtttcaaatagtggtcagaaaatacccagtgttgactcaccaaggcaatcagcttcctttttccctttttttgttttttttttaacatttta

SEQ ID NO: 46469 - DNA, 2475 bp, Homo sapiens
  misc_feature (1)...(2475): n = a,t,c or g
tctgtcttgcccttactctgctttcttcagtacagggactgcaaagcatctctggcttaagactaacagacacattcttaaagagaacatatgaatatgatgacatcgcacaagtctgtgtggtatcttctgccattaaagtggaaagctgaaggaaacttccaatgttaggcttttcatttagtttcacagaactgctctttttgttacctttgtaaaatgatgacgtcaacaacgaagtaaatatgttacttaaattttctttcctgtaaaatggttaaaatattaaatatttgttttgaagagatctgattttatcttgtaatttatatttgaaatgaacatgtgtatattttctacacctattatttaatttcatttcattttagatgaccattggactttgttctccaaaagctgtgtatctgagaccatttgtccctagcaagttatctagaacacgagtcagcacactttttatgtaaggtacaagatactaaatattttaggctttgccaggccgtaagggtttctgtcacaaatactgaactctgccatcgtacttcaagagcagccagtaggcaaaaaaagtacagtggtgtacacaaaaagaagcagttggnnnnnnnnnnnnnnnnnnnnnnnnnnnnnnnnnnnnnnnnnnnnnnnnnnnnnnnnnnnnnnnnnnnnnnnnnnnnnnnnnnnnnnnnnnnnnnnnnnnnnnnnnnnnnnnnnnnnnnnnngaggcagctgggccagatttggccccgccagggtatagttggctgacctcaatctagaagatagagttgtttccttagaactttgtaatattttggttagaaatatttcagttaactcccagttttttccctagctattcggtcagcagaaaaagtttgcttaaaacaaagggggtagtcctcttataacctgatatttgtcaacacagtataagctttctagttgttttcaaaattactgtaatggtttgtgtctgtatttgtatattatacctacaaacatacatatctttcagctactgaacacatcagaattggttttactttttaggttgttgattttttttaattaactattaactaagaataatacttattttcctaattataagcccaaaaacccctgggtttttttctcattgattaagccacttatttttataaggtatatttaaataattcccatcttctgatatgattttaaactctaaatcatgtgttactgttacaaaactttctctctccatgtaatcacacttagttatgagcaaagcagtgagaaagttgaggtgataaacaactttgcagcattaatgtaacaaaaagtttcagtatttgtcaggaaaacaaaagcttaggctgttaaataaaagctattctattttggtaagttgaaattcaagaatgtatatataatttcttaaatgtaagagtgcattaaatcaaatacaaaaattggtttttcaatgcatcattatttattgccataacaaattgtttggtccaaaatgaaagctatattcagaaggtttgcacctcaaaattgagtaataattaatgaaatgtctgtacaaaataaagtgcaagcagtgtaaaattgaagtctgtctttgtttcaaaatgattaagattaaatgatgaaataatattttatagccactgcattggatacttggattgtttttcaagcatcttcttatgactaaatcttctgtttcattctgttttaaatctaaaaagtaaaatgatggtcacttggaatctgctctatattttaattatagtctcttctgtttataaacaataacttacacatatttttcatagttttaagtaaagattaaataatgccatcttagaaaggatctgtttaacctatattataaaagttagatacacaatttggtacattaaatgaaaatgtcatttgcatatatagaacctgttctgttttacacagtatcataatagctacagctactacaagaaatatggttaatggaagtcaaacatttagtacgatgcttaaagagttactttaataatgccctcttatttttctagttagatagcaactatatttcccagacaagcaagaaaatatatggggcattttttataaatttaaaagtagctaggcacaatccaaccacgcaactttttttgaaatagcttgcaatgctatgattccaaagtgatcaaggtacttgaagagcaaaaatggcttgaatagaatggaaatgtaggcaagtggacagatagcatctagattgaatttgttacaggtggtatattagccaaagaaatagaaaaatgaaatgggaaggaaatataccaattcccattatttcatgtaaaaaggattgggctaatttaactacagatgttaggcacatgaaggacattgttttaaagttttttttcttatagtatctttgtctgggtaatactg

SEQ ID NO: 46470 - DNA, 387 bp, Homo sapiens
tggactctcactgccttatttagcatcacagagggctcgctttgtgccatgccatgttctaaaagcctttataaatattaacatatttacaggtgaggaagctgaggcacagaggtatttaggtatcatggagcagttgctgggatttgaacctagcactctgggactccttagaatccctcaactgttgaggggaagcccaacctcacttgacccttgcacagagcaggaatccttttcccacacctttgtcaaaagtcgacgcggccgcgaattccagatctatgaatcgtagatactgaaaaaccccgcaagttcacttcaactgtgcatcgtgcaccatctcaatttctttcatttatacatcgttttgccttcttttatgta

SEQ ID NO: 46471 - DNA, 487 bp, Homo sapiens
gcaaccattaactcttattggacaagctcctcctgtgagtggggcctgtactcacttcctcttagatcataattccatcttcaagagactgatttccagaatagtaatctttttccagcgttctctcttctccaatgccctggttgttatttttcccacctctcctaatattgatcttctttgtcttttggttagaactgcaacttcggagttgagttcatttcctattgcttgctcaattcagtagcaacatagctggcttgttcccatgacccaggaagtataagtcattgacagtttcctgagtggctctgcaagtccataccacccttgggaactgtgaaaaggcttcttgggcaagccaggtggcattgaggatggtattcaagggcgctttcctttctgtcatatagttgtgggatctctaccaagtgtgaaggtgaatgaggtaagggatatcataaccatgcttcctggtttttcatag

SEQ ID NO: 46472 - DNA, 801 bp, Homo sapiens
gctggccgtgggagaggcttaaaacaaacgccggaagcaactcccagccccataaagatctgtgaccggcagccccagacctgcctgccttcctgacttctgttccagagcaaaggtcattcagccgcttgaatcagccttttccccccacccggtccccaactttgtttacccgataaggaaggtcagcattcaaagtcaagaagcgccatttatcttcccgtgcgctctacaaatagttccgtgagaaagatggccgggaactcgatcctgctggctgctgtctctattctctcggcctgtcagcaaagttattttgctttgcaagttggaaaggcaagattaaaatacaaagttacgcccccagcagtcactgggtcaccagagtttgagagagtatttcgggcacaacaaaactgtgtggagttttatcctatattcataattacattgtggatggctgggtggtatttcaaccaagtttttgctacttgtctgggtctggtgtacatatatggccgtcacctatacttctggggatattcagaagctgctaaaaaacggatcaccggtttccgactgagtctggggattttggccttgttgaccctcctaggtgccctgggaattgcaaacagctttctggatgaatatctggacctcaatattgccaagaaactgaggcggcaattctaactttttctcttccctttaatgcttgcagaagctgttcccaccatgaaggtaatatggtatcatttgttaaataaaaataaagtctttattctgtttttcttgaaa

SEQ ID NO: 46473 - DNA, 868 bp, Homo sapiens
acaaagctgctcaccatgaggcctacagagccctgttggccactcatagctcacacagtgcagtgacagtgaagtctggacagtactaaggcttactgctggctgaggcacaagtaggagaaggtggtacttcctcctgtagtccagggatgtgtggggttggcctggggtgggacatggacaggaagccctgataacggaatgtggttctgtcttttgggtagcagttacttctgctttgcatcttggcctatagttccctcctctccttctcttagcaggtgaaccaggatgtgagccggcagctgcttcaggatgggtatcacctggatgagattccagatgacgaggacttggacctcatcccccctaagcccatggcctcttcaacatgctcctgctgctggtgctgtcttggggactcttcttcctgtaccctccagtagacattaccctccaaggtggggccctgctcaccatgaggcctacagagccctgttggccactcatagctcacacagtgcagtgagcactgaagtcactgacccctagaaagtgacctgcaggtagcccttacctgttgcttctcaggccagaggcccccatctgggctgtgggctgataggtagaattctgtagttttcctctgctgttggagcagagtttggagaagtcactttaataagggcaagacagaaaattctggttcttatggtgggtgacaaaggtggctaaggaaaacacttgcagacagcttgattggtatttgtcatagtgcttcagggaggcaaaaagggagctcttgtgcccaggctgtgctagatagtgttgaatggaggcagaaaatagcactttatggtttattata

SEQ ID NO: 46474 - DNA, 249 bp, Homo sapiens; identical to SEQ ID NO: 17124

SEQ ID NO: 46475 - DNA, 670 bp, Homo sapiens
cccaccttctggccttgttccctggtaacccgagcaggccgaagcgcagccgcactgtcaaggcaaacaacctggcaggagggcagggctctgcatggagagggtgggctgatgccccttctcttcccatcaccaccttgacccctactctggcaccttgaaacccctttcactatagacagggatttttactccacagtcagatggctcactcggggaagtaacctggtggggaaattttatactaaggtgtgaatgattgacataataaggccatttcccaagagctggacctggggggtgggaggatagagagatgagaggataaacagtgaggatgaaggaggagagggccaggccccgatactgtcctactctgccccagttgacaggcatggttgcccttccccctttcctgcccctcctcagccaggtctccctcccccaggcagtcaggcaggtactccccgagccaggagccactgggacatcctcctcagcttgggaattcctctgttgggatggctaagaagtgtgggtgtgaaaacgaaatagcagccattaagtttcaaggagaggaggcttggagaaagaagcggtcatatccagccctgctgtgatgctgcaagcacacagactctggagccagaagcgagtgatgcaaagttca

SEQ ID NO: 46476 - DNA, 353 bp, Homo sapiens
ggtagagagcctccccacattggagaaactcttttgttccaagagtctgtgggtttagtgtgttatttccacttatagaaattttgtctgtaatattgtttctaggcaggaaaaaggttttttgtttgtttgtttttttgtttgagacagagtcttgctctgtcgcccaggctggagtgcagttgcgcgatctgggctcactgcaaactctgcctcccgggttcatgccattctcctgcctcagcctcctgcgtagctgggactacaggcgcccaccaccatgctcggctaatgttttgtatttttagtagagacagggtttcactgtgctagccaggatggtctcaatctcc

SEQ ID NO: 46477 - DNA, 452 bp, Homo sapiens
  misc_feature (1)...(452): n = a,t,c or g
gnngnnnnggnnnnnngttgttnnantntttanncttgaatgattcgaatttaatacgactcactatagggaatttggccctcgaggccaagaattcggcacgaggggtcagtcggtcctgagagatgggcgagcgccgttccgaagggacgggcgatggcctccgttgccctcggccgatcgaaagggagtcgggttcagatccccgaatccggagtggcggagatgggcgccgcgaggcgtccagtgcggtaacgcgaccgatcccggagaagccggcgggagccccggggagagttctcttttctttgtgaagggcagggcgccctggaatgggttcgccccgagagaggggcccgtgccttggaaagcgtcgcggttccggcggcgtccggtgagctctcgctggcccttgaaaatccgggggagagggtgtaaatctcgcgccgggc

SEQ ID NO: 46478 - DNA, 1344 bp, Homo sapiens
tttaaatcattcattcattcaacatttattgagcgcctactgtgtgctaggcccgtgctaggcgcagaaatacagagatgcataagatacagtccatgcccttaaggattcacagtctagaaggggagacaaacatgtaaacaagtaaaatacagtgtgataagtgccacaagagaagcattgacaaagtgcagaggtagcctgggaggggaggggcacaggggttgccttcctggaggagggggcctttgaggggatcgtgagagatgaacttgccaggcagacaaggcaggaggagcaggggaaggcattccagtcggaagaaacagcatgagcgaaggcacagaggcatgaaactgcatgtcttgcttggtgagtggggaactctaactagtcttggtggtattgctaaagtgtactagaggctgtggctagagaagggggcagaggccagatcatgaggggaaactgagggcaggggcatcttggagggtcaccagaggtgagcagagcccgagggcaggctttgacacaggaaaagagggctcctggctgactcaaggttacacctgcctgaggaaccacagggttcctcgctgtggctccaaagggatctcgacccaagagtagaggagcagcagagctggaggtgaagcagaggggtcgggcccaggtctgggacccagagctgcccatgcactcccgcgctctcacagacttctgatttccaacctgtacgtcagagccccctcctgcccagccggatggggcccctggatccagtgggaaaatccacatgggaatatggctggcaaactgcaaagggcccagatgagtgtcaggttacagaataaatctttactaactcaaagaagaaaagggctgcggataaaacaggaaaggttagatggaggagggcgggcagacgggcctaagaacaagggccaaaatgagaatacagcatcggccaaagaggaccgtggctgtctctcccctggcaaggaggggcccttttggcccagggcagaggcagaggcccagtgggtacaaccaggccagatgtgcaaggagagcatgtgacctgcaagacctgtggggctccacactccagactccagtgtctccttagcccaatgaggaggtttccttggcaatcaggaccctccttcttccaggctgtagggaggcccctgaggcagagagtggccagccagcattccagcccttcagtgttcttaggaatggctctgtctgaaaaatggctttgcagggatgggtggggcagggaggctgtgggaagagggcagagtctcaggacaccagagtccagctgcccatctgagc

SEQ ID NO: 46479 - DNA, 2069 bp, Homo sapiens
tttttttaaaagccagttacttttattataatgaatgagaaatactatgactggagaagaggtttcacgtgactagattattcttggttcacacactatggtatcaaaattaattatggaaaaaaaaacccacattggattacacacatttttattgagttttgtctgatgatagggaaacatttacaaaggagtaaatgttacgtaacttctcacggtatgtaagttagaagctgggcagcaaacatggttaccaagagtcgtctagttcttcatgagaaaagcctgttaaactttcgactttgtcactagattgcagcgtgtccactagggagccttcttggaccatcttttttgagctcttatctgccgactcctggtcttgctcctgctggatgattttcatgtatttctctaaaggattttcactgtgagcagatttgtcttttatttcttgattactcatttctaattcattttccatttctaattccttttttattttaatcttcagtgattcttcaatcatcttcctttcctgatacagtttttctagttctcttcgttccctttctaaaacttcttgtaggttactctgccttctttcttctctctgccttcgttctttcacttgctgttcccgtattttttcttcttccttttgttcttcaatttgtttctgatctacacattcaaaagatgattcaaactcctcattatccttaaaagctagcttgtccacatctgaaaattcacttttgtcttgaagttcagtttgtcttcgataaagacccactttctgctccggaggcatggagacaggagggatggagaggctgtgcctagactcagtgggtgatggtaggggcattctgtcaggacaaggactgggggaagcaatgtgtgatctgcccagaccttccagatacatttcactttcgaggcttctttttgcttttggaaggggtgtggaagagaggcgtctggaggaagtgcccccgcggagcctcgaggctgcactgcctgtcagtgcttccacgacgtcattcctttcttccagtgtgcccacttgaggctgctcagagacaactctgtcctctccaaaaatatgtctttccggggaactggaagtaatgtttttgaaggcttccagcaagtgcagagatggtgggctctttgctgctagtgggcttttggcagagtttttaatgactctccgatggtaacttctgaaagccttttccaagcgttcggcctcttgctgaagctctttgacccttgcattagtattggcgacaaactcaaggtcagaatcaggggaactaccctccacccatgcagttggataatttgtgatccttgatgcaaccatacgtgctagaacgttttcctgtttaaaaggattgttcaagaaatccccacttatctcaccattgcaaggcaccacattgccatttattaatccattgacagaacgatcgatcacagactgctttggattgcagtacacttcattctctagggctgtctgagtttgcttcagttgcaattttaaatcggcaacctgagtagttaaactctttacagaagctttgtaacctagaatctgggccttcagctgtgcagaatgctcaatttcgtcttgcagttgtttgtgcagagcttgcctgcagctttcgaactcctcatgctcaaccactatagccttttcggctttccgtagttctttctgaaagactgcaagttcaggagccggctgagctaggcggtttaggagacgcaggttttcatttctactctcttccagttgttgtttaagttaatttattttgtgccagaagctccagtttctcttcttttagtagtgaataatcactcatctctttaaccttttcattcagcatatggttttgttttgttattgccaaagactgggctttgacagactctaattcaagctcaagttctttcacacgatttacagattgattgagttcctccttttttgaattaatagctatgagctcctcttgcaaatgaacagctttttctttattcttcctttcatc

SEQ ID NO: 46480 - DNA, 443 bp, Homo sapiens
accagctatgacatgattacgaatttaatacgactcactatagggaatttggccctcgaggccaagaattcggcacgagagattcacttgttacacttaaaagagccttagaagcaaaagaactagctcggcagcacctacgagaccaactggatgaagtggagaaagaaactagatcaaaactacaggagttagaagctgcagtgagccgtgatcttgccactgcactccagtctgggcaacacagcaagatactgtgtcaaaaaaattttttttgataaaaaataaaagagttacatgacattcagagaccatccaaaaaacctgtgggttcccggctgggctcagtggctcatgcctgtaatcccagcactttgggaggccaaagtgggtggatcacttgaggtcaggagtttgagaccagcctggacaacatggtgaaa

SEQ ID NO: 46481 - DNA, 410 bp, Homo sapiens
acctctttttttcagagtctctggtaagaagagtgaaagcaaagaagccaagaagtctgaagaaccaagaattcggaagaagccgggacccaagcccggatggaagaagaagcttcgttgtgagaggtgatgcctgcaacgcgaggctcgccctgcctgtcggggccggggctccatgcatgctcttcattgcagggaggagcttcccaccatctacaagtgtccttaccagggctgcacggccgtgtaccgaggcgctgacggcatgaaggtgagcactggctgtgcctgaacccaggcccggcagctgtcagtgtgaacctgggggaggtagcaggtgtttctgcagcctaactcagacttgtgcccaaggacactttgacctaggttaaccgagacctgaagcagtc

SEQ ID NO: 46482 - DNA, 1460 bp, Homo sapiens
ccgcagtcctcttccgggtgatggcggccgggtgccccggatgtagccctggcgcaacatctcttcttttttccacctcgccttccgcggattcccagcttgagaaacacctctttgccccgtcatgccaaagaggaaagtgaccttccaaggcgtgggagatgaggaggatgaggatgaaatcattgtccccaagaagaagctggtggaccctgtggctgggtcagggggtcctgggagccgctttaaaggcaaacactctttggatagcgatgaggaggaggatgatgatgatggggggtccagcaaatatgacatttttggcctcagaggatgtagaaggtcaggaggcagccacactccccagcgaggggggtgttcggatcacaccctttaacctgcaggaggagatggaggaaggccactttgatgccgatggcaactacttcctgaaccgggatgctcagatccgagacagctggctggacaacattgactgggtgaagatccgggagcggccacctggccagcgccaggcctcagactcggaggaggaggacagcttgggccagacctcaatgagtgcccaagccctcttggagggacttttggagctcctattgcctagagagacagtggctggggcactgaggcgtctgggggcccgaggaggaggcaaagggagaaaggggcctgggcaacccagttcccctcagcgcctggaccggctctccgggttggccgaccagatggtggcccggggcaaccttggtgtgtaccaggaaacaagggaacggttggctatgcgtctgaagggtttggggtgtcagaccctaggaccccacaatcccacacccccaccctccctggacatgttcgctgaggagttggcggaggaggaactggagaccccaacccctacccagagaggagaagcagagtcgcggggagatggtctggtggatgtgatgtgggaatataagtgggagaacacgggggatgccgagctgtatgggcccttcaccagcgcccagatgcagacctgggtgagtgaaggctacttcccggacggtgtttattgccggaagctggacccccctggtggtcagttctacaactccaaacgcattgactttgacctctacacctgagcctgctgggggcccagtttggtgggcccttctttcctggactttgtggaggaggcaccaagtgtctcaggcagcgaggaaattggaggccatttttcagtcaatttccctttcccaataaaagcctttagttgtgtactggggccttggctgtgctgatggccagaagccaggggccttctccacagtccctttggacttgtcttggtccctgagtactcccatgaagatcctccttggaggtgcctgtcaggtatcctgtggcctccctgcctggactctgcttgccgtgtaaacaccccctcgtgc

SEQ ID NO: 46483 - DNA, 1761 bp, Homo sapiens
ttttttttttttagattagaataaaaatttatttttgtaaagaattatattttgtatttgcaaaagctgaaaatgctcataaaaattaccagcccagagcttggatttccaccggatccaccacgtgagacaaaagagtctgtcacttcttcttgccaggtttgagggccttttctagaccttggatgtgttttcgagggagctgatactcttcaagcaatagccagccgaggtggtggacctggtttccctggatctgcacctgaaggctgtccttggccccaggggcaggattgacggtggtgctagcctggcatcgctgctgaaggatggcagccactgagtatgggtccagaccataggcctccaagttccggaccacggtcacctttttattagacgctctttgtgctagggtgatgtcaattggacagattctccctttcttcacaatgggctcttgtccgggaagggtcacttgataggcaggctgtaatttttccaaacacctggtcagaagactgtcccatggaagcttcatgactgtatgctgttcatttttctctaagatgcagtcacataggatgggatccaatctcacaagatttttgttgtctgcatcaaccaggtcatttttcttggcgtagttaatgacgatcgttcggacctcactgccctccagaaagctccccttcttgtggccagactcctggaagagcagggtcatgctggctgggacacagtagaggggttttatatctggagggtgatagggctgttccctgctaccctcctggatagtctgggaggtcgggaagggctcgggtatgacgaaagatgtaatcctcgggtgtttccagtccacagccacaatgctctccacccctttgctcagctccttcacctgtataatctgctcctgctgcatttgctgcaggaacttagagagctttttgtagcttgacttctttatgtccagttgtcgtccttcggggcagcaggagaacatgtggctgccaaggaaagtgctggtgagtaaagggaggtcagcctttttgactcggcacttcaaggcatgtaagaagcattgctgtaacagctcatccatttgttcttgaagcgttttgctatctgtggagtcttggttcaggcccctggtgctggtgtcttctggggcttctgagagagacttgtcttcacgtgcctggtgaacctccccattctcctcttccccctccagggtcatgtgcctcatgtctccctgcagggtggagtccatctggacagaccccttctcttcactgagatctgctgaatccagggccagtggagcaatggaaggtggagaggacttgtttccagaccgccacaagtggtcctggtaagtgtggagcacagagaagccccttcccttcaggcctgacgtgagcatctcagctgtggacatggctgcaactccaatggctacaggggctctgttccccaccaaagaaatggcacagaggtcgcccttctgtacctgaggcagaccagcagggggcatcaccagtccaggcagcatcaaatctgctccccctaccagtttctcgagcaccagaggccatgttgtaaaggttggcagaagatcaggataggaccacagcgtgtacactgttggatacagatttttctccagttcaaagaggatggggttaccaccactcacgtacacagtcactgcatcccctttgtgagcatacaacttcacaatgttgagctcct

SEQ ID NO: 46484 - DNA, 1065 bp, Homo sapiens
cgccgcgcagcgcggctgtatttgcggcctgtgcgagtaggcgcttgggcactcagtctccctggcgagcgacgggcagaaatctcgaaccagtggagcgcactcgtaacctggatcccagaaggtcgcgaaggcagtaccgtttcctcagcggcggactgctgcagtaagaatgtcttttccacctcatttgaatcgccctcccatgggaatcccagcactcccaccagggatcccacccccgcagtttccaggatttcctccacctgtacctccaggggaccccaatgattcctgtaccaatgagcattatggctcctgctccaactgtcttaggtacccactgtgtctatggttggaaagcatttgggcgcaagaaaggatcatccaggcttaaaggctaaagaaaatgatgaaaattgtggtcctactaccactgtttttgttggcaacatttccgagaaagcttcagacatgcttataagacaactcttagctaaatgtggtttggttttgagctggaagagagtacaaggtgcttccggaaagcttcaagccttcggattctgtgagtacaaggagccagaatctaccctccgtgcactcagattattacatgacctgcaaattggagagaaaaagctactcgttaaagttgatgcaaagacaaaggcacagctggatgaatggaaagcaaagaagaaagcttctaatgggaatgcaaggccagaaactgtcactaatgacgatgaagaagccttggatgaagaaacaaagaggagagatcagatgattaaaggggctattgaagttttaattcgtgaatactccagtgagctaaatgccccctcacaggaatctgattctcaccccaggaagaagaagaaggaaaagaaggaggacattttccgcagatttccagtggccccactgatcccttatccactcatcactaaggaggatataaatgctatagaaatggaagaagacaaaagagacctgatatctcgagagatcagcaaattcagagacacacataagaaactggaagaagagaaaggcaca

SEQ ID NO: 46485 - DNA, 622 bp, Homo sapiens; identical to SEQ ID NO: 17165
  misc_feature (1)...(622): n = a,t,c or g

SEQ ID NO: 46486 - DNA, 1692 bp, Homo sapiens
  misc_feature (1)...(1692): n = a,t,c or g
ttttttttttccaatttttcaaaagaactttattaagaaacagaggaaagatacaaaattcccatctgagaaaggttcccatttttcaaaagaactttattaagaaacacagaaaagatacaaaatccataaccaaaggaactgaagagtttacagcacactgggtttagcccattggcaatgtagagaaatgggctgggctggcgctcagtcactaggcaccgacgtcctgattcctcgtctttgacccagtgtcccttggttgctaagtcaaccagttctaactttctctggagacaagtcaggctgccctcccaaaccttcccaaacctccttcctaatgtctttatacacaggccctcttccatctggtccctaagatttctcacccagcacctcaggtgagatctagtctgatgttgctgtactttgtatactgctccaatcacaggagtctgcagtttctagaaaatctatttttgttcctgtcctgatccatttcataaactgcattcacaatccagttgggtagtctaattttgctacctttggtcaagttacctactttcccaagtctgcatctgaacttggtctttctcctgctaacaacgtattcctaggtactctctctggcagttctctgccccagttcatccaagaccttctccccaatacagaagtccgcacccctttccaatctcccacttaatttatgggatagccctagttctctgcttacctttcaaggagagacaatcagagaccttgatcttggcactcgcctgttcaaccctgcccagctcaggtcagcaacctcatcggtttccttgcaaaacttttgacttctgccttggactttcgccccttagaattttatttctgcagatttagaatatggcattgctttatagataccgtaataataaggctaaaatagaaggagagctactccctttccaaatgatattttctctaaactctcaaaagattgggccactcttgccatttttcactttttctaaatgtctactcttatgggtccttaactaatacggtctgattcttagctggcttttaagaatggcattacatttcagcaagctggccattggtcccttctattcctgaagtcactgttgtgacnttcagataaggcttcttcaagtaactgctggaaagcaaaacaaaatggtctcctctgaaggagaagctgatttgcagaaagctctactcggggtgttccagagctttcactcacaacacatgtacctaacatcctcatacacgcttatgctggatggaggggtatcaggtgggtaacaagtcagttgaaaacttttccctaaccaacaccttgtatttgaagctttatggtgtccgaaatacttctctacatttctcatccagtcctcacagcagctctgtgaagtgggcatgtggatgtcattatcccaatgatgctgatgtacaaactgagggtcagagaggttaaggcantagaccaagatcacacagctgtttagtgcagagccaacactcaacccaggtctctgctccctcattctcttcccatttcttgacaccaagaatacgaaagaggttttctacttccctcttccctacccaaacaggattttcttttcactggtccatccacgcacaacctagtcagttccgaacaggnaaaggaac

SEQ ID NO: 46487 - DNA, 1919 bp, Homo sapiens
cggacgcgtgggcggacgcgtgggctctcttcctggggggacccaggtcctgctgaagacagatgtgccattgagctcagcagaagaggcagagtgccactgggcagacacagagctgaaccgtcgccgccggcgcttctgcagcaaagttgagggctatggaagtgtatgcagctgcaaggaccccacacccatcgagttcagccctgacccactcccagacaacaaggtcctcaatgtgcctgtggctgtcattgcagggaaccgacccaattacctgtacaggatgctgcgctctctgctttcagcccagggggtgtctcctcagatgattaacagttttcattgacgggctactatgaggaacccatggatgtggtggcactgtttggtctgaaggggcatccagcatactcccatcagcatcaagaatgcccgcgtgtctcagcactacaaggccagcctcactgccacttttcaaacctgtttccggagcccaagtttgctgtggttctggaagaggacctggacattgctgtggattttttcagtttcctgagccaatccatccacctactggaggaggatgacagcctgtactgcatctctgcctggaatgaccaggggtatgaacacacggctgaggacccagcactactgtaccgtgtggagaccatgcctggggctgggctgggtgctcaggaggtccttgtacaaggaggagcttgagcccaagtggcctacaccggaaaagctctgggattgggacatgtggatgcggatgcctgaacaacgccggggccgagagtgcatcatccctgacgtttcccgatcctaccactttggcatcgtcggcctcaacatgaatggctactttcacgaggcctacttcaagaagcacaagttcaacacggttccaggtgtccagctcaggaatgtggacagtctgaagaaagaagcttatgaagtggaagttcacaggctgctcagtgaggctgaggttctggaccacagcaagaacccttgtgaagactctttcctgccagacacagagggccacacctacgtggcctttattcgaatggagaaagatgatgacttcaccacctggacccagcttgccaagtgcctccatatctgggacctggatgtgcgtggcaaccatcggggcctgtggagattgtttcggaagaagaaccacttcctggtggtgggggtcccggcttccccctactcagtgaagaagccaccctcagtcaccccaattttcctggagccacccccaaaggaggagggagccccaggagccccagaacagacatgagacctcctccaggaccctgcggggctgggtactgtgtacccccaggctggctagcccttccctccatcctgtaggattttgtagatgctggtaggggctggggctaccttgtttttaacatgagacttaattactaactccaaggggagggttcccctgctccaacaccccgttcctgagttaaaagtctatttatttacttccttgttggagaagggcaggagagtacctgggaatcattacgatccctagcagctcatcctgccctttgaataccctcactttccaggcctggctcagaatcttaacctatttattgactgtcctgagggccttgaaaacaggccgaacctggagggcctggatttctttttgggctggaatgctgccctgagggtggggctggctcttactcaggaaactgctgtgcccaacccatggacaggcccagctggggcccacatgctgacacagactcactcagagacccttagacactggaccaggcctcctctcagccttctctttgtccagatttccaaagctggataagttggtcattgattaaaaaaggagaagccctcaaaaaaaaaaa

SEQ ID NO: 46488 - DNA, 1371 bp, Homo sapiens
tttttttttggtggcaagtgagatttatttaaacaacgacatgtcaacaggaacaggaagaggaacatgtgcgaccactgtagtgaccaaggcttctcaagagtgtgggatgagacctgcggacgaggcccgcccaccgctcagggagcttgcaggtctcctccaggagggcaagtggcttcggcttctggctcggcataagccttcgacagattaataagttatctccttcagcccaagctcatttcctcctttggttgcccagcaaaggcagtaatgccgcatgagctgctccagcagctccatttcatccaggaattcaagtgattctatcctgctcacttcagctcgaggtaacctgttgtacaactccatcatgtcgacggccgatgctgtttcccacccattcgacaggagccgttctttctgtgactctaatgacttgcaggtctccactcccgccaggtcacactggcgtctccgcaggttttcaatcatgatctgcccaaaccgatcacccatgttcacctgttcgtagtttatgaacatggctctctcaaaactgttggctgcccacttcaggaggtttgcggactgctctggagtcatgtaaaccagcacacattcagctatcaggagtgttggcaattgtgtatccatgttacatttctttagcttctcttccagttcagacaggtctcggagatctgctccaataacggcatatctctttgaatccagtatgtgtccatccatctgaagtgtgtcctctgaatgcagttctagaatggggctggataggggaggcttgcatttgatactgtgcagctttctcgtgacaatcattggaaagtcaacctcaaaaatatttacttgggaagaaagatcttcatcctttaatctccagaaggtggtatccatgccctgcccccaaggttgaacaatttgaacaatgacattctgtcttccgtagaaatgcctttaataagctgactgaacaccatggactcgagcaaaatatcctctgttgatttcaggggctttcctctctttagacagtctcacaaagtgctgtatgtaagggtcatgccagtagccaatgcttactgcaaacctcttgcacagggaagcatcttcgcaggtgccgcgcacgccctcgtcgtttgcgtcgcagctcgaggtggaacagcaggaggtgatagaggattccctctgcctagctggccatgggcgtggaggttcctgggagctgtgctccgccagggacatggaagcggggtcgacgggcggcgggggacggcgcgagccacagggagaaagcaacagaagagggtagggccctacctggctcagctggcgcggctcagtgac

SEQ ID NO: 46489 - DNA, 378 bp, Homo sapiens
ggttgatatgtcagatctctctccagaagagcaatggagggtcgagcacgcacgcatgcatgccaagcaccgtggccatgaagctatgcatgctgaaatggtcctcatcctcatcgcaaccttggtggtggcccagctgctcctggtgcagtggaagcagaggcacccacgctcctacaatatggtgaccctctttcagatgtgggttgttcccctctatttcacagtgaagctgcactggtggaggttcctagtgatctggatcttgttctctgctgtcacagcctttgttaccttccgagccacccgaaaacctctagtacagacaaccccaaggatcaaaccagaagatgccatggactttggcatctcccttct

SEQ ID NO: 46490 - DNA, 467 bp, Homo sapiens
  misc_feature (1)...(467): n = a,t,c or g
ggtgnnntttgataccttatttgananccttatgacatgantacgaatttaatacgactcactatagggaatttggccctcgaggccaanaattcggcacgaggccgccacaatgggccgcgagtttgggaatctgacgcggatgcggcatgtgatcagctacagcttgtcaccgttcgagcagcgcgcctatccgcacgtcttcactaaaggaatccccaatgttctgcgccgcattcgggagtctttctttcgcgtggtgccgcgtgagtgccttgggcccgcgggagcgggaggctggaccccagcagcagcagcagtcactgcgcctcccctctgagcgctggcggccgggcaggcgctctgtaacttgccgtacacacctttctcattgaatattcctgaccgcccttaagctggtcatattatcctccccatcttacacggggaaaactgagctacagaac

SEQ ID NO: 46491 - DNA, 868 bp, Homo sapiens
ccagtttgattcgtttattgacaaatcaaatgaaaaaaattcacttaaaagaagggtatgtgatcacaaatgtagctaacagggggaacgcatacagcaccagggagggagagtgaggctggacataccattacagagaggaggaagagaaagaatggcgcggggggcggaggaaagagagcacctgccaaaaatcccacactttccacttctcagctatcactcaatcatttttctggatagggttaacagctagaaatggtttaagggcaacatccaggtagtttgtctggaagatcagggagatgaagagttggagagaatgtgggtgtagcattttgaaggattctccagcttgaacctgttgccagaacccttttcatggtgaactgggagtcaggaagcttaatcctggtctcagctcagccatgaacttgctgtgtgactttgggtgaatcactttccctctgtgatcctctttcctctgctgtaaaacaatcaagttggcaagttctccactggctctagcactctgcaatgccaagcgttctggcaacctgggctagaccaggagactggctcagcttccggagaaatgaaactactaagaaggccagccagagtgacgtggcactggccttcacctggagcccacttccttggcagcggcagcaattcagagggtgagtgtacgcgcacacacctggaaggaactcacactcactgcaagggtgatctctgcaaagaatggctgtgagggagcctgggttttgctctacacagaaggcaggtccacaggactcggggggtgatacagatgaagcaatcacacaatctgtagggtctgggatgcaggatacagtggagc

SEQ ID NO: 46492 - DNA, 1244 bp, Homo sapiens
  misc_feature (1)...(1244): n = a,t,c or g
atactactactaaattcgcagccagctcgacattatgaattcaacaagtatttattgagtgtctattatgtgctagatactgagacacatcagagaacaaaaccaaaagccctgcccttgtcgggcttacagtctagcacttaccgccagttaacctgcaggctacctggagccccgggcaagtcaccgcacctctgtgcctcggtcctcagctgcccaatgggagaataagcagacctggctcagacatgaatcatgtgcttggtgtactgcagatgccaaactgcatccccacaacccaccacgtagacagcagacagggctggaagttgatttttaatgataaagtacaatgaagggagggcagaggggctaagcctagctgtctggggtgctgtggtggtggtagactggctacacaaactgttgctgctgctgctgcttcttggtggccgccttgctggcgaggtccttggccttctctgtagctgccagtgccgtctcctttgccttctccttggcttccttggctgtctcaacaagtgttttggaaggggcctcgccttgcagcttagccaagatatattcaaaacccttcatagtcttggtcacgttgcttttgaatcgggcaagaccaaattcctggacagctctggagacaccaaataagctagaggagacccaggcttcccggcggatttcagtccagccactgttgtcagagttcacacagtaaacacatcgttcctccaccaccatcagccgggcgtggttgatgttccaggtgaaggtagtcatggtctgattctgtgggtccacaatagagtcctccaggacgtacaccgagtgagcaacattggcaggaaatagtcgctcggcccagcgtggcatcctgttggtcttggtcaggagtcgccgggacagcagtttctggtcaggggtcacctcccggtgtactatgtcttccgtcaagacatgtttgctatagggattcgggtaccgctgccagaaaggcgggaaacactttggtcccaggaactccggagcacgctctggcccaggaaatacttcaccatcgtcccggccgaagcgggctcagcacccgcgcagcatcaggggtgcggagcctgggaggcacgcgagggccgggccgggccggggctcggcgcacatcnccgccgccaggctcgaagctcagtcaccacgcaccgcgcccanatcagtgccgccgccgccncgccgcc

SEQ ID NO: 46493 - DNA, 843 bp, Homo sapiens
gccgtgttggccgggatggtctcgatctcctgacctcgtgatccgcccgcctcggcctcccgaagtgctgggattacaggcgtgagccaccgcgctgggcctagatcaaatctttatccatgcacattggaacacaggattactgggttgaaatcattctagttttgtcatttagatacttgtagatgaatctattttagcacaaggtataaataactcgggaggtcatctctatcttctttccttttgtgcatttggctataccacgtttaggtactaaaacagctttgcttatgttggccaggggaaaacatggcattctgtgcgcaaagctaattgatcgccagccctgccttggcccctcccttgtttatggtcattgtaagatgccccgcatgttaaggcttaagctgtcactgggctgggtgtaatacccgcttcattcctcctcccaccctcttacccgaaacatgaagggcactgtgctctattgagatctcgataagatcatcattttaacttgtattcaactgagggaggtaacatgatatctgggtgctggtggattgagacctcaagcatcaattcaaaattgctgtcgaaaatatgcactattttttttttccactctggctaagtgtaggctctgaagccagttttatagcttgatacattctggtgaaagatgtcttcatttttaatgaaagaacctacagttagtaggtgtcacctcagggtagaaattcctggatagaaattctgattatttgaaactctgatagaaatcctagatgctaggattttgaagaaaacctgggttttattgcatagatttcacctttt

SEQ ID NO: 46494 - DNA, 2145 bp, Homo sapiens
tttttttttcagttgaagacaacctttactgcatgttgacgctgatttaggcaatagcttcctaaaaatcatgtataaagttagttagttagacatgaaatctcttccccaatgttgatacctgcccacaaaatattctcaccttcagagtataagaatcattcttaaagccaaatattcagttcaaggcacatacgtcatctgcagttgtaaatttgcatttaatatttcacaattcctgtaagagaggctagtcaggagggacaccctcaagtttaaatccccacacttacttacttactgctcatccgtcactttcgctaagtgagattaataattcagtagctggtccagaacgcacagcttgggaacgcagaggcccaggcctcatgtaatttcccactcccgtaactgaacgtgctgacccatgttgatgtctgccttcatccaggtggcaaatcagacatgctacgctgcccccttcaaacgagttcctcgtgttaggggcaaaggtcacagccaaactctgccactgacagccagtgccttggcctggatcctctctgtggatgcaggcctacccctcctcagtccagcctcatctactagaccagcttggccattcactttttcagatgtctgtgagcacaggactgcagactgaactctcactcaagttcttccatttgccaagcccgaggccttttccgggctaaccagccctctctgcgctgtcttgtctcctgactcccaccctcaccattcacagaccatcacgacacagaggatgccaagttcttttagtaattcaccagctccatgcagggacatcacagggctgccctccatgagcagaggaggagggctgcctggcagagcgtttcacactccaggttagccagaaagagcatcttcatttttgtttccacacaacacttctctgtgagcctgttggccaacaaagtggcggccgattgttggaggagccagccaaccatcttgtctaacttcagattcttcagggctagaatatgttcaccccagaggcttagatgaagcacatttgcggctactcgggcagatggtctcttgctggcctctcgctggagcagtgccctcaccaactgtctcacgtctggaggcactgactcgggcagtgcaggtagctgagcctcttggtagctgcggctttcaaggtgggccttgccctggccgtagaagggattgacaagcccgaagatttcataggcgatggctcccactgcccaggcatcagccttgctgtagtcaatcactgccctggggccaggacgggccgtggacacctctggggccatcagacagccgtttccggccccgatccacgtaccagctgctgaagggcaactgcaggccgatgctctcatcagccaggcagcagccaaaatctgcgatcaccagccaggggcagccgtctgggtcccagctcccacaaggatgttgtcggatttcaggtctctgtgcgcgatgccctgttgaaccagatggtccacgccttccagcagctgcagcagcatcatggcggcgaggcgggggcctgggtgtgttcacacaaaggtactggcgcagggtacagggatagttcttcataacgaggaacagcgtccggccatggccccaggccttcagggtggaggcgtgagggcagcacatcagggtagtcgacccagggcccctggcagcagcggcacggaagaggtgaaggcgcggagaacccggatgatgttggggtgaggggctagttgcttgggacctctcttggattttctgtaagtgactgctccatactccccagccaaggccactcggcttcgctgggaccagctcctggctcattgtgttcaagatggcttcgctggaggaacctgccgagatgttccacatcatcttgatggccaaggggaaggcaggggcccccggagctcgctcctgcccttctcctggtgcactggtacctgggcctctccctggaagcaacccggtgctctttgtcacctccaggttctggggcaatgtaggcatggtggcttcatacacagcagcactgcagcccttaccaatggactgccctatcagatactcctccagccgaaagccctgcaagcg

SEQ ID NO: 46495 - DNA, 1548 bp, Homo sapiens
gttttgacgtgggttccggcctagggttctggctttcctcctgggctagtgaacgcggcgaagtcctcctctttctaatctccagagccgcagttccatcctctgggtcagcggcttaccctgactgggctgcggtatctgccttccttcccccaacaaggcgacaggtagtcggggctggggccggaactgactgagtgggccgcaactgactgagtgggccgcggctcccgcctgaggaggctaggaaggactgaacagcagccgacttcccaggctctaaaaatcgtgcctctgagttagagctacctcaaaagcaagaccaagcatgagaaatggagtcttttggccaagtattggggtgttcggaattcaagcgtatgagagagtggacggtagcgttgagaattttcatttgaagatctcgtcttaaccaccccaagtgtagtccagaggcggcgttttccctgcgagagtgccctggaacaaagcaaggatagcgtgggttagacatacctgaaatgaaagcgtcttactttatctaggtacatatttgcgtcagtaaggcgcaacgccatttctctcttggaattcagaagtgaaatatggtgactgggacgcctgtacattgctttgacttaaaaattgaagtccattattctgaccgaaagttaatctgatgattaattggttaaacatactatcgttgctaattagcataattattatttacaataaagtgagctaaatagctacaactaaaatatatttaaattactgtgatattgtgatgctaaagatgtgttgaaattaatatcttgaatttctcaaccctgcctaaatgcctctgagagtaattagtataattaaaagtcactagagaaagtgaatgactctaataacaggataaccaattcctttccagtcagatgggtttccagttccttggccttcaacaaaattaatggtggccccatgaattgtcagctgatgaaggaacactatttggtttttggcatgcaactcggaaagaaaccaaacgattgattgacatgcttacaacaaaactactagcattctcacctatttatgtaaaaccatttctcagcacttgtatctgtgaaaacaacagaattgaaaatgaaccctgttaatctaccagtaggaactattcatccagataaatgaattaattggtgggtcagccccatctatctcactaagagatgtgttcccaatagaatttcaccttttataactgtgtgttatcaatatttgcaatcgtgtcattttgatccattatatactaaagatgattgtgatgattactcacttcagaagaattccagcgtagagccataaagttacacgaaattttttaaggtttactacatatgtcatatttttattgcgaagaagtgatcaagaaaaggttgttcaaacatcaaagtactatatttgaataacattttttgttagagtacaatctaaatatgttagagataataaaagaacaatgttgaaaaaaaaaaaaaaaaaaaaaaaaaa

SEQ ID NO: 46496 - DNA, 709 bp, Homo sapiens
caccagggtgtcctagtccgcagaggtgtgggggacacactccataatctctacttttctttttgtgcagctgagtcatggagctttcagccccagcacatggctcctccttaactgcgtctgctcaacctccctcagccctgtgaacagcatccccgcacacagacgcagagcaggactctctctgctgccacttcaccttcctgagagaggaccagcggccagagcctcagtgactgccaccctggaggacagggcacaacaaccgtttctggagagaatgggaggattccagaggggcaaatatggaactatggctgaaggtagatcagaagataacttgtctgcaacaccaccggcattgaggattatcctagtgggcaaaacaggctgcgggaaaagtgccacagggaacagcatccttggccagcccgtgtttgagtccaagctgagggcccagtcagtgaccaggacgtgccaggtgaaaacaggaacatggaacgggaggaaagtcctggtggttgacacgccctccatctttgagtcacaggccgatacccaagagctgtacaagaacatcggggactgctacctgctctctgccccggggccccacgtcctgcttctggtgatccagctggggcgtttcactgctcaggacacagtggccatcaggaaggtgaaagaggtctttgggacaggggccatg

SEQ ID NO: 46497 - DNA, 2520 bp, Homo sapiens
ttttttttttaaaatctctttgccagttaaatctcactttttcaaaacaagccctgaatcagggcaaaacaacttatatttggtttttagctggaggctcaccaggccagatttgcaggccaggggggcacttttcatccatgaaggccccagcctggggcctgggactctgatcaccattgtggaagccagaggcagctgcgtatggaggagaaatgtcaaactgaacgcaggtttcaccactctaggaaagcagcttgttgagcccctgcagctggatgtggttagagggatgggctgaataggcaggttagatttcctgcatcaacagtgctttgggaagctgtgtggattcctgaggaagaacagggagccgagatggagccacacatgagtttgctcaccggctactgcagcactttgtacccagaatctcatgtccacaaaccccatgtaaactttcaaccactcaaagctgtttattcggctgaagaaataacttttttttctcacccagtcatttgtacctcttcatatggctatgtcgcaccctccagaaacgtggttatacttccagtcagtgtgggagaactgaagacttccggttggtcgaggaactgagggttgaccttcgggaaggaagttccactcatcttatttattatgcctgtgatgtgggtcctgccagggagacatccagtactcggtgtctttaattgccacctggggaactgtgtttattggccttctttggggcatcctggttttggatgaagtgaggggaatacagaggtaaaagaattgtctccaccctgaagcggggagtcccgcttcacatttctggaaatggtgcagccactggggacagttctgccccgggcatggttgtttcttcaaggtcctctaaatataatccctattcttacataatccttggccctgatggttttaagcaagaactcctgtgtcccatggtctccaccactcaccatcaccctgctgtagcaagagtcctagtcaggggaggtgcattttagtagttaaattgcacttatccatgagataaataaaaggagaactgtttttatcagtggaggctaacctaaaatttcaaagtgtcgcctttttgaaatcttgggcctctctctctgtaggaaccaatgggccctttgtggcttcacggccttcgcaccttaactgggagagttctgaggctcctggcagctcacctgaggcccacagactaggcttcttggctccttccgcagcattgcttgctttaacccccaggaacccgcagctgtgggaagagccatgtagggaggctattcccaggcatacacttccactgccttcagctgacgtcacagctgacaaatcatctcctctatcggagccagaagacttcagctccacaaaatgaagtgttctgtcctgaaaacatttttgggaagaatcccaacatcgagaaaacggtgtcctgtgagttccaacaatgcttcttgttcatggggtttctttccgtatgggagtgggatttaaggagtgttttattttgttgttctaactgagaaaaaaaggagggcacccacaaggttgaggttcacacagtctccacagtttccaggaggcgtttgggggtggggaaggcacctccagagcatgaggctctaaggggacatgagtaaagcatgtctgtgacccagtgaggaagggagaggccagctgcactcctgcacggggttcctagctgcagaagggtcccgcctaggccgaggggaaacacctgatagcagaagaggcctggatgcacacctggcacgccgaggctctccgcccagacacagtgctccatgtcagcccctgcacctggggtgtgtgattcacgtgcacagatgccacaatcctgcaccaatatcccacagatgggggaaggtgagaggaaggggcaagtgatgtgtaactgctcaagagatgcttaaacctccatagagaggagccgggcgcaggggcatctgtgtgtcccgtcacacactgcagcagggaagggtggctggctggctccctggcatcagtggtttggtttaagctccagagggtcttattgccattgtcttttcctctgccccttgagccagcctaaggccctggagtctgtttctttaggcggatgaactgacatgctcctaccatgaccaggctctgggcaaggctcctcacagtatccttgagaggtgggcatggaagtgcccatttctcaggtacagaaaccttcagagaggataaatagcttgccctgtagaagcaggactgaaacccttgtccgcctgactcccccagctactctgcccactgtagccccctgccttactgtcctggcacacccctcaccatcctgtataccttaaatatcaaagagggcaagagagaaagggctttaaagataagttatttttttaaggaaccttaatattatttttaagaagtaaccaaattagtgacgtgaaatgcaaaaaaaaa

SEQ ID NO: 46498 - DNA, 1020 bp, Homo sapiens
aattaatcatgtatttattattgtgttttaaatcttaaatatattcatcctccaagtaacagaatttagcatctttacacattagctgtatcgtgtgttttgatagtttaggcacatttcaggattttagatttcattttgtggtttcattataaaacagcttgcacaccaaactcaatcaatcttttttatttaaaaatccacctaaaaattcacttctgggttttagtttttgtttaaaaagaagcaaatatttaaaagcatcaaatgttactagtctacaattcatcttgttatgaacatttttagtttgaggattgggaaaataaacctattacattgattaggcacagtactatgggccaatgggccagataatcagggcacatctgtgtactcaggcaacagttagaggtctgaatggagggggtcatgcctcaactgtgggcactcctttctctatgccccctccaaaaattgttataagtctcaaatcagtacatgagattgtatgtaacttggttaaaaaacaactatacgtgctttctaaattatgttgcaaagccaagacagacgaatataattgtagcctcactacaacttgtggtcttaatatctatgtcacaggcaccatgttataggtgagacagaattataccatccctctggtgttttcagaaatctggttggaaggagtccatgactataacatttcacattgtagcaaggctccaatatttcttgaattggggcagtgaatataaatcacagtacaaaatccgtaattctttcagtggaaaagcaacaggtgctacatacgagaatcacttatataacatctatttttttaaaaaaaatgcagatataaaatattaattgcatagggaattaaatataaggccaagaagaatattaagtaaaaaaaatcatagaaagggcactatggtgtcaaaagacagaatttcatagagtaataaatctgaattactatctaattaaaaatcacagtatgttgctgta

SEQ ID NO: 46499 - DNA, 391 bp, Homo sapiens
ggttagagatgcagaagcttgggcctgccgaatcagaatctgcattttaataagatcccctggcgattcgtgcacccatcacaattagagaagcactgttctagcacgtagctgcaaatgtgttttcaaactttgctagagtcctgctattgtagtattgggctatctggtctggtatgtactccagctgttttatttacattctggaatgatgacacttaatttgagaaggcttgtctttgccactaattaaagtaaaaaaccagtcttacggtgtgtgcttatatttataagcaccacctagcaacagcatcaggcaattcttagcaaaataagtgagacatttcccttgagatttcttccttattccttgaagagttcttataacagc

SEQ ID NO: 46500 - DNA, 616 bp, Homo sapiens
agtataatttgccctcgaggtcccagtaatccgcacgaaggccatggcgtccggagcggctcgctggctagtattggcacccgtcaggtccggggctctccggagcgggcctagcttgaggaaagatggcgatgtcttcgccgcatggagcggctcaggccggagcctggtaccgtcgaggtcagtcatcgttacccgcagcggcgccattttgcccaaaccggtgaaaatgtccttcggccttctccgtgtgttctccattgtgatcccctttctctatgtcgggacactcattagcaagaactttgctgctctacttgaggaacatgacatttttgttccagaggatgatgatgatgatgactaacaggaattacagaaaggagaaagcactaactgaagaaatggtgatgctctcagtttctctgccttccctatcagcagaaaggctcggggaaggccctcagcctcccagtctggtgaagcttcctgtatggtccatgaccgtattccaccccaggctctgggaggctccctgagatgtgctgtccactaagcactgcacaaacaagcaatcaaattatgaataaacataataaatatcaaaaaaaaaaaa

SEQ ID NO: 46501 - DNA, 765 bp, Homo sapiens; identical to SEQ ID NO: 715

SEQ ID NO: 46502 - DNA, 1179 bp, Homo sapiens
  misc_feature (1)...(1179): n = a,t,c or g
gagactcacggtcaagctaaggcgaagagtgggtggctgaagccatactattttatagaattaatggaaagcagaaaagacatcacaaaccaagaagaactttggaaaatgaagcctaggagaaatttagaagaagacgattatttgcataaggacacgggagagaccagcatgctaaaaagacctgtgcttttgcatttgcaccaaacagcccatgctgatgaatttgactgcccttcagaacttcagcacacacaggaactctttccacagtggcacttgccaattaaaatagctgctattatagcatctctgacttttctttacactcttctgagggaagtaattcaccctttagcaacttcccatcaacaatatttttataaaattccaatcctggcatcaacaaagtcttgccaatggtttccatcactctcttggcattggtttacctgccaggtgtgatagcagcaattgtccaacttcataatgnaaccaagtataagaagtttccacattggttggataagtggatgttaacaagaaagcagtttgggcttctcagtttcttttttgctgtactgcatgcaatttatagtctngtcttacccaatgaggcgatcctacagatacaagttgctaaactgggcatatcaacaggtccaacaaaataaagaagatgcctggattgagcatgatgtttggagaatggagatttatgtgtctctgggaattgtgggattggcaatactggctctgttggctgtgacatctagtccatctgtgagtgactctttgacatggagagaatttcactatattcagagcaagctaggaattgtttcccttctactgggcacaatacacgcattgatttttgcctggaataagtggatagatataaaacaatttgtatggtatacacctccaacttttatgatagctgttttccttccaattgttgtcctgatatttaaaagcatactattcctgccatgcttgaggaagaagatactgaagattagacatggttgggaagacgtcaccaaaattaacaaaactgagatatgttcccagttgtagaattactgtttacacacatttttgttcaatattgatatattttatcaccaacatttcaagtttgtatttgttaataaaatgattattcaaggaaaa

SEQ ID NO: 46503 - DNA, 437 bp, Homo sapiens
atttaatacgactcactatagggaatttggccctcgaggccaagaattcggcacgaggctgcgcattggctctctggtgctgctgttacacgattcctctgactacctgctggaggcctgtaagatggtcaactacatgcagtatcagcaagtgtgcgacgctctcttcctcatcttctcctttgtcttcttctacacccgactggtcctctttcccacccagatcctctacaccacatactacgagtccatcagcaacaggggccccttcttcggctactacttcttcaacgggcttctgatgttgctgcagctgctgcacgtgttctggtcttgcctcattctgcgcatgctctatagcttcatgaagaagggccagatggagaaggacattcgtagtgatgtagaagaatcagactccagtgaggaggcggcgg

SEQ ID NO: 46504 - DNA, 1530 bp, Homo sapiens
ttttttttttttttttgctgttcacccaatgatcttttattatcaggtatcctggctggcccaggacccagagacagacaagctggggccaagcagggcggacgatctgagacccattttacaggtaagaaagacaaggagcagaggcctgcatgaaactgcagtaagcagcaggcgccagggggcccaaccccactggaatcgcctgccctgccctgagcctggcccacagtggctgccacatttcagacagggcagtgagtgatgggacgtgccctttgccccctctggtagggcgtggggctgggggaaggagcaggacagtaacatccgtgctgctggctgggacccagaagtggctgggacatgggggcttctttcttctgattgtagaggcctcccttacaagggttccccctttcccccgaccctttacctagggcctgccagaaaacacttctcattgtgaaggggacagaactaatgggggacagtggaggacatggatctacccccattcctgagtcacacgactcacccagagtcacggcccagactgggcctggggtcatggcgccaggttgcccctctggcctgtccacagctctcggagctcgacatgacaaccccaggttccgcagggcggccttggccacgtcctcacagtcacggtgggcagatcgggcctgcatgatgagtgcctcagcccccaggtccaggatgggcttcgagaaggcctggccgtgggccaccaggtttcggatcagcatgcaagcctgtttctgcacgccggccttctgcgggtgtgccttcatggcctgcagtgctgccacagccccgccaccctccacgatgatgcggctgttgtcgggcttacgcagggccaggaagcacagggccgcgcagctctgctcacacacctgggggctggtcagatgctgggtcatagcagccacgatggactccgtcccaccagcacggacaatagcatctttcaagttcgtcgttgcctgcgatggcttcgcaagggtgctcagcacttgcttcacgagctcctgaacgccgctctggtccctcatctggtggtcaattgcaagtcggctagcagggacaccagaatgctcaggccccccgaggtcgacgacctcctggcaagaactcgttgcgaatggcccaggcgggacagggttccacagagctcgctcaggatgcccagggttatccaggaacgctttggtggcttcgatgagcaccttcaagcctttgttctcctgcacaatcatcttggcatggttgtgggcatggccaaagggcacacggatgtcgtcatcgaaggtcatgacacgcagggcccagcaggcttccctgaccacgtcagtgtggtggccatgatgggtgatggcaccagtcagcagaggcagcacgccagctttcaccaggtcttgccgattctgttcatgtttcaggcaagcgtgacgcacacagcggatcccagagcaggtcaggtcagcctcatcagccctgtgccga

SEQ ID NO: 46505 - DNA, 667 bp, Homo sapiens
  misc_feature (1)...(667): n = a,t,c or g
catctactttatgtgttaaagctcttagtaaattaatcatagttattttaaattagtggtctaataccaacatctctaccatatcttgaatttggttctgatgcttgtactgtctcttcaaactgtgtttttccttttagtatgcctcgtaattttttcttgataactggacataatgtactgggttaaagaaattgctgtgatgttcctttagtaatgtgatggtaaggtgtatgtataggtgggggagcattctatagtcctatgattaggtctcagtcttttagtgagcctgtgcctctggatcatgaacttcacaagtgcttttcagtttttccccctctttaattgggataggatgactagagggggctgtggtttaaatggctgagtttcagtgttcccatctataggacctttcccaaattggttggtctctgataaaacgttagtaagttaagctctggttaaatagtttcccttaaagaattttttttctttgagggcaggccttattaagaacagaatgctccgggtatattccacatggctggttttctcatccccctgctgaaaatgtgtgggtttttttttctgncttcactgngagaacctggaagaagttctggagatgaactcnnaaagtatgtgggcanaaggggatgga

SEQ ID NO: 46506 - DNA, 2172 bp, Homo sapiens
gtcgaccgtgtccgcgcgcctgggagacgctgcctcggcccggacgcgcccgtgcccccggcctggagggtggtcgccactgggacactgtgaaccaggagtgagtcggagctgccgcgctgcccaggccatggactgtgaggtcaacaacggttccagcctcagggatgagtgcatcacaaacctactggtgtttggcttcctccaaagctgttctgacaacagcttccgcagagagctggacgcactgggccacgagctgccagtgctggctccccagtgggagggctacgatgagctgcagactgatggcaaccgcagcagccactcccgcttgggaagaatagaggcagattctgaaagtcaagaagacatcatccggaatattgccaggcacctcgcccaggtcggggacagcatggaccgtagcatccctccgggcctggtgaacggcctggccctgcagctcaggaacaccagccggtcggaggaggaccggaacagggacctggccactgccctggagcagctgctgcaggcctaccctagagacatggagaaggagaagaccatgctggtgctggccctgctgctggccaagaaggtggccagtcacacgccgtccttgctccgtgatgtctttcacacaacagtgaattttattaaccagaacctacgcacctacgtgaggagcttagccagaaatgtaagaacccttgaggggatggacttgaacggacagttccagaagtgtgactggctaaagctcgatgtggtcacagctgtatagctgcttccagtgtagacggagccctggcatgtcaacagcgttcctagagaagacaggctggaagatagctgtgacttctattttaaagacaatgttaaacttataacccactttaaaatatctacattaatatacttgaatgaaaatgtccatttacacgtatttgaatggccttcatatcatccacacatgaatctgcacatctgtaaatctacacacggtgcctttatttccactgtgcaggttcccacttaaaaattaaattggaaagcaggtttcaaggaagtagaaacaaaatacaatttttttggtaaaaaaaaattactgtttattaaagtacaaccatagaggatggtcttacagcaggcagtatcctgtttgaggaaagcaagaatcagagaaggaacataccccttacaaatgaaaaattccactcaaaatagggactatctatcttaatactaaggaaccaacaatcttcctgtttaaaaaaccacatggcacagagattctgaactaaagtgctgcactcaaatgatgggaagtccggccccagtacacaggggcttgactttttcaacttcgtttcctttgttggagtcaaaaagaaccacttgtggttctaaaaggtgtgaaggtgatttaagggcccaggtcagccactgtttgtttacaaaatcaggtaactaactgcatacactttttctctttccatgacatcaagactttgctaaagacatgaagccacgggtgccagaagctactgcgatgccccgggagttagccccctggtaatagctgtaaacttccaatttctagccatacgctcagctcatccatgcctcagaagtgcatctggagagaacaggtttctaagcataaaagatgaaagagcagttggactttttaaaaattcagcaaagtggttccctctcttagggacagtcaaaaccaagtcacttaggtagtaccaaaataaataaggaaaagcttagctttagaaacagtgcaacactggtctgctgttccagtggtaagctatgtcccaggaatcagtttaaaagcacgacagtggatgctgggtccatatcacacacattgctgtgaacaggaaactcctgtgaccacaacatgaggccactggagacgcatatgagtaagggcactgacggactcatgatttcttcttaccagatgctttcctgttctttaagagtttaaaatcatcagaaaggaaaaacaaactctatattgttcagcatgcaatacataccacgctagggctggctcaattgaaagtgggcaaaagcttacaaatactaaaaagaagtgctgccgcgcagtgtggaggccactgtttggaaataaatcttcctaacact

SEQ ID NO: 46507 - DNA, 611 bp, Homo sapiens
  misc_feature (1)...(611): n = a,t,c or g
gagctggaggagtctctcctctgctctccactcanatgtgggacatcagtcgccaaaagccactcagccccagccacctcgcgtgagaccctcactgttcattgtgttcatctttgggtgctctctgccagccaggcctttcctgcaagctgctgtgcttccccgtccacgtgtatctctgctgtgacacactgagctgacgcacatttccagtgcagctgnagaaganaaatgggattggctcttgttttctgcaagttcatgttttgcattttatgttcttccacaattgatctgatgttcaggaaaagataataaaggcaaattagttagtggttgagacaggcatttcctcctcccgcttcttgaccccacagatgtattccagcagagagcaacacaccagtcatcaaaacccactggctcctgtgcggtgtcacagattgcagggttctgacaaggcaggacagtcaagagtggggacactttcagcttctacttttgccttctagggggagctttctaagtccccacatttaccccgagtcaccggaaaaatctgatttttcccccgaaagctcaatgactttaacgtgcttggctggtttgtc

SEQ ID NO: 46508 - DNA, 4974 bp, Homo sapiens
tttttttttgtgttaaacagctttaatctcgctcattgcggcttctcggcacagtaagaaatattgcacatgatcaacatgttttgttctggggaagggggcaagggcagggggaatcaccttcttagaaagtacaacccaagttgggagggcagagggggtgaggagaaaaccctccccgtgcctgtggcaaagtgcaggagcccccacccccaaactaacctgagtccagcccctctggggaaaaaaggggtgcatgaactccccctattccacaggcgcctccctgtggcccaaggcctgcaccaccctccagcttgcagccctcacaggagccattttgcataaagtgaaaagctctgaaggtcacacgctccaggttatgtacaggggcttggaggagggagactgcccctgcagcccctcagctgccccccagcaccgggagggagcttcgagggaagggggtatttacaagaggagcaggcctcattccgccccaaactggagaggacgaaatggctttacccgggaggagataaccttcctgcccccacatactgtccatgtcctgagggggtactataagtcctggcatcttctcaggggtccctcacctgcctgtggcagctgtggagggacctgggggtgggggggagggctggggagccccctccccacgccaggctgtccaggctccgactctgggggtggagtcagtgacggggcagcctgggccgtgccagagtccgagctgggtgaggtggggtcagggccccctgcggggctgggagtgggggcaggggcagcagcggtgccagtggggggcggtacagggagaggagcctcagctcccagggggctgctccgtgggagtggcagcctgcatgatcttctggcgcacctcacggatcttcaactgcagacaaaccttggagggaaagatgtctgcatagcgggcctggaaggcggctgtggcctgggctgacgggaagaagccatggtcctgaaagagctgcatgaccagggcccggcgctggtccagggtgcgccgcagggaggagtatggcaccttgtcatactctagctccccaagcacgtcctcggcttctgtacctgtacggtcaaaggtgaagatgtccccctcgcacttggcactcttgggggtgttgggctccgagctgcagctggagcgtcttctcatcttgcgcttgggcgaggtggggtcctcgggtgctgaatccaggtccgtggagttcttcctcttcttgcggtaagagcccaggatggcccggggtgaggtggccagagactgcagggtgggggagggcagcacctcctcaggccgaaactcaggcaactcagcaaagcgctcttcgaagtccacttctgacaggaccctgttgtccacagagtcaaaggtcttcttcaggggcgggggccgcaccttcaccttcttgccagtaccagccgcctccttgcgctccggggtgtccccggctgcccgcccactgctgctctcgctgctgccaccaggggctacagctggagctggggccgggctgggaggagtgggaggctccccacgattctccaggccctgcccagggacgcgccagtctgaagatgagctggggaatttgctggccatggtctcagggcccttggcgctggtccgctcctcagcaggtgggggcagtggggggctgctccgggccgtgggagtccaggtctctggcaggggtggaggggctggtggtgtgggctgcccctcaagctcagactctggggcagttggctctcggactgggccaggctccagaggctgccggggtgcagggccaggccgcccagaggcacctgcctcaaaggaccccacgggaatgctggcgatggctgccttcactttctggggggccttcgggctgggccgctgggccttgggggccactaagctgtaggtcatggaacctgctgtggcgctggggaaagggctagtcggggctggggtggcagtggcaggggctggcgggcccttgggcagaatggtggctgcaggtggggttgtgctggtggccacagtgtagaccaggcttgggggggcctgggatggctgggccaggggtgctgaggaggtgggtgcagggctgccagagtaaaatgctgttatgacaggacctccgggggctgcacaggcaggcggcagctggggactgggcacaggtgacacgcccacctgaccgggagccagcagtggggcttggcctgctgagagcaggggctgcacgaaggcggggccgctgggccccagcgaggtgaagcctagagctacagagctcgtgggcccgtacgaggtgactgttccagcctggctggacgcagggctggtacccaggggcagcgcgtgcccgcccgctgactgcacataggtgattctggtggaggagggcaacaggaccttctgaggctgagaggtgggtccagggagtgtggctgggcccaggggcggcaccaggccgctgggtgtgctcacaggcaccggggtcagctggatgatcttgctggggggctgggcaccattctgcacaggtactgagaagggcgggctcaccagtggcagtggctggccggcccctccaccccgcactgacatgctaggggcggccagaggcactaggaccttcccaggcagcagctgggctgagccacccgggggcggggcctgcacgggagaaactgactgggctttggggggtggggcggagggtacagactgcaggatggggatgccaggagtgggtgcagtggcagccaggactttgccgttggtggaagtgcccggtgggagggtgaaacggatgctggtggtgggtgcagggccgctgggagccgctgccttggtcccaggggctggtgctggggcaggtgccacctgaagctgctggggcagcgtgggcaggatgtactgtacctgggtgattcccccagccttgcccagggcacctggttgcaggatgcccaggggtactggcccattggggccactcccagcacctgctcctgagcccgcagtggtcccaccaccaggggccccctgggcaatgaactggacagcagggggcgcaggggccccataccccggggtgcccaccagtaggttagtgacagtggcaggcgccttccccacagtgcccagcaggggtccagccaccaagtgtggggctggtgaggtggctgctgccgacttcttgtccgaatacactaagctgacacccagcggggagcccccaggcacccgagacccagtgcccatttcagtcctggcacctgctgtgtcatttggagacgcctcagcccggccagaggtggggaagggcttagaggcgatgggcacaggagtgctgctgacaggccgcaccacattggtgaccatggtggcggcaggacgggacaggggagctgctggggccccataggccagtgatggggcgggggcggagggcactctggctccgccgccctcttgctcctccttgtttgggggcagcaccagtgtctgcaggatgtttcctcctccgctgggaggggccgcgatgactgaggggcctggtggctccaggccacccacactttcgggtctcttgcgccggaaggtggcaggatccattgggaggaaccgggttgccttggaaggtgtcgctggacccccagccccagggggtgggggccgtagggggcccgctgtgctgccctgaccagactcctgggccttgaaggttcctgagcccagtgagaaggaggtggctgccgaggctgaggaggaagcaggcgaggacgcagaggaggatggggcggaaccatagcctttgccaaaggctacaggaggatccgggggccctgggggctcagggtccagtggggggcggcagtgggtaaaggaggaacggatcacaggtgaaaacaccttccgaccaaagcccttgttgccctctgggtcctccccagagctgtccccactctcgctgtcggtcacccgctccttgcacttgagatcaatgtcagtggtgccgaagccatcgtcagcaatgacatcatcatccccttcctcctcacagatgaccatgcgctcctcatcactcgtcatgtcctcactggccgcacgctgagaacgagaagctcgggtgggcagcagcgggggccgcccagtggccgccaaggcacctccctcaccaggggctgcaaagggtcctggagctccatactgggtagaaggctttgggccagagtacgatgcagggccagacaccatctgcgtcagttcctgtagcgcctgactgtctacttctccgccgtccaggctgtgtaccccgctgtgggagaaagctcggggccgggctgagccaggtcccccaactgtgtgtagccgttctgccccacaggagctgctccccggagccttggtgtctgagctcaggagtgtctgggctgcaacggacaggagctcagaggacaccccaggggcagcagcagtgcccgtctccgacatgctccgctcccgcgtctccttgtgccctcctgccagccccaggctcgtgggcttggcctctgagctggacttctttcggtccttgttgcaccacttccaatctgggtgggccttgaagtgggcctccttcacctggaaggccaggtcgtggtacttctgcttctccttgggccccagggcataccaccactcgcccaggatcttgctgacggtccggttgtcctggttgggatgacgctggtggaccagggcccggtgccgcttgctgaagatcatgaaggcattcatgggccgccggatgtggtccttctcccgcttgttggggctgcgtccatccttctcagaagatgagtcccgttccttgggtagggcactgagggactgggtccgacgttttccgggcggtagaggcaactggatctcaggag

SEQ ID NO: 46509 - DNA, 340 bp, Homo sapiens; identical to SEQ ID NO: 17248

SEQ ID NO: 46510 - DNA, 1295 bp, Homo sapiens
cctcataagtgggaactggcttgtataaaacaagaggatatacatccgcttacataaaacaagagaaatatgtacggtaataaaaataatctttaataaacttgtatagagaggattccggtttacatgtaagtctgctttaaataaccacagctgaatgactggaaatgttcttttcttaacacaatgcccattcattataagttaagctggtcctagtttcttacaaatctcttatttccttgaatttatctactacaccctcactgtgatgccctttaacttataagctgggcctgcccagcctggcttataaagcccctcttcagaaatgtaccaggtgtattaaacagaggcatcatttaatggaaatctgcacttcaaaacagcacttgaaggaccagccattggccctccaatgtaaatacttctcatttcacattatcagagaaacagtgcagtttactaaccactccttccttataagaaattcagtagctgtaaaattttttttcagtttcaaaacatttcaatacttattaattccaaagatccgaacaccatgtagttgtggcattttgggaattagtacactcaggagagaagctgtgtttaggatgaagtgagttggatcatacttcgtatagaaacttgccagaaaatatagaattattggagaaattgtgaaaaacttccgtgaagatgtaaactgtactccatagtccagttgttcccaatgagttaggagcccttgctttaccctggtcagggagtttcgaaaggtgttcctttcactgcatgcaaaaatacgtacatccccagattatgtataatatttgttaaagtccaagcaacaggaacactgaagaagggaatgctgagtaagacaatatgaagcaagccaactcccaatgcatatgtcagccacataccccggctgttcatgacacgggtatttggattcacttcactgtgggcaactccaacgttcatgtttgctcgagcccagtgtgtcaagtagtcagactcttatatttgacttaatgtatccataaagaatggtcagagttcagatcacttctttctgaatactcaatgtggaaggtacatgctgttgacataatgtggtgtaaaatttacatggtcaagggataatgtttgtttctcaattttgtgattagactaggtgaaaataaggagtcttctgaatatttctctagtcaaatcaaaaacttcagttttctttcttctttttaaaaaaggttttcccttctcctttccattgaagatggact

SEQ ID NO: 46511 - DNA, 1981 bp, Homo sapiens
gagcgtaagttcctacacacggacgttactgacatgcatgtacaggtaagcacacatgtacaagctcctacaggcttgctctcacacacgtgtatgcacagcagagagacgtatgagcttctactgcacacatgcacacacacacgcacacgtacattcactacacacgtggcagcctcctgcacacgtgcacattcatgtgtacaccacaaatgagttcccagacgtgtaaacacacgtgcacacatcgtacacatgtgagctcccacacgtacacacagatgcacatggacacaccccaaacacgcacaggctcctacacacatgcacacacgtgtacaccacaaacgagctcccagacatgtaaacacatgtctcccacacgtgagctcccacacatgtacacatgcacatgtacgcaccacaaacacatgcgcaggctcctgcaggcgtgaatacacacatgcacacacatatacacacacgtgccacaaacaagtgcacactgtcctggtgtcctgcactgcatcctgcctccttgctgaggggcccctgtgagaggcctctggatgggcatgggaagatgggctccctggcccccagcccatgcctccctgggatgaagagtccccctcctggcagaatgtctgggctttgcagagcaggccccgggggtgaagtcgcagcttcacttacaccagctgctctgtgagcaaggcttggtgccctggacaaggcccttcccctttagggaggtccagccttcgcaagctgaaacctcccctcggctcagccctataccaggcggccacagcaggactggccacacccacgccgcacctcatccgtgcacgcgtcggagcccccgccagccttctgccacgagccagctgggaagggccgcggccgcctaaagccccagtcaacccagcctgtgtctgagcagacagggcgaacaagcaggccacaccgtctcgagggaggaggccagatgcggccagcgtctccaacagggtgaccatccgctcggcttgctgagcgtttaaacaaatgtttagacaggctgtggggactcccctgagttgagccttggccaggggtccggtgctgtcgcgggaaaccctcccagccttgttcttcaaaccactcagctcatgtgttttgcactgactagtactgaataatacaaccactcttatttaatgttagtattatttatttgacaactcagtgtctaacagcttgatatgcaggtccttgcatcctacatttctttaggaagttacccatttgtaactttaaaaacaggaaaaatatcagttggcaaatgcaatcttttttttttttaagctaaaggtgggtgaactggaatgaaaatctttctgatgttgtgtctataagcagccttgatgggatatgttagaagtgtcatgaaagtgtgattctacttttgcagaaaaatctaaagatcaatttatatagctttattttttactttatcaaagtatacagaattttaatatgcatatattgtgtctgacttaaaattataatgtctgcgtcaccatttaaaatgtctgttcattatgtaatgtaataaaagaaggtcttcaaaaatgtatttaacatgaatggtatccatagttgcatcatcataaatactggagtttatttttaaattattaaacatagtaggtgcattaacataaatcagtctccacacagtaacatttaactgataattcattaatcagctttgaaaaattaaattgttaattaaaccaatctaacatttcagtaaagtttattttgtatgcttctgtttttaacttttatttctgtagataaactgactggataatattatattggacttttctctagattatctaagcaggagacctgaatctgcttgcaataaagaataaaagtctgcttcagtttctttataaagaaactcacacaaaaaaaaaaaaaaaga

SEQ ID NO: 46512 - DNA, 1353 bp, Homo sapiens
  misc_feature (1)...(1353): n = a,t,c or g
tgacatgattacgaatttaatacgactcactatagggaatttggccctcgaggccnagaattcggcacgaggattttattgatatattttctgattatgctaatttcaaatgaagattcctgccttaaaatattttttaatttaatggtcagtatattttgtaaaaatcatgttaatttatttcatagttgacattaatatcttccctaatttctttgtatatattttgttatgccttaaaggccacctgctatacagttgttaaatcttaaatatgctttttaaaaattggaataatgtattaaggtcaaataatatcccataaaatatatatttctgctaatattagtaaatatcttaatttttcattagattcatatcatttaatttcacatattcaacacctttaaatgttggaatcttaatatgcgaagtgtgcctctgcaagatactaacacaaagctcatgttaagaaaacagttgaggactcagaagtcagttcgaaaatgcactttcctaacagtgaattcacaaccctgaacagcagcatttttggaaggcaaactgttcgtgatggtacaatgtaaatggggacttctgtaaagttctcagtttcggtccatgtggtttatctttacattttaaagatcaaagaagtctttacaacctgaatccaggtctaaaacacactagagtagctggtgactataaataatattttaaaatgctgtgtctacaccatcaagactgtgtctacactatcttggctgaacgagaagagatgtaaatgctgggtggtcccgttgacccacggcgttgggtacaacaaaaccagccatcggagttacaccccaaagcaccatttgctgtccagctgcctgtcgtttggcccagaccaccctcagaaaaaaaccagctgcctctcccattctcccctcccgttctggccacagcggcctggggctggtccagtgctatcccctggaggctcaacacaaaacttccccatcccaaacattcagatgaactgagcgtcttacacacgcagtacagaggagcacacattaggatagaaacagtagaataaccacgggcaattaaactttaaattttctgagcagcattttggtatttaaacatttcttgtaaaaagctgagacagtttgtaagaaaagaatccttaaaatctagatttataccattttttaaagtcccacctttcaatgtttaataaaacaaaaagagaaatccttaatctaaaagctaaattatttttgaatggaaatactactgagaccattgacactggataacagtaatgatcccattaccagataagattgactgacgggg

SEQ ID NO: 46513 - DNA, 987 bp, Homo sapiens
ggagacttcaggtgtggtagccggcgccgcgcccaatagccggacggggatctgagctggcaggatgaatgtgggggtggcacacagcgaagtaaaccccaacacccgagtgatgaatagccgaggcatctggctggcctacatcatcttggtaggattgctgcatatggttctactcagcatccccttcttcagcattcctgttgtctggaccctgaccaacgtcatccataacctggctacgtatgtcttccttcatacggtgaaagggacaccctttgagactcctgaccaaggaaaggctcggctactgacacactgggagcaaatggactatgggctccagtttacctcttcccgcaagttcctcagcatctctcctattgtgctctatctcctggccagcttctataccaagtatggatgctgcgcacttcctcatcaacacagcctcattgctaagtgtactgctgccgaagttgccccagttccatggggttcgtgtctttggcatcaacaaatactgagggatgggttttgggacagctccatgggcatggggaaggcactgaaacagaggactataaaacatccttctcttattctccatactgtcttcctacacctttaaagcctgagaactatacaacctttcccagactcccaagaagagaagagattggcaaatggggctccctgggcccagtcctgctagtggcaagtttctttgaatcaggaaggcaggtgaggtaagggccaaatcactctcctccatagcaggaagccatttgggcagcttctttggtgattacatctttccatatcttttacacttaccaccttccagctctgttttgctgtgtatttttcttacaataatttttttcagctatagctgcagtttaatcaggatgggtagagagctgtcctcaataaggctgggggtgggaaagaatggaatactgacctaatgtataaaacttaaaa

SEQ ID NO: 46514 - DNA, 2185 bp, Homo sapiens
tttttttttgagaaatagaaaaccattttattcgcatggtttacatttacagtttattagctagtcaacatcaacatgcaaaaataagcactaactacaaacctctacgatacggttctctgtcagctacggtggttcatttgttttgaaaagtcatcagtacttctttcaactgaacgattaatttctgtaatggatagcaattagactctacagttatggaaccatccgggcaaggcctctgcagaaatttggtcccgtggatttccacgttatacattctcgaagcaggaagtaaggcgggcacacagagggtgtgatatcgaaacgacgcagctacgaacacagccccgcgatgtgatatcgaaactatgcacgtacgaacacagtcccgcggacacgacccgcgaggcaggcgggcgtcctcgaaagccagcccccgacggtggcggcgcaggcgttttggcagcagctctcgaatgaagccataagtgtccctcgtggcgcggcatcgcgggtcactgcaggtcagtccggtgccgctgccaccttccccggcccaggccagggccaacaggaagtggtgaaggaccagcccgttctccaagtctcatcgttcacagaaggaaagaaactgaaaacacagggaaatcacggactcctatattttaaacgttcttaagtttccctcgggtgtttaggtcagtctttaaagaagagtttccttcgcaagttgaaagtacttttcagaagcatcaaatggttgacgtgttacaaaatcctaccaatccaaatgttttcaagtacaaacttatgaaaccttattttctctcttcctaagagtatttatcgttgctcacggatctttggtcgcaagaaacagaaacgccgcggcaggctggagcgtgggacaggaggaaagcgtggcctccccgcccactgcagcccgtccccgaagccgtgcgcttcacgacgtggggcctacatgatgtacaccttctcggcttgtgagaagtggaagacttctttggttctcgggcacacgactttatcatcttgacggatagaaagcagagaattgtagccgtagacgtagccgttgggcagcatcatgggcggattgttctcgttcatcacgtcgccagaaatcttgcagaccaggcgggagttggcacagtgggccatgggccagggtgcgccagcttgttcagggagcggctgcacacagggcagtcagggctcttgaagctgccgtcctccttgtagcactgtggtgtcttgatggctgagaggccagcctgcagggtgagggtgaacacagaattgtttcccagctggtgtagtcggtagttgtcgtaccggaactgctggatcagcatccgcccaccgtgcagggtccagaaggtccttgtacggggagatgtgcgtgtcgggcgggaaggccagcatgcccatggcctggcgcacctcgtccagctggctcccttctgcttggctgaagtgctttcttgcatgtctcacagcgtccagtctcttattctgccggatgagttcaatgaactcctggattctgaggctgaactccaggcagctcttcatcttccggagccgggacttgttgtcatggcaccaggccaggcaggtggtcgtctcacgcctctccagggactcctccacctctttggccgtcaggaacatctcaatattcactaggtcctcgaatgcgctctggcgcgccagcttgacagccgtgttgtagtagccgcaacgcagcaggtgctccaccatcatgcgatccatgcgcttcctcttccacacgctgggccccgcgggctggtcgctgctatgctctttgaggtgctcgatccggcgcttgcacagcttggcgctctcgtcctcggccctggatggattccaccgccttcctcttgaggacgctgagcttctccaccacgccgtccagcaggctgaccacggagtccacggcggggcagccgctcaacgtcttctccagctcggccaccaccatggtgacgtggctggtctccccggtcaatgttcttctgagcggcgcgaaagcgtttgttcagcgtctcgtagggcaccttgagggtcgggtactcctggaccttcagggtcatggacaactgagccgccgactcctgcaccgccatcttgaatgcgg

SEQ ID NO: 46515 - DNA, 1271 bp, Homo sapiens
gggtttcttttggagaggtagggggctaattgctatgttctcatggataaactttgccagcaaaaatcaggcttttgaacaattttaattttttgcctcataaattttgtgaatgctattcattatagggcttgtatatataatctaaaatgtcagcaaggcatcggagatgggttaacatctcaaaacaaaatagcctacaaatgttccttgtgggagactttggcgagggtctgtgggtaaaagcaccagggggttaatcttggctcagtttcctaaaaagcattgattaatttaactggcttttaaatatccccttccgctgatatttgttgtcagctgcctacagtttaatatgcagcgttcacaaaacagctgccagtgctacaattaatgaagcaaaacttaatatgtaatcacaatctaaattagcatcaatactttgacattcattacattggtttgggggaagaaaagtagttctggtatgtttcattgatccccagataccttccaatctggacatgatggggctgattccagatggtttttctgaaatttcattaaggtaggtcagcgtcatttgtctctgtttaggtaaaatataaaaaccctgcccagtagcagtggcatcgcttggttcctgatgcccatgttccagaggaattcggataccacaaacagctaagacaatctcagcttttcttagacaatcttctatctcaaacttcagacattccagaattgtcatgatgtttacactgtctgagttaaaaatcctgttcaagaaaaaaaaagattttgtatcacttcttaaaaaggaatattcatagcacttgtcacaaatagaaggcaaccatgagataatacaagccagggagaggcttgtattacatgacaggtgtaattagtctgctgagccagctttacccaatgaagggcatatgtgttagagagattagctaagagtagaaattcgagcatagaggccaggtgcggtggctcacgcctgtaatcccagcactttgggaggttgaggcaggcgtgtcacttgaggccaggagttcgagaccagcctggccaacatgatgaaaccccgtctctactacaaatacaaaaattagccgggtgtggtggcacacgcctgtagtcccagctactggggaggctgaggcagcattgcttgaacccaggaggtggaggttgcagtgagccaagatcacaccactgcactccagcctgggcgacagagggagacactgtctccaaaa

SEQ ID NO: 46516 - DNA, 657 bp, Homo sapiens
ggaaggcggagcggcggatctggacacccagcggtctgacatcgcgacgctgctcaaaacctcgctccggaaaggggacacctggtacctagtcgatagtcgctggttcaaacagtggaaaaaatatgttggctttgacagttgggacaaataccagatgggagatcaaaatgtgtatcctggacccattgataactctggacttctcaaagatggtgatgcccagtcacttaaggaacatcttattgatgaattggattacatactgttgccaactgaaggttggaataaacttgtcagctggtacacattgatggaaggtcaagagccaatagcacgaaaggtggttgaacagggtatgtttgtaaagcactgcaaagtagaagtatatctcacagaattgaagctatgtgaaaatggaaacatgaataatgttgtaactcgaagatttagcaaagctgacacaatagatacaattgaaaaggaaataagaaaaatcttcagtattccagatgaaaaggagaccagattgtggaacaaatacatgagtaacacatttgaaccactgaataaaccagacagcaccattcaggatgctggtttataccaaggacaggtattagtgatagaacagaaaaatgaagatggaacatggct

SEQ ID NO: 46517 - DNA, 673 bp, Homo sapiens
cgctgatacctccaggtactcccctcactgtcaaagctggggctcagcctcttgtcatctggagctttgtggggcaaagctgagaagctgcaacccagatttcaacccaaaaaggtcaagctgaatgcctcagactgatgtggaaggcagctggccttcctgggttggaacgaggcagtggccctgagccccttctccagggccaggtagaaaggacaaacttggtctctgcctcggggaagcaggaggagggctagaagccagtccctccccacctgcccagagctccaggccagcacagaaattcctgaggccaacgtcaccaaagttagattgaatgtttattatctttctttttcctttttaccttattgatttgatgaatcttgaaatggattcatttccataaaccaagttaaagtatggcccgaccatttaagaaaacaaccatctgagacacgcaggaaattgtgagcatttcgacccgagctctcatttcctatttgtgaagggtcagacacagtctacccaggggtgtctgggggacaagggggtctctggagatgtcacccagggagccccctctatgtctgagaggctgccactgctgcacatgctcagtgaggcttgggcggccatcctggcacaatggctcttcctgggtcaaccgtga

SEQ ID NO: 46518 - DNA, 1366 bp, Homo sapiens
gctcattaaatatacatgtatataaaaaacatacaaaaagtacaagattatgttaggaaacttttacagtgtcaacatcctgatttctcaaaatcttcagtagagggccaaaggtcaaaactttctgtgcacaaaaacttgatgtgactgaaatcctgaatcagtgtcatgcctaggcatgctatgcacagaatgaattttaatatgcagtcctcttttaaaaaaaaaaaaaaaggacaaaaaaagtaaccaaaaccaaaaccaaaaacacaccacaggacaaaaagttcttcttaaatcaaattctatttgtgaattcagcaaaataatttctataaaataaaacagcaaaatatttaaatagaatagggtgggctgtatctgtttgcaggggtatttggtttttagacaggttccaaaaaattacacacattcaagttaccaattctcttttaaatacagtatgaactgaggatttccttatttttaatcaaatgtttattctgaaattgtaatatctcaattatatcaaccagtagtttcttttttaatgagaccctgctttgaacgttaaacgttttggaataatggaaaaggagctaggacaattcttgctttcaagtaaaattgtgactgagcagaaaatcagccagctatcttggtgcagagaggtactccaagtaccgtgggggttctgatgacttccacgtcactgggatccaacagaaggaaagttttagaagattcacctaataaactctaccaaagaaacaaaacaagcacaccaaatacagtcttatattatgctccagcatcttggcatagcaaatttttgcatatttgttttaaatctttaaaaattcccattactgatacgtaagtgttctttattccacccagagattgaactgtcaaacattatatataaggaacatatgtgcaactgaaaatagactgtcacatttctccccttgttttatattttaatattctaggtgtaagaagtaaaagctctgagtaatacagctgtcacttctcggacaactgctgtcattatggtaactttttcctcattggctacactaacttggtgtgaagccatgctaaatgttacagcataactatagcttcaaagtgattaacctaatatcagaataaaaaggcaatgaaaaaaatctagaaacagtgttacatcaccaattttccacatcaaccaaataatttaaaggttaccagccttacattgctcatagcaaaattgactccagtggcaaagaattaacatgaaactattggtgtggctgacatggatgggctctgttttgttgctgttggttttttttttttcttttttgtaaaggagctg

SEQ ID NO: 46519 - DNA, 476 bp, Homo sapiens
gaaaaggtttagttctgggaggagttggggcctgtggcagctccaaggttttcatcacctgagggtgtcaattgcatctggtccttgggtgcgtggcgcacgtgggccttgcctctgcatcgtgtcactagccctgccatttgctcactctgtgttcctggggggtcatgtcacttgtctgagcctcccttcccttccctgtggacagggatcccgagacgggcctggtggatgcagttcagcatgtttggtgtgttgcaggccctggtgactaaggtcggctcctccccactggccatgcctggagggtgttgtcaccttgctgctctctcagaggagtgtggctgcctacttggcggcagctggggtctcttctactctgtccctgctcctctgcccctcctgcgtcccaccccccccacgttattctcagagcatgggacaattcctctgttagggtgaataattgagcgtta

SEQ ID NO: 46520 - DNA, 874 bp, Homo sapiens
ttttttttttaaggcttatattacatttaatagtgttaattttgaagacaatagtgttaatttcaaacttccataaagggtaaccctacagttgaggtgtttgatgcagaaaccagtacaaatttcgattgttaggaaaccaaatgttctgaacattattttcattagaaaagggaaggtaattttatagttgtttgaggtgttgtaatacatctactgataggcccagctgtttaactaaactggctgtctgttccaaaatccatgtggggcttgggttttctgaatgtgcatgctcctgtgttctacaacattctacatatgaacaatctatcccactatggctcttgctacagtttttgttaaactcagcattattttcacagagtctttcatctttagcttcatcaatctttttctcagctggaactacatgacaaaggtccatatcctcaatggagtccaataaatctacaacatgggacggtggagtgattgatttcagatgtttgagcacatactcttcacactggccaactgcatccagaagattgtttattttattgatcaaagttgaattattattatgaaggtgacaccaggagagcaaagcactcaatgttcctcggagtcgtccatagtttaaaatgacttctgcacctttcttataaccttgattgaagccctgttgaagagtaactgctttgccagcatctattccatctctataaccttctttgactcgtctttgcatgttactctgccattcccgctgtgccaggagcgactcgtctgcttcttcgtcaaacacgtcccctttgtctccagggccctggatcaaggaggctgcttgaacccacgacatcaccgaggc

SEQ ID NO: 46521 - DNA, 291 bp, Homo sapiens; identical to SEQ ID NO: 17269

SEQ ID NO: 46522 - DNA, 1087 bp, Homo sapiens
  misc_feature (1)...(1087): n = a,t,c or g
ttttttttttacagtgggctgtagtggtttatttatggtcttctataaaaggtcaccatagggagaagtgggagtaacagggaactctcaaggcaacggaaatgtaaatcttaacatcttgtctatttcaggtgatattcttgccctttacaatacagcactgaagccaggacatgcagctgcattttcagaagattgtgattcagcctctactaaagttgtcatccgtggagcaggaaaccaggtaaattgcttaccaaacacccctcttcctacaatattgtttaatgggaagaggttgcaaattcagggaactcttttgctgcaatttacactccccaatcatttcatcccaaaactcaagcctgcttttctgtagacttcttcatggacttgacagcctaattgttcttgaacatctggtttattatgtcaacatctaggttcctattctaacttggaatttcaaatatttattttctaatctgaagaagtcagtttaacagctcttctctctactggctataaaattgtatctattttgtttgaagcagtaagtacatatatcctatttgtgtttttagtacaattacattggctatcttgactataaaaaggaaagaattcgtaagctttccatgaaagccagcacttgctcatttaatcctggagtttttgttgcaaacctgacggaatggaaacgacagaatataactaaccaactggaaaaatggatgaaactcaatgtagagtaagtatgtaactggcctagctgtgaaaaacctgttgtatttcaattcctagagtcttgactaacaggagttagtcagtacttttcactaacaaacatttgttttctgtcccaccaagagagggactgtatagcagaaccctggctggtagcatcacaacacctcctctgcttatcgtattttatcaacagcactctaccatcgatcctatgtggaatgtccgccaccttggtaagtagaattaaccagtggcataagctagtaaagaattggtatcctaaaggactatcctccaggggatggggtatattcctntggttccccttaagtaagtt

SEQ ID NO: 46523 - DNA, 1050 bp, Homo sapiens
cggcactaggacctcagcagcagaagcaggagcccgctgggcagcgactccgaaggtgtctaactgtctggcctatgatgaagccatcatggctcagcaggaccgaattcagcaagagattgctgtgcagaaccctctggtgtcagagcggctggagctctcggtcctatacaaggagtatgctgaagatgacaacatctatcaccagaagattcaaggacctccacaaaaagtacttcgtacatccgcaagaccagggcctgacggcaactgtttctatcgggctttcgggattctcccacttgggagggcactgctgggatgacagcaaggagttgcagcggttcaaggcttgtgtctgccaaagaagcaaaggaaagaccttggtgtcccagggggtttcacttgaatttcacaatttgaggattttccacaacaacgttcattgggacctgattgagcaggtggagaaagcagacctctgtcgccgacctgcctggcctccttcaatgaccagagcacctccgactgaccttgtggtctacctgcggctgctcacctcgggctacctgcagcgcgagagcaagttcttcgagcacttcatcgagggtggacggactgtcaaggagttctgccagcaggaggtggagcccatgtgcaaggagagcgaccacatccacatcattgcgctggcccaggccctcagcgtgtccatccaggtggagtacatggaccgcggcgagggcggcaccaccaatccgcacatctttccctgagggctccgagcccaaggtctaccttctctaccggcctggacactacgatatcctctacaaatagggctggctccagcccgctgctgccctgctgcccccctctgccaggcgctagacatgtacagaggtttttctgtggttgtaaatggtcctatttcacccccttcttcctgtcacatgacccccccccatgttttattaaagggggtgctggtggtgagccgtgtgtgcgtgtccctgctctgctgcccgcctggctgctctgtctgctgcc

SEQ ID NO: 46524 - DNA, 1591 bp, Homo sapiens
gttgacggctgcgactccattttgtaggccgcttatttgtgtgcatccacggcgattcttcccgcagagttgtgaagcgcaaaggccttacaattaaaaggaagaaaaaaaaaataaagataattcgggagtacaattgacaaagcgtgtgggtcgctcagcctccagcagtaactgctgatctccagttcttggagggttccggtgagaagaacgcccctactgcggtactgaggaagcggcaggaggagatgcggcccctggacatagacgaggtggaagcgcctgaggaagtggaggtgctggagcccgaaggaggatttcgagcagttcctgctcccggtcatcaacgagatgcgcgaggacatcgcgtctcttatacgcgagcacgggcggggcgtacctgcggaccaggagcaagctgtgggagatggacaatatgcttatccagatcaaaacgcaggtggaggccccggaggagagcgccctcaatcacgtgcagcacccgagtggcgaagccgacgagagagtgtcggagttgtgcgagaaggctgaggagaaagccaaggagattgcgaagatggcagagatgctggtcgagctcgtctggcgaatagagagaagcgagtcttcttgaaggaggagatcggtggttcacagctgaggactgtagtcaactggtaaggatgaactgacaccttgaggaaactgaaacagcttgtcattttctctgttttgtttttgtatgttttttacccccatgtaacagtctcccttatggtcagtgattgatgacctcgatatggatttagattatcaaatgtgtttggttttggaaatataacttttgtcaaagaaatactctcagaagagaaatggggcttaattaagttgtttttgtggtcacgtttattcttgttacttcgctgtgtttttgaaatgttgggcatggcctcgtattttgctgttacctttgtgacctgattgttttttggaacacgtcaagacgtgggatcagaatcttccaactttagaggtgcaatggaagacactacgctacttggttgagcctggtgaagaatgtattaatgagactgctttgcataaaactgggaagaaagagaagacagttggagatggaagatggttttgtatatattttggaactttagttcctctgtgagacgaaagaggagagctatgttttgtgtcacattgtctgatatatattgtgtaacctgtcaggtgagttgatttagacaacatagctgaccttttatgacaaggcagtttgaatagggactattgtaataccctcacacattataggggcatcagagaatggcatggaagagacagtctacagagagctttaagaggccggagaaaggaaaagacattatcagggcctggaaagtctcttccagttcatcagggtagtagacctgtcagattggaggtcaaagtcaaaagtataataagtgttaatttgccttgaaaaacaaagacctaaaaagccttttttaagaaataaattttttgttcacatgaccaaagcccctcctgtgtgtgttaataaaagaatcataaa

SEQ ID NO: 46525 - DNA, 1694 bp, Homo sapiens
tttttattaacaatgtggcctgatcacaattctttaaagtctagactagttttccgtatgttttccacattttattctgacatcatatcttttaaaaacaaaaggatgcgaacatttgcacttctcaatgtttttttttttcccatagatgtagtttcacttatttccttcaggctttttatcagcaagaagcaatgtctgattttgataccacccatttgctatgaaaatataagaaggcgtcatcttcaaagcaacactccagttgggcttcttcatcgtttagctgcatgatttcttctacgacatttgtaacagacacaacgtatatagaatttcagtttgggtattttttatccttttttttcttttttaaaataagtatgttttctgcttatttgtgttttcttttctttgaatatattgcacaatattttattattaaaaaaaggttttatgtctcaggcaaaaagtttttctccttcaatcgggaggtgttaatgtgtattattttctaaaagaggtaagtggttgtctgtgtggccatcctcaaaaggaacagaattgacaggtttataggatccaagtctgaaacgacagcaaattatttcaactataaattttccaattccatgtaacatgcctgttgttgaaaagattcctccaacaataccacagagtcttacaaaaaactgccagaatggcatgtgctcctcagtaactgtcaccataagagaactgagatcatatttcataaatatcccagagactccatggctgcctgcagcatggttaatgatacgttccctttctgtcacagaaaactgatgggtgtctgctgatattttatatgtatgtagttttgttggcacaactgtaataaaatattggaacatctggttgtgatctatagcaattttttcagttccatctaaaggattaataattgctggaacaagctctccaaaagacaaatgatctattctatgagaaaaattgtaagattcatggttgacaagtgctgcccaaatgtgcatgaccacgaggatgtggaattgcccttgccccactgttatgtgaaaattccctgctactttattgacatatagatggccatgaattctgcatgcatttggagactgtgatgaatcatcttctcttggtggaagagctgttgatgtacttttaaaagcacttttaaatatcacatcttgaagtgaatgctcttcttgtagcctactctgaatcagctgcagcatcctctgccactctttctgctgtggtgaaagatcaaatactgttggttcataaactaaaccatctgcagatgcaaccattgtttctgctaaatccaatacatccgctccaacatattgacacttcatggcaacagtaatatctatattaattcttaatttgctagaaaaatccttgtctacttcgtattcatacttcatccatgtatcttgatatactgagaattccattatggttaataaagccatagttgtaaatgctattagagaaactgtacctccactggctgaagtctctacatagctctcaggaaccttcggaaaggcatccaactcttttaccaaacttaaagtttttttccgattcagtcgcctcatcttcaggaaaaccttcctcttccttcatatagtcatgcttgtgttatggtcccagcctac

SEQ ID NO: 46526 - DNA, 1768 bp, Homo sapiens
  misc_feature (1)...(1768): n = a,t,c or g
attcggcacaaggacggggggtttacctggcttttatgaccaggcatagtatctattatatttgctttgtaataggcatgatgtggaaataccatcttggtttgagatgcatttgaggattttaatttatggaaagcacaacatatgcaattatatttattgaattcctagatgcagtatggatatttaaattgttaaaactttatgaaaacttggaaaaggttgttcaggtttataaatagctttagtgatgcctcccctctttaaatacctgtcacaccgtatgaatatggtgagatcagactccctaagactcttttcaggttcatttttataatgtttactttttaggacagaacagtagctaaattaaagtaatatccagttcttactgattgagacagagtggaaagaaagacatcattgtacatcactgtcattccaaaggtacagtgtaactctggatggaggaataacttacctatcactacaacacttacaaatgagaatttctcagaatttcattctaggcaagttccactcaacaccagatcaagcaattctatctatttacactattagcctagttttctcatacagtcatcacaagcataggaagatacttcaaaaccaaaaaaaccaaggtgcatcattaatattcatttaattcaaataccaaatagtttacatagggccagcttagaaatagatactaaatccagagctactgcaatcaaagcttatatgagtgaatatggtagagttgcctgctaaaaggcaatgtaatataattgcagctagaaccctacagtggggaatgaggaattttaaacacacatttgattacagccaccaaaaaaatagacgtaaaaataaaggcatttggctggtccaagatgtaattatcaatcagtcagcacctgtgattcttttacttatttttttgtggttttttttttttaaacaaattttagcccaattttcttgagtcattctctctctgcagcagcagaggaagggcctgtacctccctaccaatgacttggtgtccttattttctaccccaagagcagggatattagctgtgtccaaatgggttctgaattctacagactcatcaacatgaggcaaggaatcattgaaaaccacctgtgtctcctttgggagaatgacatatctttagtatttacgtagcttattcttctatatctacatatgcaaagctttccttaacagtaaagggtacatatgcatagtgggaggagatcagacctttacaagtgaaggaaagcaacttcagaaatgaattattttctttgctttattatttttaccaagacagagaagtattgtattgagagataatctattttcataatcaatatgtgcctaaattatatttaaatcatttcactctgtactatattttcaggaattacagaatgtggtattcattcacttaaaggtacctctgtagaaataacctaaaactgcagaaggatctgaaagatctaaacatggtgtgcttagaaactgcagattttagatctaatgtatactgcattaataaatgatataaagtgtttgttgaaaaggagtttcttctcttccttttgaaaatcatcactttctgtattttgcttacatttcttcaatatgtgttgacaaccagccctgtggttctgggtagcaaaggaaatacagtataacttaatttgttatggattagtctttttgaaagtnccattaaagtaaattaaantcttta

SEQ ID NO: 46527 - DNA, 811 bp, Homo sapiens
agacagtgatttccatctgtgcttcagtacccactttgtgttcttttcttgaaaagtcatactaaaggttaatttcaagtaaaatgaatttccttccaagtagcctattagtaaaacacaacttagtgtttcatccattggggtgagcatatactgccctttgcagccctgcctgtgttctgattggctccattcatgagcaaaggtgattgtgagctgtatattacacaggtgtcgcccaggtttcgtaacctccactttaatgcagtaagccgcaagaatgacttctgcaagtgaaatgaggaagcttcactagcttgctccattggaaggtaaactgaaattttatacgttgaagcttaaaatctaaatttatgtatgtttggaaatggaatggacattaacataaaatgtattttatcaaaaaagtgtttagactttgaccaaatacatgttggtattatcatgttaatgttctctgtttataaaaattgagtggagatagatagactcggccattctgtgctctgatgaaaaatttgggctatgttttacaccttaggaaaaaatattagcgtcagcacacaactcactacaaatcagacaaatcctagtggtcagatatcttatgaatgtggacaatgtggcagatatttcattcaaatggcagacttccaccgacatgagaaatgtcacactggtgaaaagtcttttgaatgcaaagaatgtggaaaatacttcagatataactcattacttattcggcatcagataattcacactggaaagaaaccatttaaatgtaaagaat

SEQ ID NO: 46528 - DNA, 2619 bp, Homo sapiens
gcaggctgctcgcctcctgcctgtagtgtgtgggctggggttggtgcgagcttccagcttggccgcagttggttcgtagttcggctctggggtcttttgtgtccgggtctggcttggctttgtgtccgcgagtttttgttccgctccgcagcgctcttcccgggcaggagccgtgaggctcggaggcggcagcgcggtccccggccaggagcaagcgcgccggcgtgagcggcggcggcaaaggctgtggggagggggcttcgcagatccccgagatgccggagttcctggaagacccctcggtcctgacaaaagacaagttgaagagtgagttggtcgccaacaatgtgacgctgccggccggggagcagcgcaaagacgtgtacgtccagctctacctgcagcacctcacggctcgcaaccaggccgccgctccccgccggcaccaacagcaaggggcccccggacttctccagtgacgaagagcgcgagcccaccccggtcctcggctctggggccgccgccgcgggccggagccgagcagccgtcggcaggaaagccacaaaaaaaactgataaacccagacaagaagataaagatgatctagatgtaacagagctcactaatgaagatcttttggatcagcttgtgaaatacggagtgaatcctggtcctattgtgggaacaaccaggaagctatatgagaaaaagcttttgaaactgagggaacaaggaacagaatcaagatcttctactcctctgccaacaatttcttcttcagcagaaaatacaaggcagaatggaagtaatgattctgacagatacagtgacaatgaagaagactctaaaatagagctcaagcttgagaagagagaaccactaaagggcagagcaaagactccagtaacactcaagcaaagaagagttgagcacaatcagagctattctcaagctggaataactgagactgaatggacaagtggatcttcaaaaggcggacctctgcaggcattaactagggaatctacaagagggtcaagaagaactccaaggaaaagggtggaaacttcagaacattttcgtatagatggtccagtaatttcagagagtactcccatagctgaaactataatggcttcaagcaacgaatccttagttgtcaatagggtgactggaaatttcaagcatgcatctcctattctgccaatcactgaattctcagacatacccagaagagcaccaaagaaaccattgacaagagctgaagtgggagaaaaaacagaggaaagaagagtagaaagggatattcttaaggaaatgttcccctatgaagcatctacaccaacaggaattagtgctagttgccgcagaccaatcaaaggggctgcaggccggcccattagaactcagtgatttcaggatggaggagtcttttttcatctaaatatgttcctaagtatgttcccttggcagatgtcaagtcagaaaagacaaaaaagggacgctccattcccgtatggataaaaattttgctgtttgttgttgtggcagtttttttgtttttggtctatcaagctatggaaaccaaccaagtaaatcccttctctaattttcttcatgttgaccctagaaaatccaactgaatggtatctctttggcacgttcaacttggtctcctattttcaataactgttgaaaaacatttgtgtacacttgttgactccaagaactaaaaataatgtgatttcgcctcaataaatgtagtatttcattgaaaagcaaacaaaatatatataaatggacttcattaaaatgtttttgaactttggactagtaggagatcactttgtgccatatgaataatcttttttagctctggaactttttgtaggctttatttttttaatgtgggcatcttatttcatttttgaaaaaatgtatatgttttttgtgtatttgggaaacgaagggtgaaacatggtagtataatgtgaagctacacatttaaatacttagaattcttacagaaaagattttaagaattattctctgctgaataaaaactgcaaatatgtgaaacataatgaaattcagtaagaggaaaagtaacttggttgtactttttgtaactgcaacaaagtttgatggtgtttatgaggaaaagtacagcaataatctcttctgtaacctttattaatagtaatgttgttgtagccctatcatactcactttttaagacacagtatcatgaaagtcctatttcagtaagacccatttacatacagtagatttttagcagagatcttttagtgtaacatacatattttagagaattgttggctagctgtacatgttttgaaaagctgtttagctagctataaggctataattggaaatttgtattttttatttacagcaaaacatttattcagtcatccagtttgctaccaaaatatgttttagataagtgtgtgtatgtttgtttagaagttagaaattgtaaacactggtcttatgtttcatttggattcattattgcattgtcttgttaccagaaacaaattttgccgagctttttttgccctatatttcccagcataatttgattagaaagtacaa

SEQ ID NO: 46529 - DNA, 1181 bp, Homo sapiens
gctatgacatgattacgaatttaatacgactcactatagggaatttggccctcgaggccaagaattcggcacgaggtgaggggttcgggggttctgggcaggcacaatggcgtctcgagcaggcccgcgagcggccggcaccgacggcagcgactttcagcaccgggagcgcgtcgccatgcactaccagatgagtgtgactctcaagtatgaaatcaagaagctgatctacgtacatctggtcatatgggctgctgctggttgctaagatgagcgtgggacacctgaggctcttgtcacatgatcaggtggccatgccctatgcagtgggaatacccgtattttgctgagcatttttgccctctctcttgggccttctctccttttccccgcaacaacattaggcttacctgggtgctctccatgaatcaagcatgggactcctttttccatcggctccaactcaattcatgggcaagcatgggaatgttccctgctgcacagcagctctaccgccatggcaaggcctaccgtttcctctttggtttttctgccgtttccatcatgtacctggtgttggtgttggcagtgcaagtgcatgcctgggcagtttgtactacagcaagaagctcctagactcttggttcaccagcacacaggagaagaagcataaatgaagcctctttggggtgaagcctggacatcccatcgaatgaaaggacactagtacagcggttccaaaatcccttctggtgattttagcagctgtgatgttggtacctggtgcagaccaggccaaagttctggaaagctccttttgccatctgctgaggtggcaaaactataatttattcctggttggctagaactgggtgaccaacagctatgaaacaaatttcagctgtttgaagttgaactttgaggtttttctttaagaatgagcttcgtccttgcctctactcggtcattctccccatttccatccattaccccttagccattgagactaaaggaaatagggaataaatcaaattacttcatctctaggtcacgggtcaggaaacatttgggcagctgctcccttggcaggctgtggtctcctctgcaaagcattttaattaaaaacctcaataaagatggccctgcccacactgtgccttgtgtttggggcttgaaaaaaa

SEQ ID NO: 46530 - DNA, 861 bp, Homo sapiens
  misc_feature (1)...(861): n = a,t,c or g
gaagaagcggaggccgaagagttgagtccgttgctaagcaacgaacttcacagacagcgatccccaggtgtttcatttggtttatcagtgtttaatttgatgaatgccatcatgggaagtggcatccttggcttagcttatgttatggctaataccggtgtctttggatttagcttcttgctgctgacagttgctctcctggcttcttactcagtccatcttctgcttagtatgtgtattcagacagctgtaacatcttatgaagatcttggactctttgcatttggattacctggaaagttggtggtggcaggcaccataataattcagaatattggagctatgtcatcttatcttttaattattaaaacagagcttcctgctgctattgcagaatttttgactggagactatagtagatattggtatcttgatggacaaacactactaataatcatatgtgttggcattgtgttccctcttgcacttcttcccaaaataggctttcttggctacacaagtagtttatcatttttctttatgatgttctttgctcttgtggtaataattaaaaaatggtccatcccttgtcctctgacattaaattatgtagagaaaggcttccagatttcaaatgttacagatgattgtaagccaaagctctttcatttctccaaagagagtgcttatgccttaccaaccatggctttttcatttctctgccatacctcaatattgcccatatactgtgaacttcaaagtccttcaaaagaaaagaatgcagaatgttaccaatacngcaaattgcctttaagtttctcatttatttttatatctgcactctttgggtacctcactttt

SEQ ID NO: 46531 - DNA, 406 bp, Homo sapiens
tttttttttttttttttttgccttctgaattctttactcttggctcaagttttgttaatattagtcaccagttaataagaaaaatagtttctaattgtcttttcctgcactctgtgtgttggttttgagttaactggataccaccgtcagggccgcgtgtgttcagtcacagccattaattattcctttttcttaaactcttggtttccgtagctggagcctttttctatctcagttactcctatcagtctgcgaactccaaaggaagctgctcccacaaaccccaagaaagtcaggatcaggagaggtgatccgctggcaaagacgcccaagacaaaactgaagaggggagacaggagaatggtggcccaggacaggaagttcaggagggtccacggcctccggg

SEQ ID NO: 46532 - DNA, 1960 bp, Homo sapiens
  misc_feature (1)...(1960): n = a,t,c or g
tttttaaaacaaagttcactttattacattaattttacacactaaaataatatgaaatgcagacttgtttaaattctcttgctgattctcttgaagacaatgtcacccaatgtcatggtctgaaagccagaaaagaaattatgaagtgttcatctgatgttgtattgtaaaaaacaaaattaagcataaaaaacaaaattaagcttaaaaaacagcaccaaatatgttgggcatatgaaacaattcaaaaattcgtctggtttcctgtaggaccggaggaaagggttgggcaatgttttccaaaatcctatgccaggtctttggtcacttctcctcctcacctggaaagtcctcctgcctttgactgaattcttttctacatcaatgactgttatagcaagaccatccaaaccagcccaatctaatttctcaaaatttcattgagtacctactatgcaccaaatacatgttgagcaccaaggatacatgtacatggacacaactaggcacacagcctggaaggcagtgggtagtgcataattgtcctcctatagctgtgaagcatataaaaacagtggatgcatcagcttttgagtttttaaggatgtttcctccacccctgccagttctcttgaataagactgctggaatgacataccatgtcatcagggtgaaaaggagcccctcagtttcagcagcaatgcaatagttgctgcttgatgggtttgagccctggatttaacatttattagctgatgacttggacaggtcaacctgtctattgaatccctcatccagcctccctcgaaggagacaggaggattaggtgagatggaacctatcaaagggcgttggccaggacttactgcaggacagctcatctcctgctcccctgctctcctgggaatgtgctggggcggaggtggaaactgcacattgggtggttgatgctcacactctctctagtttaagaatttttccatttgaatagagtgatgacagcgccctgaggcagtgttctgttgtctgtgactccctaaagcatattctgggggcnaagaagagtcagggggacatacctgcnggagaaacactgcaccattcacccccaaatagggtataggatgtggctggcagccaggcaccaaggctgactgcataactggactgtgccaggcttgtaagctgccataatatgaccatgaatgggattctntttataaacgctaaatgggcaaaggcatttatgaagcaccctgggcatgcagggcaggtggaggcctctgtggctggttggttgcgctgagcagaaaggattagtgataatgtgtgtaaactgcctgggacatgatggatcctcagtaagtgctggcagatactgaccacaggaaagaagtttgggggttggagggtggaggggtggcattagggtatgtgagccgctccccatgcttcacctcccctctcccctcaagcactgggagccacacgctcagagcaccaccaacttacattggtgattatgtcgccgttgagttcggtcacagacttgatgtttttgaaagctgtcaccagtttattgtcaccttccaactgaaccactgtcttgactttctcccctgtcattgtctccagctcacattcctcccccaccgtgaattcgttttgggatcactttggacccagcggtgatggtgaacttgaagtgcttcccattctgcacgatttccgacacccccttgatatccttccccttctggatgagctcttccggcagaccgattgccttcatgaaggcttcaaagttttcctggctctgcagttggtacttgccggagaaactcatggtggcaatagagctccctcttcacgactgacctgcggctctgccgaccagactgtccactgtaggctgttttatagggggctcccttcccttcgaatagcggccagaggtcag

SEQ ID NO: 46533 - DNA, 720 bp, Homo sapiens
tttgaatcccaacatttgatgactgattacgaatttaatacgactcactatagggaatttggccctcgaggccaagaattcggcacgagctggactcggggatcttccgccgcatcctccacgtgctctacacagactgcatccggcagtgcagcgggccgctctacgtggaccgcatggtgctgctggtcatgggcaacgtcatcaactggtcgctggctgcctatgggcttatcatgcgccccaatgatttcgcttcctacttgttggccattggcatctgcaacctgctcctttacttcgccttctacatcatcatgaagctccggagtggggagaggatcaagctcatccccctgctctgcatcgtttgcacctccgtggtctggggcttcgcgctcttcttcttcttccagggactcagcacctggcagaaaacccctgcagagtcgagggagcacaaccgggactgcatcctcctcgacttctttgacgaccacgacatctggcacttcctctcctccatcgccatgttcgggtccttcctggtaagcgggcctcccggcgaagcggttgggggttacgtgaaggtaagcagctgcctccttctctgtgagctgatctggcgtccacaccccaggtgttagctgacactggatgacgacctggatacttagaaaggggcttcaggaagggatgtgctgtttccctctacgtgcc

SEQ ID NO: 46534 - DNA, 558 bp, Homo sapiens
gtctgattacatcattcacattatcaccaagtatatcctctaaagtgtctaattatcacttttataaagcacattcacaaagttttgcattcatcaccactacccagttcctgtttgtctgatttttattatttaaaaaaatggaaaaacaaaagtgcatttttcattcaataagtgttccatccttatttagttttgttgccgaaagtgaagtccatgactttagaatgatagcaatttatcaaccaaagaatccgtcttcacaccgtttcaataactgcagcaatttccttgaactgtctgtagaaattctgaaactgtggaatcgtcatttcaaagcacttggtctttacttggcctgaatgatctgccacttttagcatcactgcaacgtaaggatacttaagagatctgcaagtgtctgagctcacagccatacccagtttccactgaaaatctacaagctggttggtgacatcggacttagcatccagcggcggctcgctggacgcctccatgggcagcgtctggggacttggcgggcccctcgtgccggaa

SEQ ID NO: 46535 - DNA, 2145 bp, Homo sapiens
  misc_feature (1)...(2145): n = a,t,c or g
taggcatttaaccaccaaatacaaagggtgcaattaatttcatggcttgtaaagttttgactatgtaagtatagcaaaacaaaacatcgttccagttaattttcaccttacatagtaaaaccacagtagattgattgcctagtgactcagaattattccattttgtgtgtgttgatataaacagactttggtgaaactgggaagtcatcctctatcacagggaaaataacatttctaaaaaaaaattttttttgaaaattaatttgatttaatctttgaagcttctatagaaggacaaattaccaagaggggaatgtttcctggaggtatttatgggtagatagtacagcataatggttgggagggctaagggtaagattagagccatactactggtctcaaatactactaactgtttgaaatttggcagtaagttaatctccccttgcctcagttttcttatctttaagatgaagctcataatgacttaacactatggctgctgtgagggtaaactaaaacataaaagaacttagaacacaggagtactgcatactgtttgctactattctttcaaggatatttttagtctagacaggagactagcttcagggatgtcgaaaggccttctcagtctgttcatgtacccagaacattctttttttttttttgctacctcaaattcggtgggcaacgatagttaacactttcctagtttttagtttatttgactgcattcatacatatctgatcttcacgacaacactgtgacaaagggagaggcaagaatgataatcttcattttacagactgaggaactgccgacagacctgccatctgtccaggccaacataactaacaagtagtggagtccaagacctcagcaaaagttttgttcttttacttttgttagagtggagaagaaaaaaaaaaaggtttacaatgattactgagaaatgaagaaataagccactgtttcttacaagtagatggtcccacatcttaaactttggggaagatatttaaaaatattttttaaatagctggctgctggagctgaaatgtaaaaagaagtacttctttcattctttaatttgctgtgctgataatacagccccagccttataaactgtttcatgctccactcctacacatcccctcaaactgcttaaaataattgactttaaaacactccagatatctgcaaagcccaataggctaggggaaggagaaaaaaggatactgtttgctatacagtaactgtagcattaactgaccctgcactggccctggctaaaaagcagaaattactgactgaacccctaggtaaagataaattgtgtaaagccgagatctgcacctgctgaatgctggaatccagtactggcatcaagatggtgtcagtcagaacatgcatatttagcagcagagtggagctatgcaaagacatacaactcagcacttagaccagcagtactcttccttttgtaacatcatttgtccctaattatcttagaagctgttgcaacacacagaaggtgacaatccttatgctgtatagaacatattcagagtagcagagcaactccaaaaaggttaggaatcactattttggagtcttgattgacctaaaaaagaaaggtaaaacagcccagtgcgctttttctaggcatctaagaaaaacccttcaatgcctctatggtttgttaaaccaatgttaaaagtccttatagtaacatcacataatggtaacctcacagttatctcttaaatacaagcctgtcgagtaatcaatcttgtaagtcttgtataatttagccaagctatatagtaactggatgctagcttgacttgtttttccttaaaaaaacacacaaacnnnnnnnnnnnnnnnnnnnnnnnnnnnnnnnnnaagagaaatgggaagacaaattaagtgagcctattgtattaaagtgaaggattaagaaaaaatacaaaaccagttattgcttaggctaaaaaagtttataaaaagcttcaccttgattccattatgacttcttattattcagtttcccgcctgtacctactcattatgaactacagtactggtgtcacttattcgttatcatatttcttcatatctttgcagcactgcagatg

SEQ ID NO: 46536 - DNA, 500 bp, Homo sapiens; identical to SEQ ID NO: 17308

SEQ ID NO: 46537 - DNA, 1312 bp, Homo sapiens
  misc_feature (1)...(1312): n = a,t,c or g
tttttttttggtcagagggagatgtatttttcacagatcacgcaacacacaggaagacacagcgagggtttttagattccgagaccagggtgaaaaatctgctctgatccaacaaagcacccccactgtgcttggcagccgatcagccactgtgggacgatgacccaagagtcccggacctcaccctgatgcccccatctggagactctcgggacacagcaggtgtggcgtctgggatgtactttattggacaagtggtggcccaagtcttggtctggaagcactggggccctggacccaggcactgagtttgaggaggcccagagttcagggctgtttggagcgaggccacaagcggctggtgagggagccaaggaagaggttctgcttgttggacttggagagctcggccaggcgctgctgctcctcctgctctagccggctttgccgctgtttgaaagccgccagcgggtcatcctccagggcatagtgctccagcacggttcgcacgtcctccacaccattcagtgcaatggtcttgaggaaggcagacagatccaacaagacccggtcatcagagttgccgtcccagggccgcagggcaacgccgttatagggctgcaggcggaaggcttccttcttgcagtccacaactactactcgagctgggtcccgattcagacatgaaatatcctttacatggtgtccatccatgtatcttgtggcgtcccggaataggcggtaggagatgaagccatgggggtccacactatcaatgagtggaaacgcagtcatgccagtctctgacgtaaagatgacaatttcatataaaggggcaagctgctggaacaaggtctcgatgcctgggcgcttcttaaacctccagccagtggccagcgaccactcaggatgcaagaggacgccggtgagctccaaaacgagcgtgtagggtggctggtagtacggttcctgcagagggtctgggagaaggcaagggctggtgggctcgatgatcatctgtcctaaaaatctttgaaatatttgtatgtccggcgcaactgctgtaccagaattggatcattgtcgaactcatcaggaatcttggcaccattttcgtccaccgggttgtttccaaagatatagacgacgctcacagtcccaccagctccaagcagcccagcaagccagagcgcaacttttttggcatagctgggaccctctgagcccggctgctgctgtggcccttgcgccttagtntcccgcggctcccgatctctgcggcctgatctggggccggcggggcgcgtcgcca

SEQ ID NO: 46538 - DNA, 1938 bp, Homo sapiens
tttttttttttttttttttgaatcagcaatgcagttttatttaaggcagaattagggaaaggctatgcccctccactccccctcctcctaccactcagtcctatcccaagtcaggcactggaacctgctgaaaaggctgatgaggggctgacaggagtggggcagggttcatggacctttacctcagagcagcttaccctgagctatacccacatctcaaggatttgggggcgtctagatctcatctaagggagacacaacttttctggtcctcagatggaaagctgggggaaggtaccagtatttacccttccataaaaactttggaggtctttaggaggatacccctcaggagggctaggagaggaatgacaaatacagaggatagaaggtcccgtggcctggttgtgccctcacacagggtatgggttgtccaggactgccactcccgctgccacaccaccatctgcatgctcgatggctttggttcgaagtagatgccccacgtgcttgttcatcacgagtgtcttttcctgcctgacatagaccccaaagatgcccagctctgaaatgcactggaccactcgggcagggctgccaggccgtagcaggcaattctcaaaaggctcaggttcgatcttctccatgaggatgtaggaggccctctcctcactgtccttcagctgtttgcagggcctgtaccatttcctccccatataggttgttacctccaccctctctctggggctttagcacaaaccggctaggggcagcaagggcctcggcgatggcctggtccccttcttcacccacatccagtgagtagaggccagcaaaggtggcgcggaggcgggccacagcctcaggctggccagggagcaacatctccagcatgcccggcctgcttagctcctgctgcaccttcttagtcccagccagctgggtggcaatgtctgggcacttggcagcatgtgacctctccagcagtagacgtgcttcccaattctgtagactgtactgacgaggcatgtagccatcccggaagtaaaccacagcaatttcctggccatccacaaacagccttcggtcttggtccagagaccccttttcagagatatcttcaaatgttcgtcggatcacatggatgttcctggccagtagctcattctctatggcacgctggtcaaatatgtttctttccttctcttgagcaattcagtagcaccagagcattgggtgagccgtagagctcccagggctttggcaattcccagggccagtcccttgctgggattattagagaggatcttgccagcttctttggtcttactcaggacactgagaacatgtcggtgcacagctggggtccgggaggccaggcccccaaagctggcagagatggtgttgatttcgatctgtttcagggctggggagccatctgcgctgcgctggaacatgtagtctgagcgattcaggcccaggaacacagtctgtgggaaaactgaaggctgacagtacctgcaatgcccctcttttaggacttgcttgtggatgtcaaagagacgagcggtaaagtcatcctgtttgatggtgctggaaagagtttgctcccaggaaggcagcgttctggctgacagcatccactagcaggttgaagtccatctgcacagcataggcttgctccagcagggcactggggaccagtgaggggaagagcgtgaatggggcataggctcaccacctccgaggaagtgggctcctgtgaggtcctcagcaatactccctcagccagggcccggtccacggcctgccgtgccagctcctctagctgctgtttatcctgcaagaggctcccccagttggtggccatcccaacactagttcgcctttcctccgcgaacggttctcccggccctcgcgccgctacccaggctcagg

SEQ ID NO: 46539 - DNA, 1957 bp, Homo sapiens
aacgggtatgtcctggtgaattagtctcagcacaggaattgaggtgggtcaggtgaaggaagagtgtatgttcctatttttattccagccttttaaatttaaagcttattttcttgccctctccctaacggggagaaatcgagccacccaactggaatcagagggtctggctggggtggatgttgcttcctcctggttctgccccaccacaaagttttctgtggcaagtgctggaacatagttgtaggctgaggctcctgcccttcggtcgagtggagcaagctctcgagggcagcactgacaaatgtgttcctaagaagacattcagacccaggtcttatgcaggattacatccgtttattatcaagggcaaccttggtgaaagcagaaagggtgtgtgctattgcatatatatgggggaaaaaggcaatatatttttccactgaagctgagcaaccacatattgctacaaggcaaatcaagaagacatcaggaaatcagatgcacaggaaataaaggaaagctgtgctttgtcattgaatcctaagttcttagctgctgatgcaagttgtcccccaaggccatcacaaagcagtggggcatgagctgtgtttcaggggccactaaataacagctggtactgaccccagaaaccgccttcatctccattcggaagcaggtgacacaccccttcagaaggtgccctgggttgccgagtgtcagaatatactcaggactccagaggtgtcacacgtggaactgacaggagacccgccaccgtggaggcagggggcaagaaactcaagaacgcatcaagagcaccagccctgggccagggaagacaggctcttcctgcagtttctcgtggacactgctggcttgcgggcagtcggtcttcaggggtacctgttgtctcttttcccatgtaataactacttttgaccttacactatatgttgctagtagtttattgagctttgtatatttggacagtttcatatagggcttagagattttaaggacatgataaatgaacttttctgtcccatgtgaagtggtagtgcggtgcctttcccccagatcatgctttaattctttcttttctgtagaaaccaacagtttccatttatgtcaatgctaaatccaaagtcacttcagagtttgttttccaccatgtgggaatcagcattcttaatttcgttaaagttttgacttgtaatgaaatgttcaagtattacagcaatattcaaagaaagaaccacagatgtgttaaccatttaagcagatcatctgccaaacattatattactaataaaacttaaccaacacttacaattcagtcatcaaagtaagtaaaaattagatgctacagctagctaactgtatccctagaaatgatgaataatttgccatttggacagttaacatccaggtgttacaaagtcagtgttaattctaaagatgatcatttctgccctttagaatggcttgtcccatcagcagatgaatgtgttaagcacaaagcatcttccttaaagcacaaagagagggactaactgatgctgcatctagaaaacacctttaagttgcctttcctctttgtagttagcgttcaggcaggtgacgtgtggaaagtctagggggttccattctggccatgcgagcccagctcctaccaacgtcggtaacttgagcagtccctgttgctggccagagactgcctggtcgccagcgctcaccatgggtgccaggatgcttcgcagaggcactgtgctcacggttggacttggtgtcagtgggaaagggcagtgtggggactgtcatttttgtgatttaataacacacagtgaaaatccaggaagaatgaattaagcttcttctgggagttgtttattcctgctcgtgcttaagattgatgatttcgtgaaataaagaacatcatttcatttaagagatc

SEQ ID NO: 46540 - DNA, 1359 bp, Homo sapiens
ggcggcggcggcctcgaggtgacaactgtctccgtcgcaggctccggcgggggcgcaggaggtcgcccggcgcgtcactgtcgggtcggcgagccacgggggccgccgcagcaccatggcgaccaccgtcagcactcagcgcgggccggtgtacatcggtgagctcccgcaggacttcctccgcatcacgcccacacagcagcagcggcaggtccagctggacgcccaggcggcccagcagctgcagtacggaggcgcagtgggcaccgtgggccgactgaacatcacggtggtacaggcaaagttggccaagaattacgggcatgaccccgcatgggacccctactgccgactgcgcctggggctacgcgggtgtacgagacgcccacggcacacaattggcgccaagaatccccgctggaataaggtcatccactgcacggttgcccccaggcgtggactctttctatctcgagatcttcgatgaaaagagccttctccatggacgaccgcattgcctggacccacatcaccatcccagagtccctgaggcagggcaaggtggaggacaagtggtacagcctgagcgggaggcagggggacgacaaggagggcatgatcaacctcgtcatgtcctacgcgctgcttccagctgccatggtgatgccaccccagcccgtggtcctgatgccaacagtgtaccagcagggcgttggctatgtgcccatcacagggatgcccgctgtctgtagccccggcatggtgcccgtggccctgcccccggccgccgtgaacgcccagccccgctgtagcgaggaggacctgaaagccatccaggacatgttccccaacatgggaccaggaggtgatccgctccgtgctggaagcccagcgagggaacaaggatgccgccatcaactccctgctgcagatgggggaggagccatagagcctctgcctcgatgccgttttgcccccgctctttggacacgccgacccggcgctccccaaggaatgctgtcccaacaagattcccgtgaaagagcacccgtgtcgccccctcccgtggacttctgtgccgccccgtccacacctgttcttgggtgcatgtgggttttcggttcctggcggtccaggacggggcgggggctcccctcccatctcgtgctgggaggtctcagcgcgctctcctgtccctgggacgtgcgtctctccttctcatgccgttctggaaaatgctcttgctgtagagagcagctgcttctgccagggtgttggaggtggtggagcgccttccgattccattcatggcattttgtgatgtgatgtaattggaatagagctgttgatttaaggcac

SEQ ID NO: 46541 - DNA, 735 bp, Homo sapiens
tttttttttttttttttttcaaggatgaacacacacccaagctgtggctgccgtgcgtgtctatttattgttgctgccaccctggaggagccccagtttcttctgtagctttcttttctgggggatcttcctggctctgcccctccattcccagcctctcactccccatcttgcacttttgctagggttggaggcgctttcctggtagcccctcagagactcagtcagcgggaataagtcctaggggtggggggtgtggcaagccggcctggatcctgtcctgggtcctccttcctccgcagtcccgtctctattgctgggtgtaagtgtccatggtctggcctcatctccaagctctgtctcaagcgccgtgcccctcgcttcttcctctctgaattctgcaagcttggtcaccagtttcctctcgtgcccgccagggctggggcggttggtgttggcagcagcttctctcttggtgcgacctttccggcctccacctccgaggtaggaatgggccaggctatagaggtcagattcatccaggctggagtcctcgtcctccgggcctgggggctgctggggggcgctggttgctggtgggaaggtggccatcgtgcctggcttgtcttccctgcctctcttcttctcctaacgctttgtctgctcgtgccgaattcttggcctcgagggccaaattccctatagtgagtcgtattaaattcgtaatcagtcata

SEQ ID NO: 46542 - DNA, 333 bp, Homo sapiens
gtgaagttatatggaaacaaaggtggggaaattacagacagaaatggaagagttgaaaggaaggaaggataacaagagcccacctccctgcagtctgctcaagggaaatcttgtacaatttgtgtggacaatgaaatttataattttggcttcaagcttgggtgactttctcctctctgattataggaaaaaatattataattaaattaggattacgcactttttcccctcttcagtgtccttacataggacagacatccttcttgtttggtgaccacagggaccagtgacatcctagttttcttggaattgtttgtacttattgctttatta

SEQ ID NO: 46543 - DNA, 1119 bp, Homo sapiens
  misc_feature (1)...(1119): n = a,t,c or g
tttgacatgattacgaatttaatacgactcactatagggaatttggccctcgaggccaagaattcggcacgagcgtcggcggcggacgcttgtcgagaatgcagattcctgggtactgccagatacgaattgagcataccacaaaaaagttctcattttgtgtcctcccatcccattctcctcactaaccaaaggctaggaattatctgtgaatgtaggaccactggatttgcagtcttcatctgacactgtggagagtttctaggaatgaaacagatatatggccttgggtccccttttcttttcttttttttttttaanaaaaacaaccatctcagnatgttgncctagggtnagtcttgaactncctggncctcaagcaatccccacccgactccgcctctccgaagtgatggggatttacaggcgttaaaccaccaaggcttggccaagaaagtggttttaacacccaatctggaaatttgttcagaagagaaacattgagcatgaacaccatctgtgcgagtcatttacttattgcccctcacctctaaatctaccttctgtactcttcttccctgtaatgatggggctagttgtcctcaaactgtttctcagacttctttttaagcttgcttcctgttcagttctgccaataggggtcactagagagagactgggaggcagaaggagagaatatgcttcctgttttttctgttcttgttaatgttgcttacaggaccagcaatgcttcttcacctagagacacttctcccagcagtggcagtgccacttcagcttctttcagcactactggaatcagcctcagtgattccccctgtacccgctcagagattatccacagcagccagatggttctaccttccacaaagattgtggttgcaattctgggcttctaagttctggttacttcatatttttccttttgttcctccagccctagaggtggtagctgctttctgaagttattatttctagatgacttttggtttttcagcctttgtattttgcttttcagccctctaatgcctgtataaccaatttccctgtaataaataaatttcctccattgaaaaaaaaaaaaaaaaaaataaaaaa

SEQ ID NO: 46544 - DNA, 634 bp, Homo sapiens
  misc_feature (1)...(634): n = a,t,c or g
gtcacctgtccaggacgacttgttgattcccaggagggccgcctttccggtctgggtccccgagaggactgcnttgctcacctgtcccctcggcgcggccccggggagctcccgagaggcccccgggatcgctggccctccgaactccacagcaatgagcaagttgggcaagttctttaaagggggcggctcttctaagagccgagccgctcccagtccccaggaggccctggtcccgaccttcgggagacctgaggagatgctgggcaagaaacaagagtacctggaaaatcgaatccagagagaaatcgccctggccaagaagcacggcacgcagaataagcgagctgcattacaggcactaaagagaaagaagaggttcgagaaacagctcactcagattgatggcacactttctaccattgagttccagagagaagccctggagaactcacacaccaacactgaggtgttgaggaacatgggctttgcagcaaaagcgatgaaatctgttcatgaaaacatggatctgaacaaaatagatgatttgatgcaagagatcacagagcaacaggatatcgcccaagaaatctcagaagcattttctcaacgggttggctttggtgatgacttt

SEQ ID NO: 46545 - DNA, 2887 bp, Homo sapiens
  misc_feature (1)...(2887): n = a,t,c or g
ttttttttcatgaagaccagtttattttacatgcttgctttcacattctttactgggaatttaaggccttttttcagccttaacttgtataccaacctcaaggattttgtttgatacagaaaaggatagggctgggcccttctgccaaggactgataacctgcctgccaaaaggaagagggaatgaaagccttttgtccttctaggccccttacagtacctcaaaatctaaaggccttaaaggggaaaaaaaccgtatctgttctttctccttatctcctacccttctctttaagcatattgaagatggacttttttcccaaatgtttatttgtaggaagaggtgatgagtgcaggccagcagctgagaacttacagctttgatgcaccaggaactgtattcaagctgagggcaaaagcctcctagggagggagccaggtccaccaaggccagagacagacaggcgagactgtggaaggccagggagatgctgcctggtaagtgctcagctggcctactgggcaagtcctctggggttctagagctgataggaagaaggagtccattttggatagtcctgcctggagacttggacctagctgatactaaggtattttataaagctacagtggatgtttttcttaagagaactgaaagttggaaaaggcacaagtatatataagaatttagtaaaatgataatggtggtctttcaaatcaaagagtgatctttaaattgttcttgggaaccacagggttcccctggccatgtctggcggctgagaggaggcccaggatggggacttcaaaccccaagcagctgtggttttgcctttgaataaggttccctggtaaaaatcatcttgaataaatgttgctgaagaaactggtaaaagcattcgggggagaaaggattttgctctttgctctgccatgtttttccgggctctttcttcggggagaaagagggctctaaacctttggtcctcattcagataggctaattaggggtctcgggtgttccccaaagggcagcaactttgacccctccccttgtgggtaaaagggcttttcacagtttcccagcagttggtttttggtttccacataaggctaaaggtgttaaagtttggtctgcacctcgttggttttaatccagggaggagctcctggatttctttttctcccccacagagggaaaccttttgtttgcggtgggccagagttaaaacggggcctttaccactcactcagagtgtttggtgtgtgtatgtttgtgtgtgtgttgggtgaagtggcgactggcatctggtatgtcatgaattgagacctataacgatttgccagggtgtcttggctctggcctgagtcgggtatgtgaaagccttttggggcaggaaggggcaaagtgatacctggccgtcccaccctctggtcccagaaggagctctcgctggagccaggcagcctccagtccccctcctttcagccttgtcattctctgcatcctgcccaggccacaaaggagttatctggggctgaacccctctccttccacagcagaggaccaggggtctcctccctctgaccagcctccagtctggggagctgtgttttcctttttcttaagctaactcctgatcccattgagggacatcaagggcagtagtttgaagaaagcctcatccttggccctgcttttccgggaagccgaccttccctctaccctggtggtgccatcattagggcgtgtggccgaaggaggcaaattgttaggtgcaatcaggaagccgtgtctgcatcccatggctgagggacagccaggatgacacttaggctgtctctcactccatcctctttggggagtctgggatgctctcagagagcggggtgaagcccagcaggaggacatgtctctcgtaggccttggtctgcttgaacatggtgtcagtcccatggaggtggtccagcacacccagcaccccatagcactggttgaacttgagatggtggtagtcgtggaattcaggcgaaggcaggaagggaaggtggtagccacagtgggagatggtggtgatgatgagggccaaggaaaaccacatggtgatggaggacaagtgggagcccattactaaatgggcccactatcaccggtagcatgttggagactgcatgctctatagggtgggcatagagagagatcacgccaatgggagctgtccactcatggtgtttcttgtggattttcttgtagaatgttgggtggtgaaggagccggtgtgaatagtagaacaagacttcctcgatcagcgtgaagatggccagctccaggaggaaccagtggaaggtgggtagctcacggcggcaggggtctctccaccatttgaggaagggatagaggaagaccaccatggggaaagatatcatgcactggttgaaaagaactgtgcggatagactggcgcagtttcacaggatccacaggttcattcttgccgacctgaattcggtagcgagagatgaagttaggttttcctgttgtgtcaaccaccaatagaagcccattgaagctccagaagaagagacaaggcacttggatggcacctataaagaagaggatccactccttcccttcaaatgtagtcagcagcctctcccactgggcttgccaaaagtagccagaagcaccccaaaatctctgaagatgccatgtcactgagttccagaaggccacaaatgagagaagtccagagcccaggatgaaagctgtcctcctcatagagccccagatgtgtccctccctcgtgccgaattcttggcctcgagggccaaattccctatagtgagtcgtattaaattcgtaatcagtcatagcggtntcaannnctc

SEQ ID NO: 46546 - DNA, 1871 bp, Homo sapiens
  misc_feature (1)...(1871): n = a,t,c or g
tcctactcctctaccccctcacctacctggctcccagcgtctccaccctctggctccacctgcttctgaaagccaccgagacctcaggcccaacctacatcaaactgggccagtgggccagcacccggcgcgatctgttttcggaggctttctgtgcccaattttccaagctgcatgtccgagtgacgccccacccgtggactcacactgagcgcttccttcggcaggcttttggggatgactgggggagcatcctctcttttgagaaccgggaacctgtggggctcaggctgcgtgggcccaggtgtacaaagcatacgcccaacactgccttcctggagactgacagcgtccagagacttggcagggcctcctgtctgccgcccttctcacatactggggcagtcggtgggctgagagagctctttggataccttggaaatggccggaaacctccagaaaatctcgcagaccagtcgtttctagaaaggctgctcctccctaaagctgacctggttggatcaaatgcaggggtgtctcgggctcaggtccctggccaccaacctgaggccaccaacctcatctccgtggcagtgaaagtgttgcaccctgggcctgctcgctcaggtgcatatggacctgctgctgatgaagattggcagccgagtcctgggagttttgccaggcatcaagtggcttagcttgcctgagattgtggaggaatttgagaagctgatggtccaacagattgacctgcgttacgaagctcagaatctagaacacttccaggtcaacttccggaatgtgaaagccgtcaagttccccacccctctgcgcccctttgtcaccagagaagtcttggtggaaacgtatgaagagagtgtgcctgtgtccagttaccagcaggcaggaattcccgtggacttgaaaaggaagattgcacggcctggggatcaacatgctcctgaagatgatatttgtggataactttgtccatgcagaccttcacccctggaaacatccctggttcagggtgccaacggctggtcctcgagtcaggaggcgcantggcagcaggcggacatctgtgacactctggtggtggccgtgcatcttccctctgcccgctgcgactggtgctgctggatgctggcattgtggcggagctgcaggcccctgacctgaggaatttccgggcagttttcatggctgtggtgatggggcagggccagagagtggctgagctgatcctgcatcatgcccgggccagcgagtgcagggacgtggaggggttcaaaaccgagatggccatgctggtgacccaggccaggaagaacaccatcaccctggagaagcttcatgtgtccagccttctctctagtgtctttaagttgctgatgactcacaaggtaaagcttgagagcaactttgcctccattgtgtttgccatcatggtgttggaggggcttggccgctcactggaccccaaactggacatcctggaggcagcgaggcccttcctcctcacgggcccagtgtgccccccgtgatggggcagtggcctctgtgggcccttgtcaagagctggaggccactcccaagagcctctcctatggcagctgggacgttttaaaattgggacaccaatttcaaatgtaaccctccagtggtggaaggcacaccatggcttcctctgcttggtttgagggtctgttcaaaagctttgggccaattagggagtaaaaggagggaaggggcctatccattccattgtggaagctgggccaggtgccagggacactctccttcagggaaaatgttatgtggaggaggacgaataaatttattttgttttccaaaaaaaaaaaaaa

SEQ ID NO: 46547 - DNA, 481 bp, Homo sapiens
aaaaaaaaaaaaaaaaaatgagggcgttactgtgactttacagcaattaaagtgattataagataatactataaacataggtacactagcaaattgaataaccaaatgaaatggcaaatctctagaaacacaaagcctaccaagactgaatcacaaacaaagaaaaaatatgggtaaaccagctgggcatggtggctcccgcctgtaatcccagcactttcggagtgcactgcattgcactccagcctgggggacaagagcgagacttctcaaaaaaatagaaagtaggggtaaacctataactagtaagaacattaaattactaattaaaatcctttcaacaaagaaatacccctgactggatggttttaccagtcagttctaccagacatttaacgaaaattaatgccaatcctttgcaaactctttcaaaaacttgaagaggaggaaatactttctaactcattctatgaggccagca

SEQ ID NO: 46548 - DNA, 1298 bp, Homo sapiens
tttttttttttttagggtataaaaagacagatgcaaccatacatttaatttttaaaaatggaatgtatcttacataaggattttgtgaaaaatcttatacctatctgagtattacagaagatgcatataccttccagagctcatggaggaaagagtgtataaacaattttgataaggagttgaaaaacaatttgaaaatagtttacaaagagagaatcaggaggcagaaaaagcttcaagaggcatggtcttcagaaattgttctggaatgctgtttcacttgtatcgatgtcatgttcctggttcaatttcttgaactccaccacttggaagaagacgtgctcaaggatatgtttggcatcctgttggtcctttggtagtttactggttactccaagaatatcaccacacttcctgacataaaattccaggtcttcttcagtacacttattggtaatctgagccagccgtgccttctcagaggagaacgtttcatctaaatcaaatagctccagaggaggaggtggtaactcccggaaactgggaggaaaaaccgcaggctgaagggttggcagcggcgtctcaaactgaggctggatgagctggagtggttcatgtttcacatttagctgctcgtgagcctcgatgacgctgtggaaggaggtggtatccagctggaagatggacaggtcgaagagggtggtaaagtcccttgggatctcatcactctcctggagacactcctcgattccgctttgatagggtggctgtgtagggcagcatcatgtagtcagaaatctctgggtcctcagcatcaatctggtttaggtggatgtctcctgtcgtgagcccactggaaaacaacatccatgattttgctgttttcttctttgtccaaatattgatcactgaacatgtgacatgaaccaagcactgccagcttcccaccttggttctttgagtgatagaaagccaaaatgggtctgttaagtgggaagcagacagaacctgtagacagaaccgccactgctggtttcatgacactcaatgtggcaccaaaaggatacacaaaggtgagagcctgggcattgtttccactgctttcctcatcaatgatcgccaggcacagcctttcctgcagctcggctaatttccctgttcaagactccactggaaactagagcttctttaggatggaaatatttgtgatatacatttctaaccacagcatcattattaaccatgattccatattcttctagtaaaaagttaatattggtgtcaaatctggattctcc

SEQ ID NO: 46549 - DNA, 1805 bp, Homo sapiens
gtggcatttcagcttgcacaagtctgtgcaatggacagtctcaaaagacaaaaactgagaagagggctttaaaacgaagacgatctaaagtccaagaccaaggaaaattgataaaaactctaatacagactaagtcgggatcattgccgagcctgcatgacataatcaaaggaaacaaagagatcaccgtgggaacatttggtgttacagcagtctcgggacatatctaaaattaattgaacttttcatacagaagacttttttgttgttgttctttgaagaacagtctgtagtatttgaagggtttgggggagggagaaaatattaatgggaaaggcattcagaaattatggtttctacctttttaaaaagtagatgggattgtgtcaatcttggttaatgagctacagttttacaaagctgatcacttcctataaggacaatggtagacattttataaagatgttttttcacaagattaattactgggacaaaagtaatttggaagcccagttccttaggtgggataggaatgaaagcctaaacctcttcctttagctttgttcctatttcttgcaccttcccatatttatgtgccttttgtctatttataatgccactggaagaggagggataactttttctgttatttgatttcttttataactttgttaggtttttgaagctgcaaacactacaatgctttgagggggtctgtgcctgaagctcaggagtgtggatcagacagtctaaagatcctaaaaacttgccaactggatctttgtttagcaaactcactggaaatgaacacttaatggaatttttaagtctgttctgttaggtagatggtgatgctcttgttattttcacttattcagactggattacttcttacttagttactaactcaatgaggaaaaatacctacaggatctttcttttgcaaacaactgatatatgcagacaaatttttgacaaattcaccgttttaaacacacttaaccatttgtgaaggttttctttagcttacattttaaacatacacaataaacactaatcctccaaactttcactgtttttattagtatgaatataaaatttgaaggtttggccaattagtacaagtctcatgatataatcactgcctgcatacatatgcacagatccagttagtgagtttgtcaagcttaatctaattggttaagtctaaagagattattattccttgatgtttgctttgtattggctacaaatgtgcagaggtaatacatatgtgatgtcgatgtctctgtctttttttttgtctttaaaaaataattggcagcaactgtatttgaataaaatgatttcttagtatgattgtacagtaatgaatgaaagtggaaccatgtttctttttgaaagggagagaattgaccatttattgttgtgatgtttaagttataacttattgagcacttttagtagtgataactgtttttaaacttgcctaatacctttcttgggtattgtttgtaatgtgacttatttaacgccttttttgtttgtttaagttgctgctttaggttaacagcgtgttttagaagatttaaatttctttcctgtctgcacaattagctattcagagcaagagggcctgattttatagaagccccttgaaaagaggtccagatgagagcagagatacagtgagaaattatgtgatctgtgtgttgtgggaagagaattttcaatatgtaactacggagctgtagtgccattagaaactgtgaatttccaaataaatctgaacacttgtctttatt

SEQ ID NO: 46550 - DNA, 1509 bp, Homo sapiens
cgtcgacttttttttttttttttttttaggggaagacaacaggccaaggccactctgtgttacttttcctgaagtcagaatcagttgaggcacacactggggcctgcaggcatcgagtgagccgcgtggaggaacatgttgtgtctgccgtttttgaatacccagggtgggagcttggccatctgcatccccacttcccatagcccaggcagagggacagagaaatggagtggggagcacagagcaggctccaacaagacaaattccctgctgccaaaccaccatgatccactctgactttggtcacaaactctgctaaaaacaattctctacgttcactgttcccaagggtcattctaaacagtggtggccaccacccctttagaagcaagagaaaaagaaaaaaggcaaataaatgcagaaggcagccagagcctcccagatgcccctgctcaggacccttccccgcagcttggcagtggccactcagggcttggccacaggcagggcttggctcagtatcctgtcaggggcaagagccaagctgtctgggagggtcgggggatgcaggaaggatgtgtgggaatcaccaggccattgctgcatttggggtgacaggctgagtctgccaagccggagggagccctgaggcctcatcctcactgggggtcctattcctggaagagtgctgaatgtcaactcccaggcctcctcttccagcaataaggaagccatgtctgagaggggaagggcaagatgtgccctcagcctcactcaatgagctccacgtagttggcagggaacatgccaaaatggccatccggcccatagccacgccaccagccttcgtcgatcacctcgatgcccgtgatgaggttctcggggtcaaaggagatctctgtgtcgtcggctgcctggtagtcgtacagggcacgggcacagagcccttgcccactgagcccctggccctgaatgtggtggtcaatgtgctcagagccagcaccttgctgctgcaccagtgggggctgctcgtagaaggtctcctgctctggaggttcctcatacacagcctcctcttctgcctgcaccagacatggaggagtgctgggcgccggctcctcagcagggagatctgccctgggccttgagatggcagcagctggctctctgccaaagtgggtctctggttgggtgagctgcttctgcaggaaggggctcctcagcttgccaggctgaggactggagatggaggtggtggacatggccctctccttctgcttgaaaatctccctcgggtgcacggcagactcctggagggaagcacatgttgacccctgcagtgggcaaaaccttcaccacctctccccagatcacagcccctccagctgtcggcccagtagcccctcaaaggtgagtgtggggccaggaggcaaaacatgttctcaggagagaagtcatttaaaaataaaaagtaacgttaaaaaacccacgcgtccgcccacgcgtccg

SEQ ID NO: 46551 - DNA, 607 bp, Homo sapiens
cactatagggaatttggccctcgaggccaagaattcggcacgaggattgtgaacctatttaatatgtttatcacatatggcgacacatttctgccaacccccagcagctatgatgaactttactatgagattatccgcatgcaccagagctttgacaacctctactccatggtcctgaggctttctaccaatgcaggccagtggaaggaagcagctagcaaggtgacccatgcattggttaatatcagagccatcatcaaccactttaaccccaaaattgagtcctacgctgctgtgaatcacatatcccaactgtcagaggagcaggtgctggaggtggtgagagccaactatgacacgctcacgctgaagctgcaggatggcctggaccagtatgagcgctactcagagcagcacaaggaagctgccttcttcaaagagctggttcgatccattagcaccaacgtccggagaaacctggccttccacacactcagccaagaagtcctgctcaaggagttctccactatctcctgaggccacgcctacctgagcagcctctgactgcccttacccatgaggatcatgggctggagggggagcgagg

SEQ ID NO: 46552 - DNA, 1180 bp, Homo sapiens
  misc_feature (1)...(1180): n = a,t,c or g
gctgagatgaaggaatacataacaaagttttctttagaacgtcagacttgggatcagctcttgcttcactaccagcaggaggctaaagagatattgtccagaggatcaactgaggccaaaattactgaggtcaaagtggaacctatgacatatcttgggtcttctcagaatgaagttcttaatacaaaacctgactaccagaaaatattacagaaccagagcaaagtctttgactgtatggagttggtgatggatgaactgcaaggatcagtgaaacagctgcaggcctttatggatgaaagtacccagtgcttccagaaggtgtcagtacagctcggaaagagaagcatgcaacaattagatccctcaccagctcgaaaactgttgaagcttcagctacagaacccacctgccatacatggatctggatctggatcttgtcagtgactttatgagagtttctgccacaaggtgcccaagaggagaggaatgggaagagtgccccagcacgtggtgactgcgtgatttctgctcgttgcctttgaagataactggcaggactgactgtagaacactttgacttttttcaaaaagtgatggaatttgtacatccaaatgaatattgtatagacaattttcccaggaatgtgcaaaatgcttgaaagttcaaacttcttttttgaaatgatcttcagatccagtggcccattcttttatctttatcctgtgaaggtgtttttcaggttttgaaacaatccaaaaatcatttaggaccaagtctaaggaaacattttagtggccaagttggattccgattgtaaaggaatgatactaattttctagcatggctctgaaggtgattttaggtagaagagttttgaggctgggcgcaatggctcacgcctgtaatcctagcattttgggtgactgaggcggttggattgcttgagcccagaagttgaagaccagcctgagaaataaggtgaaaccctgtctacaaaaaatacaaaaagttagctgggtgtggtggcgtgtgcctgtagtgctagctactcagaaggctgaggtgggaggattgtttgagcccaggaggttgaggctgcagngagttctaattgcgccactgcactccagcctgagcgaccgagtgagacactgtcttaaaaaaaattaaaaattg

SEQ ID NO: 46553 - DNA, 672 bp, Homo sapiens
ttttgctttttataaaacaagtttattcacattttagaaaaactaattccaggacaggaaatggcctccctataggatccctaagagatcaagaacagaaggccagagggaggggcttgggagggaaggagtggggaaggggaggcacgtctcccattctgggtagtgggaggtcaaataaattaaaggaagagtggacagagggagagggtgtccaggcaaccagaggagggcttggagctgggccggaagacagtcgacacctgcaagacctgaaaagggtgcccggtgtgggctggggagtaagggatcaccgttttcgaagcctcttcatgaagcagcaagtgatggtaccaaggacagtggcaccagtgactagggccacccctgtacccaccagcagaggcacaaatagggtgtccagggcatgcatgtaggggtagactgtaacaggccctgagcgggcactgcccgcctgggttacccagctgtagtccggcatgctgcaccccaaggcgcttgggggcacagtggtacacgccttcatcctcgggccccaagctgtgtagtctcagccgatggcttcggggccccaccagctctacgctgacagggcctcctccaggccggactcccagctctgccacaccatcctggcctacgccacccacc

SEQ ID NO: 46554 - DNA, 1076 bp, Homo sapiens
  misc_feature (1)...(1076): n = a,t,c or g
ttttttttttttttttcaataaaacatttttattctgtacaatatatatgtgtatttaaatatatatacatatgtatatatatatntctccncagagaaaccttagccaacaaatccctgagtccatgggaacccaggacactaacaaagggaaaggagagtccatgcctaaagagtaggaaatatggcaacatctttccctttcctcctggttccctgcaacagagggaagggaacagtcactacaaattactaaaacgagggtttaggtggggcaggaaagtggggtgagagtggtaggatggggaactcagatgccaccagtctgggaaagtaaaacatttgatccagcatgaaagccaacatgaccgcagaggaaaaagaccagactgatgggcatgcagctggcctttggtatatgccaagcctttgcttggtagccccacgcctgggccagcacaacaaatagcacctgtggggcctataagccgggagggggatgggggagatagggactggggaaatggcccttgagtgaaggaaagggagataaagctgaggaagaggcctcaggcctcagcacagggtggcaacactaccattcactgtccctgtgccatttcttcagactctgggccgccaccaccaccagatggccaagagcagataaccttttgtccacagccaggtagagatgggcaacttacatggccttgagaagaggtatagaaaaaggagtgcttttgagggctaccccctgttgtgaccattcctgaagtgcagagaccacaccagcaaaacatgcccagtcttagtagtggggacgaagaattgatgagtggatccagtcagctccggcagacaggccacagggttgccaggtttgatgagccaaccaggtgagcacacagcttcggagcactgccctgaatcctgtcttctccctcaggactgccctttcctggccacaccaagtttggcacctctccagaaagttggcagggagcaagtggcagacagcacccctctctccctagcctattaacacacagagccgccaatggcagggcagagcg

SEQ ID NO: 46555 - DNA, 443 bp, Homo sapiens
  misc_feature (1)...(443): n = a,t,c or g
ttttttttttcacatgattattcttgtttattgaggtctctttattctccacgggtgcttttttcttcaagtaaacagagcaggcgcaaatatctataatgaataaatttattgtcttacaaaaatcattgtctagaaatatgggaatacaagaaaagatatttgcggtcaggtgtctggtggtcaacagccagtacagttcattctttttagctctcccctcagctctgtctcttcattttagcaagaataggcaatgtcagagagggcgtgggggcaggcccctgctcctaacagagaggatgccagggtgtgggctgcccagcacggtggctgagaacagggtctccagagccaggtgcgggattcacaccttgggcttctgccacttctccagnctaacatggacctggggggcccattcctaaaantcctttggggcc

SEQ ID NO: 46556 - DNA, 310 bp, Homo sapiens
attgtcacaaaaggttttattctctttgcttgtgactatttttcattgaagcatgcgcttacctatgctgattcttactaaaagcataggctggggtatttattggcgaaaggaaatgtgtagtgtgggctggactgttggtggaggctggctttttagcccacttgctatacatgctgccaatggatttaagacttgaaatgttgaaagttgagtggaattatttccctcctaaaacatttatttacagtactcctctctacccctaaggttgggctctgcctcagaggagtgagttattttttttttt

SEQ ID NO: 46557 - DNA, 1855 bp, Homo sapiens
tctccgtcagccgcattgcccgctcggcgtccggcccccgacccgtgctcgtccgcccgcccgcccgcccgcccgcgccatgaacgccaaggtcgtggtcgtgctggtcctcgtgctgaccgcgctctgcctcagcgacgggaagcccgtcagcctgagctacagatgcccatgccgattcttcgaaagccatgttgccagagccaacgtcaagcatctcaaaattctcaacactccaaactgtgcccttcagattgtagcccggctgaagaacaacaacagacaagtgtgcattgacccgaagctaaagtggattcaggagtacctgggagaaagctttaaacaagtaagcacaacagccaaaaaggactttccgctagacccactcgaggaaaactaaaaccttgtgagagatgaaagggcaaagacgtgggggagggggccttaaccatgaggaccaggtgtgtgtgtggggtgggcacattgatctgggatcgggcctgaggtttgccagcatttagaccctgcatttatagcatacggtatgatattgcagcttatattcatccatgccctgtacccgtgcacgttggaacttttattactggggtttttctaagaaagaaattgtattatcaacagcattttcaagcagttagttccttcatgatcatcacaatcatcatcattctcattctcattttttaaatcaacgagtacttcaagatctgaatttggcttgtttggagcatctcctctgctcccctggggagtctgggcacagtcaggtggtggcttaacagggagctggaaaaagtgtcctttcttcagacactgaggctcccgcagcagcgcccctcccaagaggaaggcctctgtggcactcagataccgactggggctggggcgccgccactgccttcacctcctctttcaaacctcagtgattggctctgtgggctccatgtagaagccactattactgggactgtgctcagagacccctctcccagctattcctactctctccccgactccgagagcatgcttaatcttgcttctgcttctcatttctgtagcctgatcagcgccgcaccagccgggaagagggtgattgctggggctcgtgccctgcatccctctcctcccagggccctgccccacagctcgggccctctgtgagatccgtctttggcctccctccagaatggagctggccctctcctggggatgtgtaatggtccccctgcttacccgcaaaagacaagtctttacagaatcaaatgcaattttaaatctgagagctcgctttgagtgactgggttttgtgattgcctctgaagcctatgtatgccatggaggcactaacaaactctgaggtttccgaaatcagaagcgaaaaaatcagtgaataaaccatcatcttgccactaccccctcctgaagccacagcagggtttcaggttccaatcagaactgttggcaaggtgacatttccatgcataaatgcgatccacagaaggtcctggtggtatttgtaactttttgcaaggcatttttttatatatatttttgtgcacatttttttttacggtttctttagaaaacaaatgtatttcaaaatatatttatagtcgaacaattcatatatttgaagtggagccatatgaatgtcagtagtttatacttctctattatctcaaactactggcaatttgtaaagaaatatatatgatatataaatgtgattgcagcttttcaatgttagccacagtgtattttttcacttgtactaaaattgtatcaaatgtgacattatatgcactagcaataaaatgctaattgtttcatggta

SEQ ID NO: 46558 - DNA, 6542 bp, Homo sapiens
  misc_feature (1)...(6542): n = a,t,c or g
cgacttttttttttttttttaaaagtctaaaagtttattgccagaatagcaaacttcataaagacaccttaaagtacatcgaatatgacaagcaaaataaacagaaaactttgaccaaagaaaagattgccgctgtcatgcacagtcaaattaataccaaaccaaacaagtacatcgaagagtatatgggttatacaatccacactctgaaactaaaggagactcattccaaaatgcttggttttgggttgggggtttgagaggggggctggtgctgggagggtaattttctcctaatacagaatatggaaatatttagatgagaagcagaatgactaaaatatcagtgatccatttaatttttatctccaagaatagaaaactgtattataggcttccaaaattaaagaattgatcaaaaatcgaaacacagaagagaagaaacaaatcctaagttcgatttgtgctattgttacaactgattagcacttcagacgcactgcatccaagtgtactgcttatttaagatgagctaagaagataaaaagccagaacagcctttactattttgatttcaattcatggctatattttctgtaagcatagaatgtcctatcactctactgcaagcaccgggattttcttttctattatttaataaagtggaaattcatataaatgaagtcaaggtatagcaaccactcccaactgactactagtgcccaatagaactactgctaaatgagtaggaataagagtaggaagaattccctgtggcgtcaaagcttcctctccgggacccactgcgggacccggagcgagatccggagcgagatcccgagcgggagccggagcgggaccccggagccgaagacatgttgtaagggctgggtaagcccttggacgacacggaggcggcttccagaaggcgcagccccagtgatatcttctaccatggagcgatttatggcatccttataggatatttttaatttggttttggggcaggtcaggatttttgggcatagctgctggtgtcttgcagcctctgtgcggcgcggccatctatgaaccccttccggatggcttcttcggtgcttatcctcccatgcacttccgggtcaacaagacctcccgtgaggtactggaactccaggaagcgctggccagcctcatacgggagccatttttctttcactgcctctgctgctgacatcttcttctttcccttcacaccctcgaagcctatgaaggctttctgagcaggcttcagcctggtggccatgtcttggtcaatcacaccctgggagactgcgtcctgaagtgacagcttctggcccgtggttgggtggatgatgccacctgtgcaggcctgagcctccagaagcctctgacccgtgatgctgtcaacgatgccccgctctataccttctgtaatggagattttctccaggttttctgtgtcaaagatggctgcaatggggctcgattcttccagggtgtctgaaaaagagctgctccttatggttaaattcctgacgctggatatggtggaaatcttacttactgattcatgtcgggagctgctaaaaacatcatcgctgacaccactgcccatgctgctgctggtgccgacaccatttttcaaggagatcatgtcagcaaattgagtgaggctgaggctgccggatcggtactgatcaaagaacttcctgtcaacaaggcccttgtcaatagcatcttgaatatcatactgactgcctgtctttctatctaccaggaccaccctggtggagccatctgatcccgtgatggttatttcttcccattcacattcctgctcacacagttctttgaaggtttcataatcaattaggcccttcttgtaggcctcctgaacagacatttctttattggtttctgggtcaactatgaccactctacgcttcctgagggtattcttttgtgatgtctgcacctgtttcttcttttctttcagaggcagaagacagagccctgtttcctcatccttaatgcatctttcttttagttgcagataggtaagattttcttcagtgttggggtcaaaaaatcctttggtatcatcacttggatctgagagaatctcactgagttcctcattgaaatagcccctcttatatgctatgtcaactggtaaacgatggctctcctttgggtcaatgatccccccggttgcgatctgtgcttctaataagcgaataccgtggcccttttcgatgagttccttattcatggcttggaacaaagagatgatgtttcctgtttcaggatcattatacccagtgacagctcgttctgcagacaggagcttctctttgaactcaatgcccaccagacctctcttgtaggcttcctccactggtaacctcaagttgctaacaggatccactataaagccagtagctgcttgggcttccagcaactccagagcagtaccaggtcggactaagccaattttcatggcctcataaatgccaagcttctgttttgtggtctcattgtatattgcctntatgcagcttgaaccctggaggaagtccttaattctctcaccaacctcgtcataagaaatctgaccagattccagttcattgacagtgggcggtctcaatataccagaatctactagctcagtgacggtcacaggttgtctgattccttggaaggacatgcttctcttctgtactgaaagcaagagcagaccagtatgtggttcgattctgcaccgttccttcagctgcacgtaactgaccttctttttggtgactggatccacaaagtttttctgactatctcggggatcattcagggatcgatacaaatctctatcaatcagcccccgggccaaggcgacatcttttggcaaaaagacactgttcacagggtctactacaccccctgaagcaatctgggcttccagcaggcgcattccggtttctctatcaatcaaatttttcttgatggcttctgaaacagatactgtcttgcctgaaaatggatcatcaaaaccagtgatagctttttctgctgcatatatctgctgacggtcatcgaagtcaatgaggtcccgagctatggcactgtcgacagtcagcttctcattccgatggggatcaattataccacctgtagctgcctgggcctccagaagcatgactgtggattctgggctgattaatttctttctcttggcctctaccaaagagtatttttccttaggagaagcagatgctccagcgatagatcctgcaccccgaaggaatggctggatttcagaagcaacttcttccactgacttcttccccttcaatagtttgtccaaggttgttttgtcgatcagctgacactcatagagctgcattgctgtcaccttcttcctcagcccatcaaacaccagcttggaggtgtcaacggtccactcacactcagtctgggtctctcgatgggacccatatgggcgctgtctgagtttatcaatctccctctgatatcgggagcgttctgtttctaactgtgactgtgtctccctggtagaatcctcccaagttacgcctgcacctctcttcaattctcttgatctctgcttggagtctttcgatctcactcctaagactgttcttctctctctcactcttttctctttccgattctatcttcctaatagcctcctcttgcgggaatattgagtcttccactgattcaggtcattctgaatttgctgtttctcacactccaggcgctgtttcaccctggtttctgcctctagagttgattttgcacgattcagctcatcctccagcctctgcagccttgccttgtcttgctccaggactttgattttcaccagaaggctctctctttcctgtaccacctgagtacactgattctttgattcctgaatcctattagatgcctctaaagcctgcttttggaatttctcaatttcctgtctcaaattttccctctctctctgtaaatcattaatcagcccctgcagttccagggtccggttgttgctgatctgcagctggctccttagttccaagatggttgcatttttatcactgtccgcttcgcttcgtcctctcctcaggtcatcgtactccagcctcaggttccgcagttcttcttctaacatcaagtgctccttggtcaggttctctgtgagagactgcagcctctcaatttctattttgctttcatttaagcttctgcttttatcttctatcgccttctggaaatgctcattcctcaagtgagcttgtttgacactttcctgttcctggagtaactgccgcctcagggcctcgacctcagaagagagcctcctcagctcttcctgggtcctctgcttttccctcaggtggccatccagcacgtccctctgctgccggaggtcatcctcactcctcttcttaacaatggatgcctgctccagctgctgggtcaggttggtgattttgatggcttgctccttcagcgacctcctcatgccttccagctcttcctccagcttcttcctcttgcaggagtcttctgacgcggtcctcttcagccgattcagctcctcttccaccttctgcttctgcagctgcagctctttcagagagttctggaaccgcgtgatatcctggtccttcacagtcctctcctgggaaaccctttcatagtcgatcctcaggcgtgtcagttcttgctcctgaaccttcagtttgtttattgtctccgtcgcactactgtttgctttctgcaggtcatactggaccctttgtaatctcgcgttttcatcttccaggcatttccggtcatttgtttctttgtcgatcagttgttttaacctttctatctccttgtttttatcctggatggttttggcagcatcatcaagagattgcttatatcttacgctctcctctgttcgcatctgagtgacttgtctcagctcaacctccagctgctgtttcctctgagacacctcagagccagtggccttttgctgttggatgtcttcttccaccctcctgagattctctgtggtctgggttagagtgttcttcagcctctttatttcttcagataagctcctgttttctcgggtgagattgtctatctgagcccggtagccactggtatcctcttccttctgcatggtgagctggtggatggtggtcttggtgatgttgatctcggtctcaaactgattttttaagctaatgatctcctcatcataattgtttcttaccttactcagttcattttcatattcccagcggcgcttggcctcctcctgaaactcagctttgagtctctcgatctccttatttttgtcctgaatggtcttggcagcctcctccagggactgcttgtgccgggcattgtcctcagagcgctgctgcatgacctgcttcagttctatctccagatgctgcttcttctgcattatctcagagccacaggccttttgctgaagggcgttttcttcagctcgccttcgctgctcagtggcctgcaagatgctgtcattgagcctgacaatttcatccttcagatctcgattttcccttgaaagtctatcaagctggtttctaagatttttggaatcatcctctttttgcatggatatctccttgatggtggtcttcgtaatgttaatctctgtttcatacttgttccttaaattactcatctcctcattatagtggtttcttacctttgccagctcattttcatattctctcttccgggtgccttcttcctgcagtagaaccctcaacctttcaatctcgtactccttctccttgatggctttctcagactctaatttctgccaaccaaggttctccttttcacattgccttgctttctgcagttggtcatagtcattcttctgttggtcaaatctgtcttccacagattttcttcttctcttttcatcttcaatctcataagtcagtcgggtgatcttctcattgagttcttttatttggccgtagcacttgtctagattttgcttagccgacttcccatccagctcagcctgtctcttcagctcctccaggctcgcaagcttcgctttgaactgggaacactctgcctggtatttctgcaggttctgatccaggaatttgttcttattacagttttccgagttggcatctcgggccagtctgagctcctcttccaaaacttcgatcttggtatttttcagcttcagatcttccaaactcttcagcatctcacttaagaacctggaatagtctccagatcttgtaagtagttcaatgtaccgagcatgaacatctgcagcctcttgcagaatcaccccagaaggtgactggaatcatgtgtctcttgataggtatgttcagcagagtttccagtcctgagggtgtatgaggccagctggagctcataatctttaattgaattggcacaaagttcagcaatgtttggtacttcgtctgagtggccgcgtttggcatgaagttcactggtcaagt

SEQ ID NO: 46559 - DNA, 640 bp, Homo sapiens
ggcaacctctgggtggggaagggagcaatgtctcaggatctagtgtgtctaggttctgaagaatgataaattggactggggctgaggttgccctggggtttgagggaacagggctccctgggtatggctctccagggtaagaggaggagacttcccagttcagcctgactgcttcccccacccctccaggtcctgagcctttgcctccaaaaggtctgcagtatctggtgctcttgtctcatgcccacagccgagagtgcagcctggtgcccgggcttcgggggcctggcggccaagatggggggcttgtgtgggagtgctcagcaggccataccttctcctggggaccctctttgagccctacaccttcagaggcacccaagccagcctcccttccacatactactcggagaagttggtgttccgaggccacgagtgggcaggagcttgcagatttggaatctgagcatgatgagaggactcaagaggccaggtttgcccaggagggtgggacccccaccagagaccttcccacctccaggagaggaagagggtgaggaagaagaggacaatgatgaggatgaagaggagatgctcagtgatgccagcttatggacctacagctcctccccagatgata

SEQ ID NO: 46560 - DNA, 436 bp, Homo sapiens
gggcagatttgcatctttacaaccagaagctcagggagaagttgaaggaggaggagaacacagtgggccgaagaggtgagggtgctgagcctcagtatgtggacaagttcggcttccacacggtgacgtgctgcggcttcatcccgcaggtgaatgagtggcaggatgactggccgacctttttcgcccggcaccggctccaggcgcagctggacctcattgagaaggactatgctgaccgagaggcacgagaactctggtcccggctacaggtgggcacggcagtgacttctctgggaaagagctggtcctctcatgatcccgccgcatttgtgcgggttcatctataaaacggagctggagcagggaacactgagtcctggagcacacatcagggaggaaggggggcaggggcgggggttcccccaaaagggag

SEQ ID NO: 46561 - DNA, 448 bp, Homo sapiens
cttttctttttttttttctttctctttttcttcaaacccttgtgtcgagggctgactttcaatagatcgcagcgagggagctgctctgctacgtacgaaaccccgacccagaagcaggtcgtctacgaatggtttagcgccaggttccccacgaacgtgcggtgcgtgacgggcgagggggcggccgcctttccggccgcgccccgtttcccaggacgaagggcactccgcaccggaccccggtcccggcgcgcggcggggcacgcgccctcccgcgcgcgcggggcgcgtggagggggggggcggcccgccggcggggacaggcgggggaccggctatccgaggccaaccgaggctccgcggcgctgcgctatcgttccgcctgggggaaattctgacttagaggcgttcagtcataatcccacagatggtagcttcgccccattgg

SEQ ID NO: 46562 - DNA, 388 bp, Homo sapiens; identical to SEQ ID NO: 17409

SEQ ID NO: 46563 - DNA, 1553 bp, Homo sapiens
ttttgtttttttgatttttctttttttttctaaggtgcagacaccccctccccccaaggaaatgattggtggtcatctcatctcatggtatactccttacacacaaaacattcaaactactttttttccatctcttgcagtcttgctaaccacaaggaaaaaaagttggcctcatcatacggtcagtaatagatcctcaacatacaatcaacccaaccattagcattctcagtgtgcatgctcacggcaaaggcttaggcgccgctcggaagggcgggtaccagtggcgaagtccagggtcacccacataccatgcaccacgggtgctatgccacttcttacaggacctttttagccctcaaaagaccttccaaggagaggccctggaggcaactgggtagggtgcagaacggcatgctttggctggaacacgcatccctccttccacggccggctctcagcctggaagccttttagcctacaggatccacctctctgctccctcagaggtgcctcttcatgtgcagggccaggtggtcagacctggaaaaacacctgtcacagtgggagcatttaaaaggcttggccccggtgtgctttcggaagtgcctggttaactcatcacttcttgcaaaacgccactcacacccttcccatgagcatctgtaaggcttttctcctgtgtgcgtccgctggtgtgctttcaagtgggagcttttggtgtaaactttcctgcagccgttaaagtggcaccggtgcaccctcctcctgccgtcgggggaggcatcgcccatttcccttgtcacctggcttccccgaagtcccgctgcgcaccttccctggcgagggcagctccccgggcacgcaaccccacagttgagaaggttccctgctcagttccggagaagatggaggcgtggaggtgacagaggagctcaattttcccgagctgaccaaaacttcgccaatggggtcggaggtaaacttggccgtgggagaaagttcctcggagctgtcagaggattcgctgctgacatctgagttcaggctgttggtctctaagttgtaacaaaagctcgggctgatgagagtgtcctctggaggactggaagatatcttcagttcggattcctcctttttctcccgagccagaatgattttggtccacagatcttcctggctgtcaaatttgatttctgaggctgaaacatagcagggctcgctctggaggtaacgttccagctctaggcaggtctgttgccagtactcctccagaggacggcagcgccgagaagtagccggtctcgtgcacgatctggagctcctggaagatgctgcacatggggagcacgtccatgtcgggccgggttggacggagcccgcggtcgcgagggcggcgaggcgcgcggtgggagccggagccgaaagtctccccggagcgcaggtgaaagtttcatgcaaactccaggctcgcagagacgcccggccggaccctcccgcagccgcagcgcgcggagcccacacaatatttgcaaacaccggactgactgcaa

SEQ ID NO: 46564 - DNA, 2680 bp, Homo sapiens
taaccctaaggtgtttcttggaaatgtggaaaccttcattaaacagatagattctgtgaatcatattaacttgttttttacagaattgaaagaagaagatgtcacgaagaccatgtaccctgcaccagttaccagcagtgtctacctgtccagggatcctgacgggaataaaatagaccttgtctgcgatgctatgagagcagtcatggagagcataaatcctcataaatactgcctatccatacttacatctcatgtaaagaagacaaccccagaactggaaattgtactgcaaaaagtacacgagcttcaaggaaatgctccctctgatcctgatgctgtgagtgctgaagaggccttgaaatatttgctgcatctggtagatgttaatgaattatatgatcattctcttggcacctatgactttgatttggtcctcatggtagctgagaagtcacagaaggatcccaaagaatatcttccatttcttaatacacttaagaaaatggaaactaattatcagcggtttactatagacaaatacttgaaacgatatgaaaaagccattggccacctcagcaaatgtggacctgagtacttcccagaatgcttaaacttgataaaagataaaaacttgtataacgaagctctgaagttatattcaccaagctcacaacagtaccaggatatcagcattgcttatggggagcacctgatgcaggagcacatgtatgagccagcggggctcatgtttgcccgttgcgggtgcccacgagaaagctctctcagcctttctgacatgtggcaactggaagcaagccctctgtgtggcagcccagcttaactttaccaaagaccagctggtgggcctcggcagaactctggcaggaaagctggttgagcagaggaagcacattgatgcggccatggttttggaagagtgtgcccaggattatgaagaagctgtgcttcttgctgttagaaggagctgcctgggaagaagctttgaggctggtatacaaatataacagactggatattatagaaaccaacgtaaagccttccattttagaagcccagaaaaattatatggcatttctggactctcagacagccacattcagtcgccacaagaaacgtttatttggtagttcgagagctcaaggagcaagcccagcaggcaggtctggatgatgaggtaccccacgggcaaagagtcagacctcttctctgaaactagcagtgtcgtgagtggcagtgagatgagtggcaaatactcccatagtaactccaggatatcagcgagatcatccaagaatcgccgaaaagcggagcggaagaagcacagcctcaaagaaggcagtccgctggaggacctggccctcctggaggcactgagtgaagtggtgcagaacactgaaaacctgaaagatgaagtataccatattttaaaggtactctttctctttgagtttgatgaacaaggaagggaattacagaaggcctttgaagatacgctgcagttgatggaaaggtcacttccagaaatttggactcttacttaccagcagaattcagctaccccggttctaggtcccaattctactgcaaatagtatcatggcatcttatcagcaacagaagacttcggttcctgttcttgatgctgagctttttataccaccaaagatcaacagaagaacccagtggaagctgagcctgctagactgagtgactgcagttaggagggatccgacagagaagaccatttccactcattcctgttgtcctaccaccccttgctctttgagggctggctattgagaactggaaagagtaaaatgataacttaccttagcattgccaagaacttcagcagacaacaagcaattctatttattttatgttgtgtatacatcttgatcattagcaagacattaagctttaaccattatggcaccattttgtgagaatgattgttctttcacttgggctgtttgagagcataattatggtaatcatgagattaatgtttcatgatttctacctccaaagtgtgaagacaagtaaaacaatgtttctaaattgtcttattttgttggcggagaagattacaatggctattagtgctacatttggtcaaatgtaatcacttaaatagcttcttgtcaccttaaactaaagcagaataaaaagtatcctttgaaattataagccctcctttgctgacagctattattttgtaacatcttaccaggtcatgtgctttcagttataactggggctgagcctcctataattacaatgtctatagggactgttttactgcctgtgtattttctgctagagagttagcaatgttagagctagaacagattagaatttctaaacagtatcatgcacagttggtgtgagtgatcagtgtgcattgtatggcatgcatggttgtgaattattctctgttctccaaatactgtttctttaactcagatatttttgttagtgtctaggccacttcatttatttttcgtcatggtactttactgacttctctttattcaattctccacgccctcaccaaaaaaaactgtctcaaaatgagaatattttattttcatggtgagtctagaaaacgcccacttcattctgattaaaaattcttccatgttttaaaaaaaaaa

SEQ ID NO: 46565 - DNA, 1025 bp, Homo sapiens
cacgcacgttcaagtgtgacaaggtggtcttgtcacacaaccaagggctgtacttgtacaaaaacatcctggccatcttgtctgtgcaacaacagaccatccatgtcttccaggtgactcctgaaggcactttcattgatgtgcggaccattggccgcttttgctatgaggatgacctgctcactgtgtcagctgttttccctgaggtaaagcgggacagtcagacaggcatggccaatccctttagggatcctttcatcaattccctcaaacaccggttgctggtatatttgtggcgccgggcagaacaggatggtagtgcaatggccaagaggcgcttcttccagtattttgaccaactgcggcactgcgaatgtggaaaatgcagcttctggatgaaaaccacctgtttatcaagtacactagtgaggatgtagtaacactgcgagtcacagatccatcacaggcatctttctttgtggtgtacaatatggtgacgacagaggtgattgctgtgtttgagaatacatcagatgagcttttggagctctttgagaacttctgtgacctttttcgtaatgctaccctgcacagtgaagttcagtttccctgctcagcttctagcaacaattttgcaaggcagatccagcgccggttcaaagacactattataaatgccaagtatggagggcacacagaggcagtacgccggctggctgggtcagctccccatcagtgctcagtcttacagcggtagcccctatctggatttgtctctcttcagttatgatgacaagtgggtatctgtcatggagcggcccaagacttgtggagatcacccaatcaggttctatgcccgggactcgggcctgctcaagtttgagatccaggcggggttattgggccgcccatcaaccacacagtgcgacgccttgttgccttcacctttcacccttttgagcctttcgctatttctgtgcagaggactaatgctgagtatgttgtcaacttcatatgcgacactg

SEQ ID NO: 46566 - DNA, 3495 bp, Homo sapiens
ttaacatttgtgaccagttaactttaattttcaaaataaatctgcagtattttgcatgttagtaatacagtgctggtattgacaggtaaaatcatcatctgcttacatagaaaccttcattcaggagcacaccgtaggaggggaacggatacacaataaaaagcaaacgcaggccaagcagcgagccctagagcgtaacaggctggatgtcagatttaaggattatctaatacaactgtttagctgccaatctgataaaggggaagctctcaaccaggttacaaccagaagggaaaaacgtactctgccttttcgtagagcagtggctgtcgtgccttcaacacctggttgaatcagttcatcaacatcgaaactcaattccagttccaagacacagaatttcatcacacaacctattcggtaccccttttcagtggcccacccaaaaccccctcctgccatcgactctctccctcccaaaagaagacatgacgtggctttattattgcagacaagcttcttaagtgaataaagaatgcatacaaaatagtattttaactgaagtcatacaatgaagtctcactcctgtttattatacaatgaattgataaaacaattacttctagtatatatctttttttttttagaactaatactttcagggttctgacaaccacattctagcttaggggtagggcccacacctgcccccactgaggactgctccttggaccactgtggaggaagcctgggctgtctgaattgtgaattatgactgccagcccaccagagataacagatcccagcaggcagagccagaacccagttttgggtctgcatgccaggaaatgtgaacttcctccaaatgtggccactgtgcctcccaatccaggcctcagcaaggtcattcttgggctttccctacacgagtccttccagtagtccacacataatgctctacatattaaaaacaaaccatttttgtactgtggataagaacagttgtaacaaagtcatagctacatatttttctctacattttgtttattgagacaaactaattaaaaggcacaaacatagggcatgtttacatggacattataacaaacatatacattaaaagtgtaggaatgtgttgccttcctgctaaacagaaagttcctaagcttttatatatacaaaagttgtacaatttaatgtcctaaagtacaaaagatcatttataaaattattttacactaagtactatttattttatttttttactatgtagttcaaccccctagaactgttttgtataatgacacacagatacctgtccctgatgtaggaagtctgtctcagatgcaaggtattttgatgcttgaactgacacagtagggtataaatggaaatcatccagtttgatagtcagtcctgcaaacattctgcaagattaacacaactaatttccatttctcttaactgcaatgattaaaaaatgaaaaaaaccaaaaacatattgcaacttaaaaaatcacagcatcttggtttagttaattttttttttacacgcaatgctttaaaaacaatgcgtggcatgatggtgtaaagagtatctgtttccctagcttttggtttctactttatgtacagagataaaatatcttgctaagaaataaaaagcacatgtctcaacgtgcataatcattgctgggtttctacagggaatgcagacagctgtctccctgaaaacaccacaaagctgatacaagtgttttctcaaagaaaaaaaaagtgatgtccatatttacaaagttgaacaaatctgcgcaatacttaagaaacggaaggagaaatttaaaaaaagatacactctgcatgttctgaaggggcatacactacctagttagtggttagaataaaaactgtatacaatttaatataagacataaactctagtgagcaactaacacatctgtccctgttgtaatatcaacaggctctgattgggagagagaggggcatatcacatcccagtgcctccagcgtcttccaatttaaagcaatatatttgtactgttccaaagtactccttggctcctaaataggaatcccactggactctgtttattaggagcttgcctgtccacacacttgacttctcctctgtcagttgaggcttttcttagcaaaacacaatttgtagattttttttaaattttttttttttttaaaaagtcaactacaatgctatattccatcgggattaatatgctgagcaatatttacatctccaaatatcaggtcacaatccctattatacgttgaagttagaatgataaattatcatatgctttgcatatcagagctggtatcacctttcccatagggaatgctgcctgaaattaacatattcccaaaggtaaaatgcatattctctgaaatgcattttattatgacaatgcatgtatttactcataaaaacaataaacacagacaattctacactagctctcaatctgtggatttaaaatttcaggttaaaatcagccatccaccttgtatagggagaagagttctgctagtgtttacaataaagtgattccttgggattagaaatagtaatgctgtttttttattttgaagtgggttctacttatgattggttttaattctgggcatttcatcttgccaactactatcctgtttaagcaatgttgtcagctaaaaggaatttctgattaaactaaagtggtccagtgataagttacatacacaccctactttgaataatcccagccaaattggagaaaaatgctaccacactcttattaactaatgtaataaaatctcccaatttcatggtttactttttgctttaatcaactaaaagttaagttgctggtaaatatttacttttacccatattttgattttataatactgtttaccaaggcggtgatgtaggcaaagcttggggcaagaaaggcatgctctctacaggtctcattgctatattgagaggggcggctaatgtcataggtgtgggtagattcattggagatgtgatggtgacagggtgtgctatattcactggggcagtgacgggggtggggaggttgactggggtagtgagtgttaaaggagaggtcatggataatggactggttatagttacaggatgccctatgttcattgggctggttatgttaactgcacttgaaacatttactggacttctcatgctcattgcagctgccactgtgactgggtttgacatagtcccagacgacacagaggatgttatactgaatggagtagtgagagtcacaggtgtcgtagcagccgtggaggtttggcacaggttagcagcttctttcttccttgctttaacagcttcttcccacagtctcagtgtttctacttgcttccctggccagcttgtcacatgttgttgttgttgttgttgctgctgctgctgctgctgctgctgctgctgccctagtgccgaat

SEQ ID NO: 46567 - DNA, 1243 bp, Homo sapiens
gttaaaaataacactgcactttcaggaatgtttgcttatggtcctgattagaaagaaacaggtgtctatgctctgcaatggtcaatgatgaattactaatgccttattttctaggcatataataatagtttagagaatgtagaccagataaatttgtttactgttttaagaaaactaccagtttacttacagaagattcttttttccaaacagtaggtttcatccaagaccatttgaagaactgcaaactctttctcttagaaaagaaagagggcagcctaaaataaacgcaaaatttgcttatactccatcacattcagatgtcttggttgtgacttattaccagtgtggcagagaacccaagttacattttagatcaaaatattctttatgtaggtattgttaaaaggctagagcctacaagttgctcttccatgcgttggtcagggggccctgaaaacactggtaatattaagagtctttctcagggtaacttaatgttttcttaatgaacagtgtttccagctacaaattcttccaataaattgtcttcctttttgaaaagtactctcatagaagaaatttagcaatttctcgttgactgactcagtctattttaagtattcagaaaagattttgatccccattgagttaatgctctgccttgaaaattatttttctgatccttgttagtgataacattttttttctactgaaggtcagaggataggaaacaagtatttctcttctggtatacatgtaatgtattctgtaaaaaagtattcatattggcaattttagttaggcataatattgtggttgtaatttttaaaacttagtgttttgtctgattaaagcaggcactgatcagggtatctcctaagaggtaattcacttcttattcctttccaataattattacattctaaattttcatctatgagaaataacaaacaagaagggaatagaattaaattggggtataatctaatcttcattgtttaaatggtttgccttctcaccattgaagccatttttttatagcctcagaaagaggaaataatgcctccaccattttctacctggtgacttgaaaattgaacttttaagttaggaagaagttagagtcagggaacttgtataccactatctatgcagcattgttatagtctgattatttctgtgttttgaatatgattttcctaatgctctaaataaaattttgttaaaaattaaaaaaaaa

SEQ ID NO: 46568 - DNA, 854 bp, Homo sapiens
gcgggagccagggggcgtggggccatggtggtcttgcgggcggggaagaagacctttctccccgctctctgccgcgccttcgcctgccgcggctgtcaactcgctccggagcgcggcgccgagcgcagggatacggcgcccagcggggtctcaagattctgccctccaagaaagtcttgccatgattggataggacccccagataaatattcaaaccttcgacctgttcacttttacatacctgaaaatgaatctccattggaacaaaagcttagaaaattaagacaagaaacacaagaatggaatcaacagttctgggcaaaccagaatttgacttttagtaaggaaaaagaagaatttattcactcaagactaaaaactaaaggcctgggcctgagaactgaatcaggtcagaaagcaacattgaatgcagaagaaatggcggacttctacaaggaatttttaagtaaaaattttcagaagcacatgtattataacagagattggtacaagcgcaattttgccatcaccttcttcatgggaaaagtggccctggaaaggatttggaacaagcttaaacagaaacaaaagaagaggagcaactaggagtccactctgacccagccagagtccaggtttccacaggaagcagatggagctcctttcacaggggctctgagaaaaactggagctgatctcaagaagccccacatcttcctaaggggccccatggcctgtttgggggcagggtaggtcctggggcactgtgggccgcctgcctgctgatgtgggctctaggccagcttgttgtcacgtacgtggtgtgaaataaagcccaagcactgggaaaaaaa

SEQ ID NO: 46569 - DNA, 649 bp, Homo sapiens
ctggttctagatcgcgcgcgaccggcgagggaggaagaagcgcgaagagccgttagtcatgccggtgtggtggcggcggcggagactgcgggcccgtaggctgggctctgccgaggtgcaagaaagcctttgaggtgaaggtgtatgaaagtcatcataacagatgttttccaaaaacttgtagaaggttgtgaaaaaactactaggatcacgcggcatgtattgaggtgtggcatgcagcattttggaaggaaaattgaagacgtgttcaagaaaacatgaacagaagcaaatgatgaaaatgagcattttacttgatgttgataacatcacaataaattatggagaaaaatacatatttggctaacttttaattgctgaacaataaagtgttttcttttaaatcaactctaaatagctccattctcatagtcactagtcagacctgttttgaacatattcgaaagattataatcttgtcaataattagcttatttatgggtggtgattctcattgaggctgacagctggggagacattgcttgtacctctaggttccctgtctggcttccccttcagagcctgctgttgtaccaggtggttgaatcttaaaactctttaataccaaatagcaatcaaattccccctt

SEQ ID NO: 46570 - DNA, 542 bp, Homo sapiens
gctcacctccatccacagcaccgtcgactcttgcatcagagacagcaacagaatagaagtcagcatcggaatctcaatggtgcgggagatagaggaagtcaccggagcagtcatcaagatcatctccgaaaggatccatatgccaatctcatgttgcagcgggaaaaggattgggtctctaaaatccagatgatgcaactgcaaagcactgatccctacctggatgatttttattaccagaattactttgaaaaactggagaaactgtcagctgctgaagaaatacaaggtgatggccctaagaaggagcgcaccaagcttatcacccctcaggtggccaaactggagcacgcctataagccagtgcaatttgagggctctttgggaaagcttaccgtttctagtgtgaataatccccgaaaaatgattgatgctgttgtgacatctcggagtgaggatgatgagacaaaagaaaaacaagttcgagacaagaggagaaaaacccttgttataattgagaaaacctacagcttactccttgg

SEQ ID NO: 46571 - DNA, 464 bp, Homo sapiens
actcactatagggaatttggccctcgaggccaagaattcggcacgagggaaattaagatatggaaaggattaatggatttttttcaggatcccctgggtaagggctggctgccaccgggttaacaacctggtccccaggaactcttttcaggagccatcgttctccatagaaaggaaggggcagaaagaatactgtcaaacctttgtcaattcactattgcccaaaatagaaaactgcttattcaaaaattactttctcattacttccaagatcctatggataatggaaataaactctctctgggaaaatctcccagggcagagcataagtgtgaagaagaaactatttggtctctgtggtgtggattgatgttaccttactgttattatgccattctaggccataaaagacatccaagccagaaaaagcgttatgctttttaaaatcatgatttcactttttt

SEQ ID NO: 46572 - DNA, 447 bp, Homo sapiens
gttgaatttgaatccgggatgatgtatataactatctattcgatgatgaagataccccaccaaacccaaaaaaagagatctctcgaggatccgaattccagatctatgaatcgtagatactgaaaaaccccgcaagttcacttcaactgtgcatcgtgcaccatctcaatttctttcatttatacatcgttttgccttcttttatgtaactatactcctctaagtttcaatcttggccatgtaacctctgatctatagaattttttaaatgactagaattaatgcccatcttttttttggacctaaattcttcatgaaaatatattacgagggcttattcagaagctttggacttcttcgccagaggtttgtgatagggtgcacaatcaaagcaggttagagaccactggactaaataacctgaattctcctcacctgctcagctgc

SEQ ID NO: 46573 - DNA, 2599 bp, Homo sapiens
  misc_feature (1)...(2599): n = a,t,c or g
gacagcatctagccacggaagtgattttcaaggcgctgactggcttcaggaacaacaaaaatcccaagaaaccactgaccctttccttacacggctgggctggcacaggcaagaattttgtcagtcaaattgtggctgaaaatcttcacccaaaaggtctgaagagtaactttgtccacctgtttgtatcgactctgcacttccctcatgagcagaagataaaactgtaccaggaccagttacagaagtggatccgcggtaatgtgagtgcatgtgcgaactctgttttcatatttgacgagatggataaattgcaccctgggatcattgacgcaatcaagccgtttctagactactacgagcacgttgaacgagtgtcttaccggcaaagccatcttcatctttctcagcaatgcaggcggggaccttataactaagacggctcttgacttttggcgggccggaagaaagagggaagacattcagctgaaggacctggaacctgtactgtctgtcggagtcttcaataataaacacagtggcctgtggcacagtggactgatcgacaaaaacctcattgattactttatccccttcctgcctttggagtacagacatgtgaaaatgtgtgtgagggccgagatgagggcccgtggttctgccatagatgaagacattgtcacaagagtggcagaggaaatgacgtttttccccagagacgagaaaatctactcagacaagggctgcaagactgtgcagtcgcggctggatttccactgagctcctatccagatggggtaggagacagctgggaggctccgcacgccagaggccttgcctttcagaagaaccctgaagaccgctttggggttttgcctgtttgcaccttagacttttgggtatagaannnnnnnnnnnnnnnnnnnnnnnnnnnnnnnnnnnnnnnnnnnnnnnnnnnnnnnnnnnctcaactcactgcaacctccgcnnnnnnnnnnnnnnnnnnnnnnnnnnnnnnnnnnnnnnnnnnnnnnnnnnnnnnnnnnnnnnnnnnnnnnnnnnngggatatagaatctaagagttgattgtggaaaacacgtgaatctattgcgcgcatttgtcatttagcaagatggcagcagtccagctgttctttgcagctggagatgaacttttaaaaatccccttcacacttaatgtactgaccgagacagaagtacctgaaaacagctgtgcatggcaggcccggcaatagcttctgacccacagcacccgcgcctcagaagctacggtcacaacttaaaggagtccagggacttgctgcaggctggggggcactgggtggttctcaccagcaggctgcggcggcactgtgttctcattggccaaaaacatccttttgctctgtctcgttctttacacagagttcactgacttgaagtatactcagttaaaatcggggctggaggtgcagacggtgtctgaccggaggatgtggccgtgcccggccgagcactcttgatctgagctgacctgtgtgtgtgtgtgggggggggtggggccttcacctaagacctctgcagcagacctggacagacaggcccctcccgcctgtccaatcgctctagctgctaatacagcgctggctgtggaatccttcaccgtctcagctggtatcagccccagcctgccttgtgccatatctcagcttggatctctgctagagtccccccaaccatatatcatagagttgaatcacaatgagaccgttggctttgaatttgagtcgttggttcccatggtgagatgcttgttaagactttatacttgggtcaatctctcactttattttgtagaaccatttgaaatcctaggatgtgcttgttctggaaggatgacatgggcccagactgaacaagtcagcttgatgatcttaaatgatggaagtataggacgttgcttattttaaaacaagggaaggacacaaaatggaatgactgcttagtcctttctcagatactcttaaaacaattttttattgttaaatttgtggtaatacatggtcacaaccgtggatcaaacaaggtcagtctaaagtggcaggtcctaggtgtgacctgataccaccaccctttgtggcagcaccgggctggactgccctgatccctgggacgtgagacttagcttccagccagtgtgaatcattgtatctgtctcataatcacagcacagctgcagacacaacaacgtgcagcattttttacataaaaatatggtagaattaatttatgacatggaaatgccttacgtggtatcacacttagtcttgaaaaaaacaccaaggtgacgtttaaaatttttagtacatatcctcaaattggagctaagttatacttcttttataaccttttgggcatctggtcgagagaagacaagattttctctatttacagtgaggcaataaatatgtttgccacctttggactgccgttactgatttgtaacttgaaaaggctatggttgatcatgaccccgcctcccccacctcccttataagatgtggacgagagctttattgacctactgactataaaatag

SEQ ID NO: 46574 - DNA, 644 bp, Homo sapiens
aagcttggcacgaggtgcttggatggtgtcttcctctcctcagccgagaatgacttcgtccaccggatccaggaggaactggaccgctttctgctgcagaagcagctgtcaaaggttcttcttttccccccactctccagtcgcctccggtacctgatccatagaacagcagagaattttgatctcttgagcagcttctccgttggggagggctggaagaggaggacggtcatctgtcaccaggacatcagggtacccagttcggatggcctctctggcccctgccgcgctcctgcctcctgccccagcaggtaccacggtcctcggcccatctccaaccaaggagcagctgcggttccccgaggtgcccgggctggccggtggtatcgtggacgcaagcctgaccagcctttgtatgtgccccgggtgctgcgcaggcaggaagaatgggggctgacctctacctcggtgctcaagagagaggccccagctggcagggacccataagagcctggagatgttggtgctggagaccccaactctgatcagggactccctgtgctgatgactcagggaacataggacctaaagggcccaggacaaaaggtgttgagaatgagccactgatggaccctgtttggcct

SEQ ID NO: 46575 - DNA, 384 bp, Homo sapiens
gcgtgactgggcgggtgctgcagccgccctccatcctctacgggggcaggaataaagctattgcgacccctgtccagggcgtctgggacatgcggaacaagcagttccacacgggcatcgagatcaaggtgtgggccattgcgtgcttcgccccccagcgccagtgcacggaagtccatctgaagtccttcacagagcagctcagaaagatctcgagagacgccggcatgcccatccagggccagccgtgcttctgcaaatacgcgcagggggcggacagcgtggagcccatgttccggcacctgaagaacacgtatgcgggcctgcagctggtggtggtcatcctgcccggcaagacgcccgtgtacgccgaggtcaagcgcg

SEQ ID NO: 46576 - DNA, 7114 bp, Homo sapiens
  misc_feature (1)...(7114): n = a,t,c or g
tttttttttttttttttttcaccactaaaaaaggcttttattacaaaatgaattctaataaaaccaggcctggtcttcaacccctcccgctgggtagaggccctagggtgggctagggtaggggagatgggggtggggggccctgaaagaacagagcaggctgccctcctctcatcagtctcagctgctgccctccttttataaagggctagaagagctcttccaaagccccttgagagagtccccatccttccaaccaggatccttccaaccactgctgtcacaggaccttagcaatgccgcattgcaggatccaggaggtctcggctggctctcagcagaggccatccagggtcactcagcctgagcgatggcgtaggagagcaaccacagcagcaggggacccagaatgaggacagcaagccagacagcaaagctggccaggatgagtttccgggcccgggccccccagcgcactgcctcctcggaccggcctgctttatgccgctcttccgccttgatggcaaacaccagagccatgactcccaggcaagagcagccacagataatgctagtagctgccaagcagcggaggcggagccagcagcagcggatgggggatggaggatgagcagcttccgtgttgcccaagatctccactgccttctcctcgtcctccatcacctggctataggccttgaaggactctgagtttcggctcctgcctcagctttggtttggcttgggtggtgatggagctgactcagggctccaagccaagcccaggggtggggttgagtggccagccaccacgtgaagagcccagggagctgggaaggggtgtggctgactcaaaccagtttggctagatgaagagcaggggagggcccaagggatggagcaactggagctaggacgcctgccctctggaaaaagttgtgaaaggaagcacctgagcaagagggataaaagggaaaggtctgaggcatcaaagagctccgaggaacgtctaggaaccgagggaaaagaaatgagaggaaaaggatatctgtgacttcaaactgactggggaaaggcaccctaccacatcaaattcaccaatcttccctcttcttgggtagatttctgcctggaacatatagtcctgggctagagatcaggtgctaggatctttgcaagaacaagagggaggagaaaaacgatgcccaagttcccacccaaccctccaccagaccagaaaatcagaagcctccttacgcggatgctcatacagaaactaagtttattattttttcttcttaaaaaaaaaaaaaaaagaaaaaaacctcattgtagagaagcccctcccccttcccctaagggtggggggctgtgtgaaagacagctggggaatcaagtacaagggggtggggacagagactatcttgccacccttaacactgcccagccacgtggggtgaaggggaaggggactgtgatgatccccatttccatgacaaccagttgcctaccccctactttggtgggaagaagggagaaggcccctatgtctccctggaggctttccccctcaagacttcaagtagtggttaacagagtcaggcctggtcatggagggagtggccacggtggaaagcctaggtggaggggcagcccactcacgtcttggccttgcggcctctgtgactaacagcagggccagccagggagggaggggcgctgctgcgcaggatgcgctggtccccttggttggtggtcccaacaagccggcgggggccaggacgtcggcgtggggtcccatccccttcctcctcctcacctgaggcttcagcctcagactcctctactgaaccctcaggccccaggggacttgggggctgtaggcggccccgctttgccagcccaggactcccaccaactggggcccctgctcgtttgcgaggcaacttctcagtctctagtggggggactagagaccctggacgcagccgggtcgagcgcagttttggggttagtgagaccacaggtggtgtcaattccaacccgcctggcccgctatctgctaagtccaggtcatcctgaattacagccaccaccatggaccctccactcttccgtcctcgcattccttctgcttcaagccgaaggcgggccaggcgggtgagggggcggcttccatcctcatcagaggaactaccctcactctccccttggccctggggttgccgtcgccctccccaatcccaacaactcctcgaaaaacaagaaatgcctgtccacggtcccaagacggggaacctggctgggcccgaggtgatggaggattccttgggaggtcggcccctcttccgtttgggtggggacgttgaaatggtgacagtggtgacagtgttggcaacagtagcagtgggacaaactagcagtggtgggagtggggttaggggtgatgggtgtgggggtggctgtgtccgactttcggagttgccatcccctgcagaggaaatggtcccagggatgggcaaatctcgtgctttagggggtcgtcctcgccttcttttctccacaggtgacaggaggggattgggtctgtgaactggctggggtccaagaggctggggcccaggaataagctgtggttccaggacaggatctgcaacaattagggtctcaggcccagggactgggtcagccccattggtttttcccttcaaggtggatgagggtgcctcatccacacctctcccagcatctgctggagacctgttcttcttggggggcctccccctccgacgtttcacagcaggtggggtgatggcgagcagtgctccgtctccattctcggggctgccaccaccagtcacccccagctcaatgtgacggcgagcaatgaagggctgctggggtggagtgggcagtgaggatgaaggagcagcttcacagggcccaccaatgggaggggaggattctggccctgacatgctgcggacagacgggcttcccgggctggcactagtctcagagaccccagggcactagggtgctggcagctccccgctgctgccgccgccgccgcaccagttccttttcctctaccacagttaccagccgtcctggcagctttcgaagcactttggggcctggtggttgtcctggccgaccagtcccttgacccctaatttccacatcagcactggtgcgacgccgaggaggtcgggcaggtgaaggaccctcaggcgaggaagtggctgaagatgaggtggatggagctgcaacctcagctgtaacgagttcctgtggcttctctgggctggaggttggggtcttggcctctgtcagctcttccgaggtcctgtcagcctccagtggctcctgaagtggctcatcagatgctgctgagggtgggagctccaggccattgctctcactcacacacaggggcaactcctcaccttcaggcagcactgtaagggtggtcccctcagcagaatctggtgcctcctgctcttgaccattggggatgctgccagcctccaaggtcaggctgggtgcagaaggggtgagagaaaggttcttctctgacacaggcaggatctccacagcaactggcaacagatctttagggggcacaagagaaagtgaggaggtttctgaactggccacagaagccagctccagggactctggagatgccaatgcctgggcacacagctcctccctcaggcctcaagcccaaggggagattagtgactgaggcagagatgggcacagaaggtggaccaagcaagagaggagaggaaggagttacaagacaggtttgggctggaggcggtgtatgagctggtggaggggtacaggcaggaggaggggtgcaggcaggagaagaacaaggaggaatctgtgaaggagggggaggagaaggcaagatatggacagggagaatggttattggatttggggctgaaatgggtactggggcagaaactgggacaggaacaagggcaggaattgcagccggagctgaagctggagtgggtcgaggcctaggtgctggcctgggaactcgctccctggcaggactgcagcggggtggtgtggtggtgctgcgagtttgatgggcggatatgacaggagtgtggtttgccccttgagtctcagcccgggctccacgaagacgctcactgacacgagtccccggcctctcaggggctttggcctttttactgcgccggtgggtgcctccaccagtcccacaggaactctcatccccagcccccggcccctcctcctcctcttggggtaggcggaacacctcctccttggcttggtccaggtctttgcgggcagcttccacttgctcttctgcctgtttgagctcctctcggctcacctcctccagtgaggcctccaggaatttcatggcatagcgctcaatgggggtcagctgttctacgagggcagcaatttcctgctcagcccgggacatctcctcatcctcagccccaggccggccagcttcctctccctcaccagcaggaaacccatcgttctcattaaattctgcaagctcagccacctgttcagccttggcctgggtggctgcacggatatcctcttcatcttctgcccgacacaatgcctgctccagaatatgagtctgcttgctggccacagtctcttcctcctcttcaggggcagagggcacggatgagctagaaggttcctccaggggcatatcaaacagctctcggatggtctgctgtttgaaataggctgtggtgaagttgcctccctcaatggccatgtcccccaacattctcttctgatttgccttttttaggatgttctcctccactgtccgttcactgataagcctatatatgtggacatcccgggtctggccaattcggtgacagcggtcctgggcctgagcatccatggtgggattccagtcgctgtcataaaaaacaacagtgtctgctcctgtcaggttcacgcccacacccccactccgagttgaaaggatgaagcagaatatgcgtttgtctgcattgaaccgttccatcaaggcctgtctctgttcaactctagtagatccatccaggcgcaggtagagatggccatggtaggtgagaaactgctccaatacatccagcattcgggtcatctgggtgaagatgagcactcggtggccctctgccttgagctgccgcaacagcactgccaacgtctgcaactttccgcaatcatactggatgagtcttaagtcagggaactgggtgcgcatgttacacacaatacggtgcaaaggacgagcccggggccagagctcagaggccaattgctcctggaaggctgcctgacgtggggccagccaaggaggtgggtggcaggcatgcagggaagggggaggtgcctccacaggaggcatgacaaagatgaacctctcaatgatttctgacagctggtctagtcgctgctggggaaacagtacagcccggtgggcagcctcggtataagtccaaaaggtggggtggctggggccaggagaacgagggccgatggggctggcaacaggttggggcagggtacagaaatccaggacttcagtcccatacacaggtgccagggccccatgagcctcactaagttggaaaatccgttccaggcgttcagaccgctgccgcttccgcttttcctccagggagtccagataaaaaggggaacgaggtggtggggggggctggcgtcgaggccaggggccaccaaacgaggtagcagtggagggagggctggggggaccagagcgcaatgtcagtgtgtcaggctcatccttggaaacaggcagccgggataccatggtgacaggcaagggagcggcaccagatgccgaaaccacaagggaagatgcctgggaagctggggactgtgtggaggctggggccagcgccaaggtctgagctgcggccgggcccagggtaggaactggggcagggctcaaggtcagtgtctgcactgaagctggggccaggagtgaagcagatgacgatgctggagccaaagtcagcgtgtgagctggggctgggcccactggagaagctggagccagagggggtgctggagccagagacagcgtctgagttggacccagtggtggtcctggtgccaaagacagtgtctgggctggagttggtaccagggatgatgctggagttaatgacaatgtctgagttggaaagggtccctgggggttccccgttcccaaagagagtgtctgagatggagatgagcctccaagagtgggtgctaaagctggggctagggccagtgtctgcgtagaagccgggctcgggagaggtgacggaaccggggctggtagcatagtttgagttgatgatggagccaacacaggggttggagctggtaccggtgaagctgaggctaaagaggttcctggagtagacgatggagccataactggaaccggagtctgtgatgaagccaggacaggagcagcacctggcgatggtgccaggaccggaagaggagccagaggaggagctggatttggtgctgacggaaaaggactggccagagccgaagctggcaccaggacaggtgagcatgctggggccacggttgagttcaaccctggaacatgtgaagaggtgggagccaacaacagagggtgaccaggtgtctgagatgaagacagggatggagctgtggccaaacctagagtcaaggctgatgctgacggggantcaccagatggtgccaaggagggaggtccaggagccgctgggacaacaggtgccaatggtggagtcacactggtcaacagagctgggcccgaagcagaaacagtcaagggggctgagatggggatggtgagtggagccgaggctggggcaggaagtgtggtggggacagagatggggagtgaagatgacaatggaactgagactgtagaggacacaggactagcaaggggagaggatttgggaattggcattggagaagaggctggcccagggagtgaggatggcacgtggagaggagaagagatggtcaagggggcagctccgggggctgaagcactgacttcaggtgaagg

SEQ ID NO: 46577 - DNA, 427 bp, Homo sapiens
ggtcttaatgactaacacacctctaacatttcacctctagctcagatgagagagagaatgggacttcttggtactgattgtttttcccatgcctcaattggtttcttttagggagctacaaatttacgggttcactggtgattgatcttttcatccagcacaatggacagaagtctaaggaacgtccttgtggtttcctttgggttcctgcttctctttacagcctatggaggtctgcagagcctgcagagcagcctgtacagcgaggagggcctgggtgtcacagcgctcagcaccctctatggaggcatgctcctgtcctccatgttcctcccaccgctcctcatcgagaggctgggctgcaaggggaccatcatcctctccatgtgtggctacgtggccttctccgtgggcaacttcttcgcag

SEQ ID NO: 46578 - DNA, 435 bp, Homo sapiens
gggattacaggaatgagccactgcgtccagcctttcatacctcttttccctagctatacattttcctctggctatggctttccaaaaccctccaatcctgttcattcttttctctgtagtttttctgacttattccagggacttccctttctagattataatcttcttagtctgtaccatataatttgtcacctaattatctactgtttcactttctgttggtttcgtggacattaatcttctccccagccaactgatggtagtcatattataataactccccagattggtttgtgctctgcactttacaaatcactccactgtttaagacctgtctttttgcttatcatgcccacagctgctctgtgaggtgggacaggaggggattgttatctccatattattgtaaacaaattcaaagaaagcaggtgactt

SEQ ID NO: 46579 - DNA, 337 bp, Homo sapiens
gattgatgcaatccgtggatcttagttcagatttccccagttctgcttgttctcgtgtgtgtgtatgtagttctgtacagttgtgccacatgtgtaggtttatgtatccaccatcacattcaagatattttctgtgacagatacttttatatactccttgttctttttatttatttatttttttattttttgagatagagccttgctctgtcgggcgatcttggctcactgcaacctctgcctcccgggttgaagcgattcccctgcctcagcctcctgtgtagcggggaccatagcacccaccaccacggccgagccctatgcagtctcaaaaaaa

SEQ ID NO: 46580 - DNA, 686 bp, Homo sapiens; identical to SEQ ID NO: 919
  misc_feature (1)...(686): n = a,t,c or g

SEQ ID NO: 46581 - DNA, 2962 bp, Homo sapiens
gatttcaagataaattagaaaccaagtaaaatcagtgtatttttgctaggtacttaaaggactattttgtatcttttaaattatctgttcatcttttaacttgctcatatttataaccttttcatgatgaatgatattagaatacatgactaattatacagaataattttctttttaatttcatttataggagaacctttacaaatagatcacttggtttttgtagtccatgggattggaccagcttgtgatctccgctttcgaagcattgtacagtgtgttaatgattttcgcagtgtttccttgaacttgctacagacacattttaagaaagcccaagaaaatcagcagattgggagggtagaatttcttccagtcaactggcacagtcctttgcattctactggtgtggatgtagatctgcagcgaataaccctgcccagcattaaccgcctcaggcacttcaccaatgacacaattctggatgtcttcttctacaatagtcccacctactgtcagactattgtgggacacagttgcttcttgaaatggaaccgaatatacacacttttttctacagagggaaccctgatttcaaagggggtgtatccattgctggtcatagtttaggttcgcttatattgtttgatatcctaacaaatcagaaagattctttgggggatattgacagtgaaaaggattcgctaaatattgtaatggatcaaggagatacacctacactagaggaagatttgaagaaacttcagctctctgaattctttgatatctttgagaaggagaaagtagataaggaagctctggctttatgtacagaccgagatcttcaggaaataggaattcctttaggaccaagaaagaagatattaaactatttcagcaccagaaaaaactcaatgggtattaagagaccagccccgcagcctgcttcaggggcaaacatccccaaagaatctgagttctgcagtagcagtaatactagaaatggtgactatctggatgttggcattgggcaggtgtctgtgaaatacccccggctcatctataaaccagagatattctttgcctttggatctcccattggaatgttccttactgtccgaggactaaaaagaattgatcccaactacagatttccaacgtgcaaaggtttcttcaatatttatcacccttttgatcctgtggcctataggattgaaccaatggtggtcccaggagtggaatttgagccaatgctgatcccacatcataaaggcaggaagcggatgcacttagaactgagagagggcttgaccaggatgagtatggaccttaagaacaacttgctaggttcgctgcggatggcctggaagtcttttaccagagctccataccctgccttacaagcttcagaaacaccagaagaaactgaagcagaacctgaatcaacttcagagaagcctagtgatgttaacacagaagagacctctgtgggcagttaaagaagaagtcctgcctatcaatgtggggatgctgaatggaggccaacgcattgactatgtgctacaggagaagcctattgaaagttttaaatgagtatttatttgctttacaaagccatctatgctactgggagtctgaagatacagtattgctcgtcctcaaagagatctaccaaacccgggtatcttccttgatcagcctttacagtaaaaatgacccatctatggctgcttaatgtatccataatccacaaagcatatttaaaaggctcttggcacgggcagcattggttgagcaggtaggtttggctagggggaaatgtttaacttgttctgaaagaaaaacttatgtctgtagggtccaagaaacagctattccagagtcagtgtcagctgagtctggaacatatgaagtgaggtttacttctaagaacacaagtgactgcacactaattttgtcaaggcatcttttcactactttgctgtagatttttcttcttcattggcagtttgtcattgtctttgtagttctctttatgataatcctttatacttgctctcagattccacaggcctctgtttatagagtggcaaaggcaggcgagctgtggtttattgtttataaatttttttataaatgttatggtattcaaagccactgacatttaatatttactgaagccattccttagacagcagtggtctttatccctttctggaaagaaaaggaaaatgaagggtaattactgtcaccatggagattgtagaggtaaggttggggtataggtcaggcctggcctttctttgtcatctgcttatagtctagtgctaagtatgccactaagtttcagatatatggaatactttatttttttaaaggtatataaactctgagttattgagaattaagtattcactgtatattaaggggaagcttttgccaagttgtggtcttcaaatttatgtttactcttcctattggcagaataggtgctatttaagagtaaaccaaaggataagcagagggagtccctataaccaaagatggacagcatagccctggatagccagataaaccactctttgtattaagaaatgtttctttcctagtggtgaggggtgggtaactgtgaaagagctttatatcttgtctattcatggtattatagctgtatattcccaggatgataagcttgattgaaatcctgtatttagtcatatattatttgcgctgcttcatttgtatcatgtgcaatctctagaccaaccctatttttaaactctggtacagcatcattttgtacatattcccagctgcagaactagtatcacttatctcagcaaaagagattgtttgcatggaaagattaatagcactgattagatttctaatattttgcatttttgaaatgtttgttttctacgtgattatatttaaaactttagtaaatactaacatgaaa

SEQ ID NO: 46582 - DNA, 4429 bp, Homo sapiens
tgacatgattacgaatttaatacgactcactatagggaatttggccctcgaggccaagaattcggcacgagggccatgtggggctgacgtgcgaaaccttagagccgggggatacgtccgtcatcgagaacgttttcctggactgccctgggctgcaggtggacgtgacgaggtcattcgatgcctgaccgtctgcacagcctgtggtgaagaccacccgggctctctctgtcccctccctggccccttcttctaagcttgcagctgccacagaaaatcttctaagcttgcagctgccacagaaaacacccgattaaaaactttttatttcagcaaaataaacgtgcctgtgaaagaaccacacggtggcttccgagagaccccactgtgtacctgagccccaggtggccacacctggtgttctggaaaagggagtccagggccagtattcaggccctgctgtactgcaccctggaaactgcaccaaaccccagctccgcccccatccacggctcccagaatggtttctggagtccctgcaacagacctgtgaggagagggcagggcagggcctgcctcctgcgtccccgtgatgacctgggggatgcactgggcagggacagcttcctccatccacacagccctgtgggcaccaacaaggccactgtgacttcacacgacagcagtgttccccagctcagctgagccggggtgcaggggacagcacagggcacagtcctgtgccgcaaggccctcgtgctcctggaagcctctgggaggaggcgcccgctggtgggacgtcgaagtccaggcgctctcggcagcgaccccaggacggcgcacctaagctatgccgtggtgcaggggacgtgctggagggacaggagcaggcgagagagaagccacctgtggtcccagccccaccccagctcacacgaattccggctgcctttccctgcaggagcccagcgtcatccgcccgccacggagcctcatggggggcagtggggcctgcagcacgttgttggactggttggtgttgaatcctgagagctgctgggccgggccgtcctcgtccccgtccccgtcctcccgggctgtggcctccagctgctcctcactgccgctgtggctgccagaagccacctctaggctggcctcgctctgctgctgctccaggaagctgaggtggcccagggcactggcctccgatgaggacagcagctcggaggcctcctctaggtccgagtccgaatcgttggacacaactcgggattctctgcacccgtccgccgccgcctcctgcagcgggtagaccaccgcctcgcccgcctccaggtacggcacctggacgactacctcagctcgctggttggatgactcgtcctggcccccgggggtctcctccggctcctcctcgaagaccaggccgtagtggacgatgagagtctcgatgacgcgggcctgatggggataatccaccagggaggagagggacacggtggcctcggtgggccgtggccgaagcagcgtgggcccgaacacgatgcccaggttcccgggggtcatcttgttgtcctgctccacctccacgatcctgcgtaggtgacgcagcaggtactgcagcgaggcccggttctcaggcggcaggtcccgcaggagctcccgcagccgacctgccagggccaccgccactgcctcgctctccgagccgtcctgccggccccgggacgccgccttggcctcggcctctgccttcaggctgtccttggccagccctacgagctcgtggtagaggcggaaggagatgagcggctcgggaagctgacgcaggtagagcttgaggacgttgctgatgtcgtggggcgaggcctgcgacagctcgaccagctccttgccgttctcgaaggcctggcacagcttctccacgcgtgtctttaccccattgacccggtagatgcccttggtgcgcagcgcccgccgctcgatctcgcagacgcacttcttgacgatgaagggcacgccgtcgggggcgctgcgggccgcgtggctgaagtcctggccgaacagctgcaggcggccttgcagcttcttgtgcccgcactgtatggccagcgtctccagacatttcttgtggcaggccaggcagcactcttcacactcagcaccctggaagtagacgtagctgttgcactcgcggcacttggcgggcgtgcggagcttccggagccggtgagtacgggccgccttggacagcccctcgtggcggaacggtccactgggcacggccaccggcagctcgggggtcatgccgttgaggtcagcctgctcaaaggctgaagccccggctccaccgtctgggtccaccagctcctccgtggacgacatggtaccactggatgacgtccgctcgaacttcttaaagtcccctgcgccagggccggggtccagcccactgtccgagtctgagatcgagagcggccatgacttgtgaacctggtgtcctcgcccggccctgtggtccttggcaggtgtgccctcagtgcacccgccttcttctggggggctcccggcagcctccggccgcgccacatcactcacgttgaagctgctcttccgggcacgcatgacgggggaccaggcgttggcggagacgtggggctcaaagtcgtagtgcacatcgggctcctggtcccgctgcagctggcgcacgtgggaggcgtactgctggcctgggtcatacagcttgctgctctcacacagcatctggaagtgcacgggcagcggcgccgtctgcatatgcatcatctggtagtaggagatcgtggccgacttgatggtttggtcgctctgccggatgacctcctggatctgccgcagcgccgtcaccttggtatcctccagctcctgcttctgcgtcttcgcgtcggccacgcaggtgcggtaggtggccatagcttcctccgccttgttcttggcctcctcctccagccgccgccgcttgtccagggtcttggtggccgtgctgcctgctcccggcgcgctgccagcctgctcctcctccgccttggccacgaggaagcgagccttgtcgtggtcctcgcagcgctgcacgtaaccctgcttggccttgcgcaggttggactccgcctcttgcagcttcctctgggcacggtgccaggcctccttgatctccttcctgcgcttctcgtgttcaagccgccgcagggtcaggggctgcatgaaggtctgggtctgcaaggtgcccaccgcctgcaccatgctgtggccgaactccaggtcctgctccagggccagcgagtagatggacaggagcggcatgtggggctcctgcatgacgctctgtctgcagttgtgagcgatcttctgcaggcccttggcaaactccatctccagcgtcgtccgcttctccaggtagctgatgaggtccttcatgtacttggccatgttcttggcatacagcagtgcggcatccacgcccccctcacagcgctgtagcagcacgtccacctcctcggcgggcaggcagccggcgtcacagtcttccaggctgggaggcgtgccctcactgcccggtccatacaggctttccatggactggctcgagtccccaggaggcactgctaggagggtgctgctgtccacttcacccatgaggaactcggacactgtgctactgaaggccacagcaatcgtctccagggccttctcgaactcctgtttctccagatcattgttgctctcataatggaaggctttgaccttggcaatgagggtgccggctgcggtgagcgtctccacggtgttcagcagcgggtacttggagatgatctgatgcatgacacgcagagcctcacccaggcactcgtgggcccgcgggcggcgggcctcaaggaggtcgtcacgcaacacacactccttaagtttctcaaggccctcagcgaagcgggccacgtccgccagcagatgggagatgtcctcgacgacgtccgggccggcaccctcggtgggcagctcgcccgggctggcggctgtcagtgggctccggtggctccggcccagtgtccaggaggcagcacccgacagggggaagccagccgcgctggcgtggcggctcaggctggtgggccgcttgagggtccctgtggccttgacgccggaggacccagcgggcggctccaggcttggtccggggaacaccgcgtcagccccatccttcctgggcagctcccccgagggctgcgggctggggcttcccgcgcggttctttttcgagatggaaggggttttcatgagctctcgtttcttcctggagaacatgatggggccccggccgggagcccgagggggcgggctgggggtctcagcgctgcagctcccggcgctggccgcttcgggaccacattgt

SEQ ID NO: 46583 - DNA, 5367 bp, Homo sapiens
ggccggctgggcgcgggcgactgctggcgaggcgcgtgggaccttacgctggttccccttcgtctcctctcccggcccgggccactagagagttcgctgacgccgggtgagctgagcctgccgccaagatgccggcctattttcagaggccggaaaatgccctcaaacgcgccaacgaatttcttgaggttggcaaaaagcagcctgctctggatgttctttatgatgttatgaaaagtaaaaaacatagaacatggcaaaagatacacgaaccaattatgttgaaatacttggaactttgcgtggatcttcgcaagagccacttggcaaaggaggggttataccagtataagaacatttgtcaacaggtgaacataaaatctctggaggatgttgttagggcatatttgaaaatggcagaggaaaaaactgaagctgctaaagaagaatctcagcagatggtcttagatatagaggatctagataatattcaaactcctgagagtgttctcctaagtgctgtaagtggtgaagacactcaggatcgtactgacagattacttttaactccatgggttaaattcctgtgggagtcttacaggcagtgtttggaccttcttagaaacaattctagagtagagcgcctgtaccatgatattgcccagcaagctttcaaattctgcctccaatacacgcgtaaggctgaattccgtaaactgtgtgacaatttgagaatgcacttatcgcagattcagcgccaccataaccaaagtacggcaatcaatcttaataatccagagagccagtccatgcatttggaaaccagacttgttcagctggacagtgctatcagcatggaattgtggcaggaagcattcaaagctgtggaagatattcacgggctattctccttgtctaaaaaaccacctaaacctcagttgatggcaaattactataacaaagtctcaactgtgttttggaaatctggaaatgctctttttcatgcatctacactccatcgtctttaccatctctctagagaaatgagaaagaatctcacacaagacgagatgcaaagaatgtctactagagtccttttagccactctttccatccctattactcctgagcgtacggatattgctcgacttctggatatggatggcattatagttgaaaaacagcgtcgccttgcaacactactaggtcttcaagccccaccgacacgaattggccttattaatgatatggtcagatttaatgtactacaatatgttgtcccagaagtgaaagacctttacaattggcttgaagtagaatttaacccattaaaactctgtgagcgagtcacaaaggttctaaattgggttagggaacaacctgaaaaggaaccggaattgcagcagtatgtgccacaactgcaaaacaacaccatcctccgccttctgcagcaggtgtcacagatttatcagagcattgagttttctcgtttgacttctttggttccttttgttgatgctttccaactggaacgggccatagtagatgcagccaggcattgcgacttgcaggttcgtattgatcacacttctcggaccctgagttttggatctgatttgaattatgctactcgagaagatgctccgattggtcctcatttgcaaagcatgccttcagagcagataagaaaccagctgacagccatgtcctcagtacttgcaaaagcacttgaagtcattaaaccagctcatatactgcaagagaaagaagaacagcatcagttggctgtcactgcataccttaaaaattcacgaaaagagcaccagcggatcctggctcgccgccagacaattgaggagagaaaagagcgccttgagagtctgaatattcagcgtgagaaagaagaattggaacagagggaagctgaactccagaaagtgcggaaggctgaggaagagaggctgcgccaggaagcaaaggagagagagaaggagcgtatcttacaggaacatgaacaaatcaaaaagaaaactgtccgagagcgtttggagcagatcaagaaaacagaactgggtgccaaagcattcaaagatattgatattgaagaccttgaggaattggatccagattttatcatggctaaacaggttgaacaactggagaaagaaaagaaagaacttcaagaacgcctaaagaatcaagaaaagaagattgactattttgaaagagccaaacgtttggaagaaattcctttgataaagagcgcttacgaggaacagagaattaaagacatggatctgtgggagcaacaagaggaagaaagaattactacaatgcagctagaacgtgaaaaggctcttgaacataagaatcgaatgtcacgaatgcttgaagacagagatttattcgtaatgcgactcaaagctgcacggcagtctgtttatgaggaaaaacttaaacagtttgaagagcgattagcagaagaaaggcataatcgattggaagaacggaaaaggcagcgtaaagaagaacgcaggataacatactatagagaaaaagaagaggaggagcagagaagggcagaagaacaaatgctaaaagagcgggaagagagagagcgcgccgaacgagcaaaacgcgaggaagagctacgagagtatcaggagcgggtgaagaaattagaagaagtggaaaggaaaaaacgccaaagggagttggaaattgaagaacgagaacggcgtagagaggaagagagaagacttggcgatagttccctttctagaaaggactctcgttggggagatagagattcagaaggcacctggagaaaaggacctgaagcagattctgagtggagaagaggcccgccagagaaggagtggagacgtggagaagggcgagatgaggacaggtctcatagaagagatgaagagcggccccggcgtctgggggatgatgaagatagagagccctctcttagaccagacgatgatcgggttccccggcgtggcatggatgatgacagaggccctagacgtggtcctgaggaagataggttctctcgtcgtggggcagacgatgaccggccttcctggcgtaacacagatgatgacaggcctcccagacgaattgccgatgaagacaggggaaactggcgtcatgcggatgatgacagaccacctagacgaggactggatgaggacagaggaagctggcgaacagctgatgaggacagaggaccaagacgtgggatggatgatgaccgggggccgaggcgaggaggcgctgatgatgagcgatcatcctggcgtaatgctgatgatgaccggggtccccaggcgagggttggatgatgatcggggtcccaggcgaggcatggatgatgaccggggtcccaggcgaggcatggatgatgaccggggtcccaggcgaggcatggatgatgaccggggtcccaggcgagggttggatgatgatcgaggaccttggaggaacgccgatgatgacagaattcccaggcgtggtgcagaggatgacaggggcccttggagaaacatggatgatgatcgcctttcaagacgtgctgatgatgatcggtttcccagacggggtgatgactcaagacctggtccttggagaccattagtcaagccaggtggatggagagagaaagaaaaagccagagaggagagctggggtccacctcgagaatcaaggccatcagaagaacgtgaatgggacagagaaaaagaaagggacagagataatcaagatcgggaggagaatgacaaggaccctgagagagaaagggacagagagagagatgtggatcgagaggatcgcttcagaagacctagggatgaaggtggctggagaagaggaccagctgaggaatcttcaagctggagagactcaagtcgccgggacgatagggatagggatgaccgtcgccgtgagagggatgaccggcgtgatctaagagaaagacgagatctaagagacgacagggaccgaagaggacctccactcagatcagaacgtgaagaagtaagttcttggagacgtgctgatgacaggaaagatgaccgggtggaagagcgggaccctcctcgtcgagttcctcccccagctctttcaagagaccgagaaagagaccgagaccgagaaagagaaggtgaaaaagagaaggcctcatggagagctgagaaagatagggaatctctccgtcgtactaaaaatgagactgatgaagatggatggaccacagtacgacgttaagtctcaagataatggatttaaactggtgtcttaaataggtttgatcacattcaaggattattatacttgtgcttcaaccaatctaaattggattctttaatgttgtttcaccataacacaaaaagcatgaacttgtattaatcctatataatagattgatcatgcaccatatccacaggaggttggaaaaaccatgccattttctggaatttaagggtgttgcattatttcatcaatcatttgttgacaaaaaagaaaaactaaaaaataaatttaaaatgtgaaccttcaggtattgagtaacacctttatcttggtatagaactgatacttttttttgattttgaaatatctgataataatttggaatgaagtaaggttctgttaaaatatatttgaagaccctttaaagcagtgaatctgaaacaattttcacacccttaagtggttgatacgtacctattttaggtattttgaggtatttaccataaactaaatttagaaattttttagattcacttgaagtaaacattacaaacattggatacggtggggttttctttagattttacttgagagaaggtgagtacaaagcaatttgcagttgttgtaatgacaagattactgcgcaagtgtgaatccaaacagtatagcttttaaattttaaagcatttggtaaattatcgctgagtttttttctgttgccaatagcaaactgcttttccattaatggagaattcatgcctttcaagcattttaaatatgacaatatttataaatgtatggtttggaggaatcgtttaaattctctttcctaattttctttcttttgaagatagattctttcaacaagtaatttgtagtaatgactgtgttgacttcaattttggagcgcagtagctatgttaaagatgaactatttggtctcattgaagccaacacagaacttgctgctgtgttttttcttcagtgataaataaaatacttacagaatttgttttagtgttgatttgtggttatagtattttgtttaataatggtaagtttgccatattcagttggaggtttttttttacttgaatttttaat

SEQ ID NO: 46584 - DNA, 914 bp, Homo sapiens
tttttttttttcttgtgcaaatataaagaggtttattcattctgtcattaggatacaaaatagaacatgtaaaaggcacccctcccgtcgaccccacagttcagtgtgaacaccgagcgctcgtccagggaaggctgccatgcacggcgtggctcccggtgaaggcagccggcttgagccagcctcaggtctcgaacatggcacagctggtgcacagcactttctcgtacatgtcactgcagctgcgacacgtacagggaggggagagaaaagctgctgtcaggggctgaattgtgtccaccaccccccaccattcaaacgtcaaagtcctgaacccagaacaccttcagggacatgaccttatctgggagacaggatcactgcgggcatcatcagtctagatgacggcactgacatgggggccctaaggcaacacgaccagcgtcctaaaaagactacgtgaagagaaggacacagagaaaggaagacgacatgaagatacagggagggggcagctgtctacagggaacaccaaagataaccagcagatgccaggagagaggccaggacaggttttccattgcagcctcagaaggaaccagccctgccagcaccttcctctcagacttctggtctccaaagccacgtggcagtacctctttgctgtctatgccactgggtctgcgaactcagttacagcagccctagctgattcccactgccgatcaatccacatggggcccaacctgggtttccagtaggatagaagctctccaaagaaacctccagatgacctgccagaattcaccgaaccacaatggtttacactgaagcacatcaaacagtgcttttctgatatatcaagactaagggtagggccgggcatggtggctcacgcgtatggtgtggcttac

SEQ ID NO: 46585 - DNA, 574 bp, Homo sapiens
tacgaatttaatacgactcactatagggaatttggccctcgaggccaagaattcggcacgagaaaataactaatgcatgctgggcttaatacctatgtgatgggttgataggtgcagcaaaccaccctggcacatgtttatcaatgtaacaaacctgcacatcctgcacaggtactccaaaactaaaagtaaaaaaatctaaaagaaaaaaaaaaagaattaaacccaaaatcactaccccatctggacttgatttagatgaaaagcttctggactttgagctgatgctatagtgggttgaaaattttggggtcctcagaaggggatgaggatatattgcatgagagagcaacatgaatcattgagagccagaatatagagagtggtaggtagactgtaggagagccctcaatgatcccggctttcttgtattcgcgttgcacttacttgtataatatggcagatgggatgtgatgtcactttcaagattaggttataaatagactatggcttcaatcagagggttttctctctgctagctctcttttgggtagttcattctgaggaaagccag

SEQ ID NO: 46586 - DNA, 1590 bp, Homo sapiens
  misc_feature (1)...(1590): n = a,t,c or g
tttttttttttttggtttccaaagtttattaaaaatcaaagaatagaaaaactttacataaaaatatgtcaattttagcttccatattgttgtccacacacaaaaaaatcgaaacatgatatctttttgtcaaacctgtagcacgcgaccacagtggtagccaggccaattcatttgcttcaccatgacggaaatggaacatggtacctgtgtctatgaatcgagttttaaaatgcacaccccacgggacacgcactgccagacccgtagtggtttccttaatgtgggtttacagtcaatattgctaatgcgtagagattagtacaggcctacagatcagtttttataaatattctttatcaataggttcacaatttaaatattttaaatatttttgataactttcggtcatcgagaactgcagacacagtgtgctactctattctggaatgcctcctagagaacctgcagtcgcagctgacagctcccaatgacagagtgagccagtcctgcttcaaaagggcagaccgcagacattttaaagcttgtccttgctgggcgtcgatcacattcagagatcaatctagaactccccactgctgcacatgcatcagatgtcatggtaataagtatcttgtcttgacattctccactagtggacttcaaagaccaacctacctgtagtgtttagcaagaccagacccccgttttaaaaacaggaagtcagatggcctacaagatgcaaccaactcccaggacaactgtggtgctccaaaaactcagggttaggcaggatggatatattcttgttcaaaaaaaggtaacaaagacagtggttgttgtggcagaatacacttgcatagtatacctgtatgcttccgacgtcgggcgccagcggtcccggccccaacgctgggctgtgctctcctgcgacacgatccgttaaaacactccccacggcgcactgggcagctgaagcacttctcctagatttgctcttaacagaacgaatgcatacgctacagattcctcaacggaatcaacagaattcctttctccacattcctaaaactgggtaccacggtccgcaataatagtcaccagacccatcatcacaggctatgtcactaaaactgaccgaagcgttttccagttcacattttcctaaagattttataatgtgacaacccttctctccttagaaagttatacttctggcacttgaaatgctggatttgttgtccagtttaaaagaagtgaaaaccaaaacattaaaactctgtggtcagagcaggacaacggcctggggcccgacagcagggccacgggcagtctgcccaggtggctctggagccaagccctttggaaaaccttcagggcgacctggctccttcactcacttccgaccaaaagaaaagacatcaaaataaaaccccaaacccctcatcatggtgtttgtaacgatgctcgtcagacaaccagccggacacgatggccccaacttagaaaatgcagctcgggcaanggccctaagcttgtttaaaaaaaattccctccctccccttaaatataacttatgtgaaaatagga

SEQ ID NO: 46587 - DNA, 873 bp, Homo sapiens; identical to SEQ ID NO: 928

SEQ ID NO: 46588 - DNA, 1924 bp, Homo sapiens
ttttttcaaaatatattagatttggtttttattgtagagcacacatatcagggcgaagtgctgcacacacaactacaaatcatttttgggaaaaaagctgtaaaaaaaataaaactgcaactgctttaattatgcagtcccgacttgagaaatccacgctggcaaaggagttctggcccctgagaggggcttcttgatggtggctgccccagatttctgcagcctatgaggtctcagacccggacctctgtacacaaagcccccaaagtggtggtatcctggttgctgggagggcctctgctcttggcaagcccgggtcctggcctggctgacaagaagacattcctaatgaatctagatccacaaaaccttgctgccttccaggatctgagtggatagaagctaccaaagactttaccttttttttcttattattttttgaaagccccttcaccaactcccataccctgaagcggaggaggcaccagcccagtctgcaggcctgagctctggccttggatgcatgctgccggcagacaagatggggcaggcgccttcctagaaggatgacatgaggatgaggcccaagctggccagtggagaagggaagggaaaggaaaaagccaggagactaaagggggaaaaaaaactcaaaaaagaaaacaaaaaccctaccacacaccacaacaattttccataccccaaatgctagacttggaaggacaccagtccctctagctagaaacaatttctaaaactgacccaacgtggcaagtctaactgttccaaataatcacacggcatatgctcaaaaggagcaaccagcaaagaagtgtgctcttgataagagaggtcaggaccactgcactagcccctcagcagcccaaggaactgtggaacatggccaggctagtgggcgtgggtggaggacgcctggggggcttaacaatagctttgggatggcaggggctggcactgtttaagcccctgcccaggcaacctgaacaactctgccgcaggaggaagaaagggtgtttgcatgagcttgcagggcgtggatggcaggtgagaagtggagaacagcagagcctgtgaggctccaggagacctcaaccaagtgcagacatcagtgagggaaaggggcgagcagaagactgaactttgtttagaacactgcgaagatttacactgaaagcaaaataattttcttaaccaaaacattttgttgcttttaaataaacccagcctgatacagccccacttaaaagatggctgctctgctccaccacctctactggccactccagcatcagcctctgtcccctattgatgccaacagcctttccatccaggaggaataccaagaatatgagaacctaggtcctggccaattctattcttcagccttaacaggcaacaaaaccaaggaaaaatatatagaatcaaaaaaaacaaaaaacagaaaacaaaaaccccccaatgaacaaaaacaaaaccctcaaaacaaaaggaggggcaactacgtaaggatgagccagagttcccaggagggcggcgggtagactcagtgccgccgcatcttcacctttcggggcagggctgcctgctgcctcagagcagtcctctgaggactcgtatgacttgcgccagtagttctcagagctgaagctacccctccgccggtgtgtgggcagcagcaccgagcgccggttctcttccttgtccatctccaggatccgtggcctgtgggcagcatcagggtctgccttgcggtgggaccgcttgggtttcagagcagggtccctgttgtttcctgacaggcgatctgaagcatagctgggtggtaacacggagctgctcagggactttgtttccaaccggggtgcatctaatcttgtcttcctgaggatgatgactgctcggc

SEQ ID NO: 46589 - DNA, 1888 bp, Homo sapiens
  misc_feature (1)...(1888): n = a,t,c or g
ggtcgactttttttttttttttttttgacattatgggactttagtgaatgttattctaagtctcgaaaatttagatgtctgtttagactaaaattttgccaaaaacaaatccaaagtgaaaaagtagcaattttagtagacattaacaaacattatgcagatatagatacacatatgaataatgcaagagatttacagaaatgtagttttggcacttttacttggattttttaaagaaagtgaatacaaatatctttgtacacaaattctcattctggagaaacaggatgtagaattcaaaggtgccaacatctcccttcttaaaaataacattgaaacgggtaactgtacctgttaaatctcctggttggcaacttttaaaatctggcttccacctaactccacaaatttgacaaagttatttttgtttgtgtaagtgatactggttatccacttccagtacatgtaccatttggccagaggtccataaataatattaacattttcaatgtagaaatcttgaagttctaaagggaaatattgctcagtagataaattctcctggaatttcttgtagcaaaggttcctcaaatttaaatcgtttggaaatggccttttgctccattttctctttttcagactgtctgcattgtcctagagtatatgaagtaactacaattaactcttcggttacaatggattcctcggtttctgatttgtcggtatccgaattaatttcaggcacagaatgaccttcttggagggcatttgcttcttctagtgccttttccatcctgaaagaaggctcttgaatactgctctgtgtcaacccaggggtgctttagacattccttccagcagtggctcgatcttcaggtttcttaactaaaagtgtcctgatgaaatcaacagccgactcagacaaaacatcaaattcttcctcagaataacttaaattcatctgtgagatgtttaagaatgtttcttgtttatcattgcctaagaaaggtgatattcctgtaagcatgacatatgttaacactccaatgctccacatatctgttgccatgcttataggatcataactaagaatttcaggagccacatattcaggggtaccccataatttctcggagctcttcactgttcttcaatattcttgaaaggccaaaatcaacaatcttaatgtcacccaatggagattcacttgtcaacagaatattctgaggcttcaaatcaagatgaactacatcacgagtgtgtaaaaagtgaacaccttctaaaatctgtcgcataagtctttgaacatctttttctttaaaggcttcttctctgtctgcaacacactggtcaaagatttcacccccagcagcatattccagaactaagatcatttctgatgcagtctcataaacttcatgtaaattaatgacccaaggattgtcttgtgctagttcaagtacagcaatctcatgaattatttccatccgacaatcttggccttttcttctttttctcatgaactttgcagcaaattctttcccagaatcttttctttatacattttctaaccactgaaaatttcccccctgcccagcttccggcccggggcacaggctgtagccgtcctggaagggctcggtgcgcaccacggcgcgtatctctgtcaagcancccgcgggnctggggcnggcggcntgcgcgcacggcccgctcaggagccnccgctgcnccggcccgagcctgaggtggcgcctggggacggagccgccgctgcctggcttctccaaagggatcatggtgttcaggcccgcttctttcctggccgcctgttcactccgagcagccggacgtcacgganctcngcccggctcctagtgccggtccg

SEQ ID NO: 46590 - DNA, 3445 bp, Homo sapiens
ccatcctaatacgactcactatagggctcgagcggccgcccgggcaggtgccgcggcttgttcttcttaaaatggcgccgctagacctggacaagtatgtggaaatagcgcggctgtgcaagtacctgccagagaacgacctgaagcggctatgtgactacgtttgtgacctcctcttagaagagtcaaatgttcagccagtatcaacaccagtaacagtgtgtggagatatccatggacagttttatgacctttgtgaactgttcagaactggaggtcaggttcctgacacaaactacatatttatgggtgattttgtagacagaggttactatagtttggagaccttcacttaccttcttgcattaaaggctaaatggcctgatcgtattacacttttgcgaggaaatcatgagagtagacagataacacaggtctatggattttatgatgagtgccaaaccaaatatggaaatgctaatgcctggagatactgtaccaaagtttttgacatgctcacagtagcagctttaatagatgagcagattttgtgtgtccatggtggtttatctcctgatatcaaaacactggatcaaattcgaaccatcgaacggaatcaggaaattcctcataaaggagcattttgtgatctggtttggtcagatcctgaagatgtggatacctgggctatcagtccccgaggagcaggttggctttttggagcaaaggtcacaaatgagtttgttcatatcaacaacttaaaactcatctgcagagcacatcaactagtgcacgaaggctataaatttatgtttgatgagaagctggtgacagtatggtctgctcctaattactgctatcgttgtggaaatattgcttcgatcatggtcttcaaagatgtaaatacaagagaaccaaagttattccgggcagttccagattcagaacgtgttattcctcccagaacgacaacgccatatttcctttgaggccttcgcccatcctgctgacccatttttctgccctcttcttaccccaattttcttgtattaccctctacaatatactttttattgagcactttgctgctgaaatgctgcctcttgcctttttttttttaaattttaaattatctaaatttattgtttgttgtggtgtctatagcaaagtttttctatcaattttcccccatcccatccccaccctggactcatttgagaagacttgagaaatgtcttaatactcacactgctgcatgtagctcttgcttatttactggtctgggaaacaggatgtgtttcctttttttaaaagccaattgacagattacacctaaatactcctccttttgtatcattcagccttttgttttagtttggtaagttttaagaaatttcagcagcaaagttgttattcagtgggcacgatggactccaaatgcctcaagttatgtatacctgtcccagatgtaaacttcattgtcctttgttggatgatattttaaatggatataaaataaattggtctaaagggctgccctccttgttgtgtttttaaattttagttaaaaactgctacagcttatgactttgtactttaagataattgtattgatcttttttcagattccttgtattttttaataaagtaatcttaaataaaactcagataggttaagtgttagaaattttaaacagcttacattgttagcgtaaagttatcttttcttttttcctaatcagagttcttgaccctttggttattgagtttaaaacttcaattgaaattcaatagtatttattttttaaaaaaatcactaaactgtgcctaaagaacataactgccatattaatgttttggtttatatcctctatagtaatagaaaaacatttaatacttgtaatgctgatgtgttaatttgataccagttgagtagaatgtgatcaatccagtttacaatctatccatgagtattattaactaaaatctatgtgcttttcaatagggatccattcttctcttggctgtaacacttgaccttaacttttagaaagtgttcatttttaaactgcaactggaaaggttgaaaagttaggactcttgtatttgtgaactgtaatctgaagcagattatttaaagtgtagaaaaagaaacaagttcttcttttttgcaaaggtctgtgataccatatttcagctttgtgtaagtaatttgaatatccaaagggttgtgatgatcagttctgaatatgcaactgtccacttaataaggacaagtattccagtatctcttatgactgtagtcataaatgatgttggaatgtacattttgtgaaatagttggtatccctttactatgattaatttttgttattccaggaaatacttgtgaagccagccaattaataaagcactttagcatctgttcaggtagttttgaaaacccacttttccccttcaggataagaacttccaggttacctaaaaatgcaataaaaatctttatagtctaagcttcttggcatataatttttcatcagggttttcttttattaattgagcacaatactgttttgatttaatttttttccctcaaaccacccagctccttacatagtttttaattatatagctatatgaaagaggtggctaagacatttgctgcacacacttgaactaatgttgggtcagtagcttcgtgttactgccctgatcccagtgtaattcaggtggaaaggtatttttatctcacagggatatgtagctatgtattttactaattgtgaaacactggaaattaatgatgcagacaacttggtgtggtctttgaacagctctctgcagtatttttttttttcctgttaccataaattgtatttaagtgcttgctttccacttaagttgtactaatagaaccggtaactcccagccctccctgtttgacactccttagcttaaattgatgtagttgtttttgttatccctataatgtgacttttatttttaagtcattgtgtactgcatttgtttgtcactagttgggcacgtgccaataatattctctccattccttatctgccatctctgttttgcctgatttctcttcaactgaataatggctttttgcatggaaaaaatagtttttactattagacgtgtaaagggaagagagagctaatgtattggactttgtgagcctacaaggaatattttggatccctccaataaataagggctatgtactatatgtactatatagagttatcatgtggtggaagatacttgcaagtcatagatttatgggcaggaggatttgttactccctatatctaggctgaatgtaaaatcccttatgttgtatcaatgggggtaaaaactatttttatttgcctatgatatacttggtttctaataaagtgccctaggctctagtgagaaaaaaaaa

SEQ ID NO: 46591 - DNA, 1225 bp, Homo sapiens
taaactccaaagccaaggttttttattactggtcaaaaggtgctcgctaacaaaacagtgttggggagaggtacattccacagctctgtaggagccctagtggggcatcctgcccccaccccgccccgccctctccagtgggcattgtaaggcatttcacacattggtgttttcactttttttttttatatatataaaaacaaaaccagtcctggagtagaaagaaagaccctgtgatgaacttttaggactaaactgaaatggaaaggattggagtgtgggattctgaggggctgggtcagtggccatggtggtccagccccccatggttggcagaagccgctggaagggggcatgaggagagggaagggcacagctcacatgagggccaaactcagacaggtgcacccgtcttcatcattttttcacttttacatactgtagaaatttaagcaaaatagctattttatatatatttatatatctcatatatatatatataaattaggcaaataaagagttcaggggacactgagatggggcacccctaggggcctcctaggatgaggagggatgcaaggtctctggtgcccaggtcaccagcccaggctgggccaagggtttgttcattattgctgatttggggcctgggtctcagggcggggagcacctgcaggccctgccttccagcccttcctggcctcttggggctagggagccacccaggctggctagggtgaggccagggactgctgccctcaaatccacatgggggttaccatcagtaccccctcctgcatctgtggatgggagctccagaaactctgtgctctgctggggctggggcagcccccttctgttttgggctctgtggggccttggcaggtgggggtgtgggcagctcagataccatcgaggacttgatatgttgagctacaaaattctcccaactcaaagcggtctggcttcctgatgtcttaaaaataaggggctcttgcccaggacacttttgtggcaagaaagcacacttggaaagctgtctgctaagtgcggtactaaaaatatttactaaacatcatggctggaaagaaatggagatcatttttctaaaaaagtcgaagaggctccctaggaggggccagttcctccctgggttgggggctggtgatttcgcacccattggcccggcagccgccctgagttgtggtaactggggcaggggttc

SEQ ID NO: 46592 - DNA, 344 bp, Homo sapiens; identical to SEQ ID NO: 17517

SEQ ID NO: 46593 - DNA, 1109 bp, Homo sapiens
  misc_feature (1)...(1109): n = a,t,c or g
tctcccctccttgaagaagccgcggacacgggaaacccacggcgggcaagggcccagctgtgtgctcctttcctgtcatggcatctgctgatttgaaactccatgacgaacacgttgaactaaacatttttatttaaatttgtatcatgttcatagttgctctcttgttgagagagtcatctgtcctgtttgttaggggtattttttcttgttaaaatgtatctcctgttgaatactcgggaaattcaaagggaagtgtggtcagcacacactgagcgttcttttctggagaggccggttttagcctcgtacctttagcaggaccgatagcgggtggaagggcccgtgtgctggatgggggtgtcgcctcctggatggcacaccctcccgagggacatccagacaggctgtgtcaccctccagcactttatgtgcctgctctgaggtgtcctgaacacacagcaacggcctctccttcatcacaggccggggattccttttgtgtttctgtataacatcgatgacgagctgaagctgttgtcacttcactgccctctttggaatttcttcattgtgctgactgattctattaggggctaacaataaaggcagtctacccactactatcatgcttgggaaacaagcgtcagcttgtacatatgacaagagaggaccctgaatanaccctctcttcatcagcccaagccttactgaggtgggatgaagacctcattctctgttctttaaaacatgtttcgtgaactaatattggtccatgtattttttgtccttttgggactctaagtgggtcaagaagcaaaaacatccatgtgttgtttggggggaattggcaccattttttcctgactatgtttcaattaactaaagaataaatgatgaagaaattctccttgtagcacaactgtatgctgtgtaaattggtgtgagctcaaagcccagtcatgtgttttacctgtgggtgactctgttgtagaatggtcatattactgcatatgttatcatgacaacttgtgagtttgagtttatatttctcaaagaacaagttacccgtatatgcaacattgcgccattaaaagcttatttctctg

SEQ ID NO: 46594 - DNA, 1252 bp, Homo sapiens
  misc_feature (1)...(1252): n = a,t,c or g
tcaccccacaaagacattttggagtgtttggtaaaggcttgtttcttttcagtgattgctggaagcagatgggatcaaataaaaatagaacattgtgggctcccaaggctgaggtggagctggaggacgccggcagggttgtggcgcagcagtcttccttgtgcacatgcctgaagtccgcgtgggtgtttgaggaagtggggatacagcatttaatgaaaaatttatgcttaagaagtagaaaatggcagtcttcctagataattttcaatggccagaatgtgaatgtattgacgagtgagagaagaaatgttgtggcgtctgttgtgacaggtatattgttttttacaggctggtggataatgattgatgcagctgtggtgtatcctaagccagaacagttgaaccatgcctttcacacatgtggtgtattttccacattggctttcttcatgataaatgctgtatccaatgctcaggtgagaggtgatagctatgaaagcggctgtttaggaagaacaggtgctcgagtttggcttttcattggtttcatgttgatgtttgggtcacttattgcttccatgtggattctttttggtgcatatgttaccccaaaatactgatgtttatccgggactagctgtgttttttcaaaatgcacttatattttttagcactctgatctacaaatttggaagaaccgaagagctatggacctgagatcacttcttaagtcacattttccttttgttatattctgtttgtagataggttttttatctctcagtacacattgccaaatggagtagattgtacattaaatgttttgtttctttacatttttatgttctgagttttgaaatagttttatgaaatttctttatttttcattgcatagactgttaatatgtatataatacaagactatatgaattggataatgagtatcagttttttattcctgagatttagaacttgttctactccctgagccagggttacatcatcttgtcattttagaagtaaccactcttgtctctnnnnnnnnnnnnnnnnnnnnnnnnnnnnnnnnnnnnnnnnnnnnnnnnnnnnnnnnnnnnnnnnnnnnnnnnnnnnnnnnnnnnnnnnnnnnnnnnnnnnnnnnnnnnnnnnnnnnnnnnnnnnnnnnnnnnatgagccactgtgtccggccaatttttgtacattttaagtattgctagtggggggacaatcagtagaccactaatttcca

SEQ ID NO: 46595 - DNA, 478 bp, Homo sapiens
ccatcagctatgacatgattacgaatttaatacgactcactatagggaatttggccctcgaggccaagaattcggcacgagccttcgagatctccaagcacccctggggcagagcttcagttgcagcaactcgagcatcattctttcaccagctgtccacctcgacctgctctccctgaggctccaggctgctcagctgccccacacaggggtctttgggcaaagtttctcctgccccagtgaccggtccatcttgctgcctctcatcatcggcctgatccttcttggcctcctcgccctggtgcttattgctttctgcatcatccggagacgcccatccgcctaccaggccctctgagcatttgcttcaaaccccagggcactgagggggttggggtgtggtgggggggtacccttatttcctcgacacgcaactggctcaaagacaatgttattttccttccctttcttgaagaac

SEQ ID NO: 46596 - DNA, 198 bp, Homo sapiens
ttgacatgattacgaatttaatacgactcactatagggaatttggccctcgaggccaagaattcggcacgagtaactgaattgcaggacacccagtttgtatctgcagagaactggagaactgcttagtgtggaaaacccacacatttggtgtcagaaatgtgtgagaaaaaacaattttttcctttttttttttttt

SEQ ID NO: 46597 - DNA, 421 bp, Homo sapiens
cctatgacatgattacgaatttaatacgactcactatagggaatttggccctcgaggccaagaattaggaaatgtctgtctgcataccttttaggagcgtgtgaatggtgtcttcacttattatgtatgtttatctgtatgtatattccttattttgtcatatatgtagagaaaattgcatgacttgaggcatcatttaggttgaagaagttaatgcttagaatgcattctaggagaaaaaatcagttttaaaaacctttgttgttaacaaagtatatccagattggttaattttattgaagggtttttttctgtaattgataaaaatgtaatgacaacaattcaggcatcataaaatactgaactattgtgactttattcttagaattgctgtcttacattaaacatgtttttaggggga

SEQ ID NO: 46598 - DNA, 577 bp, Homo sapiens
gtctctacacaaacacaactttattacttgcaccagaaatgatttcaaacactttaggaactgtggtaggcttaattatgacttcccaaaagatatccctataccaatccctggaacctggaaatgttctcttctatagcaaaagatatgattaagttaaagtcttgagatggagagattattctgggtaatctgggagtgccctaaatgcagctacatctatgcttatatagaagcaaagggagatattaccacacagaagaggagaaagcacagtgaccacagaggcagagattggagtgatggagccgcagcaaaggaatgctgacagccaccagaagctggaggaggcaaagaacagattcttccccagagcctcttccagcaggagcatggccctacagataccgataaaactgatattggacttcctggcctccagaactatgggaataaatttattgtttcaagctatcaagtttgtgattatttgttactgctgccatagtaaattaatacaggagcatgcaggacagatctgtaatggcctgaactgaattcaagggtgtggaaaaca

SEQ ID NO: 46599 - DNA, 1763 bp, Homo sapiens
  misc_feature (1)...(1763): n = a,t,c or g
aaaagcaaaaagcgtagtttctgatttatgttatagaatgatactgattagactttgagccaaggggaaaatactaaattcttttaaacctggagccttagagagccacaggaatatcttctgttgtacagtctaataagctgtggtaggaagtatcatgtaatcacagtttaatgacagtttatgtatatatataattcagtattccctctgataacatagttgccagtgtttaatacacttgtaacttggatttttaccttataggctatatgtatactcagttttttaaagcatttttttcagagatcacttaattccccatgcttctgcaatgcatataaaaactataaatgccgagtggtagaaactcctctttcttcatagtcctcaggctttggttacatttgcatatgccatttgaagcctccagcttttaccagtttaacatccaaagttcacagcatcagcattcatggtgtaagaacagttttgcagtataacacgatctgataatcattcagttattaaattgtaaataattattgggatggtttcttggctttaagtccactgaataaaaactatgaaattgcactctgtgtcaaccatccactaggatagaataccgaaatctgtgcatgcaaaaataggagatgggcccatttgcacacaattcgtagttatgcagtctgctatataaatatgttcacatgcactgtgtgtatgaaaatagatggtctgtgttcagacaaaagtaaaacatttttttcaaattgttacatttaaaggttttctgggagaaatttatgaaacgcaggctgtgtctatttgacatcagaaatttccactttaaaccaaaataataagaaactttaatctgtatatttacaacctttgttgagtacacttcccccttatttatacgtctgcatttccttccgagcttcacatctttctaaaatgcagcttggttttaaaataaaagaacattcattttgtgattctaaacaagcttcagtaaataccaccagtatagtactggtgaatttctcagcataaaatcgacatacctaaaaagttaataaaattcagctcttttccaatttcattgttatgcctattgaagtattaattgccagggtttgatttttagtgaagcttgggagtccatactttgagcagaccaagtgaagggaagaacagaaagaaactcaggagtagagtaatatcacttctcacttacaccactttcaggcacatccaaagagttcctagatacttggaaaatgtctgaaaatttttaagtaaaatactaaacttttcagtgtttagctcaactttttgttcatttggaagtttctctccatccgaggacttaagccagttttggatttgtaagccctgagtacaatacacttcctggaggcatcctcactgctgttgaagcaaaggatatgcatggggtggaaggacggcttcgaacctgggactcatatgccttgagaacaaatagattgttacagccttgggctgctgcgtaatcacggttcctcgaggctcttcctgagcacatgcccaagcatctgcctctggagagactgactccaaatgcaggtgcttccattggagctaggtcggaggctgctttatatgacgaactccagaaatggatgccagaatacggagggccaaacgttctgagttccgggtaaggacaagtccgctcctgggggtcctcattttaatngcagttcctgcaa

SEQ ID NO: 46600 - DNA, 779 bp, Homo sapiens
  misc_feature (1)...(779): n = a,t,c or g
ggaggcgggcatatcaactggggtcaggagttcaaaaccagcctggccaacatggtgaaaccgcatctctgctgaaaatacaaaaaattagccaggnatggtggtgggcacctgtaatcccagctactcaggaggctgaggtaggaggatcgcttgaacccaggaagtagaggttgcagtgagccgagattgtgccattgcactccagcctgggcgacaagcgaaacttcgtctcaaaataaataaaagtaaggggcacagggagggggccccagctcgtgccccttctgtgtgggctgcacatggtgacttccttccagagagcacagagtgggaggtaggcaaggcgtctccacagtggagagcccgacccactgtctcagcccagaggtcaaggctggcaccatcaccgagaggtcacacgggcagatgtgacagggcgcttcaccactgggctcttcctcccagacccataacccttgtcttagtattagaaaaacactggcagaccgggcgcagtgctnnnnnnnnnnnnnnnnnnnnnnnnnnnnnnnnnnnnnnnnnnnnnnnncaagagcagtctgggcaatatagtnnnnnnnnnnnnnnnnnnnnnnnnnnnnnnnnnnnnnnnnnngcgtgatggcacatgcctgtggtcctagccactagaggctgaggtgggaggatcactnggnnnnnnnnnnnnnnnnnnnnnnnnnnnnnntttgatccacaccacttgcacttccagcctttggggaccaaaccaagaccct

SEQ ID NO: 46601 - DNA, 382 bp, Homo sapiens
  misc_feature (1)...(382): n = a,t,c or g
ggtgtttcacaacggcattgtgctatgatgttacaacagctatgacatcacaaagcagtaggaatttttcagctccagtataatatgggaccacagctgcacacggtccgttgttgactaaaatgttatatggtgcatgactatgtttaaatattcctatatttttatattgtttattttaaagttctatggccaggtgcagtgactcacacttgtaatcctagaactttgggaggctgaggcagacggatcccttgaggccangagttgaagaccaacctgggcaanatgacaanaccnccgtctctacaaaaaanntttttaaaagattagntgggcgtgtgccatatgcccngtaatcanagctatcgtnaggnntgtg

SEQ ID NO: 46602 - DNA, 476 bp, Homo sapiens; identical to SEQ ID NO: 954

SEQ ID NO: 46603 - DNA, 1672 bp, Homo sapiens
  misc_feature (1)...(1672): n = a,t,c or g
tttttttttttttgccttctctgaatagattttattgtgttttgctgatctgaatttggaaatttataaacattttacatgattataaaattaaatcaaaattttaagaggtaattctaaaaaacaacatatcaaaagcaaaatgaaacaaatgatccaagttcgatcgatctaaagttgatgatctaaagagagaaaatctgaatttaatcaagcttctagatctaactaccaactcacaggaaataagaggacactggaacatgtgaaacaatactacataattcagactacaggaaattctagaagacaatctatttagtacaacaaattacaaggaatttaataaagaagaggtaaaagagaacctataaagggtacttaagttatcaaacattacagtacatgaattgaatcagattcaaataatctgtaaaaaaattaggagccaatctagaaaatctgaacaccgggtatatgaggataaaagaattactggtaatttgtttagctgtgataataatttttttaaaaagagaatatttacatttcagaaatatgtgtgtctgtatgcacacacacacacacacacacacacacacacacacacacacgcagtcagccttctatgtccatgggttcaactgaccttggaatgaaaatattccacacacaaaaaaaattgcgtctgtactgaacatgtacatttttcttgttgttattccttaatacagtataacagttatttacaatgnnnnnnnnnnnnnnnnnnnnnnnnnnnnnnnnnnnnnnnnnnnnnnnnnnnnnnnnnnnnnnnnnnnnnnnnnnnnnnnnnnnnnnnnnnnnnnnnnnnnnnnnnnnnnnnnnnnnnnnnnnnnnnnnnncataagtggtcctagaaccaatgccccacagatactgagggacacctgtgcatgtgtgtaaagattggtcacaatttggtaattgttgaagctggtttatgggacactgaagtcaattataacattttattttcatatatatatttttgatttccacaataaaaaatgtagaagttagtaattacttctacaactaataatatctcttccctaaccaagaaaataaatagctaattattcctccataattcctatagcatttattgtctcatgtcatcatttggttgtcttatataacaatccttcccacatttgagatccccctcaaaaattattaaacatgctgacttgcttgggtggatcttttcttcaacccaggagacctgcctttctaacatatgagaattacaagtcactcctactggggataataaaagaaagggaatcaaaaaaggaaaacaatagaacatgcatagtttttataaagaaggcttaggaaagagtaaaggaagtaaaggaaaagaggctcagacctcagaaataaactcctacatccctcagtagagagagctgaaagcccatatgtaataggcactgaaagcctatgtttttggcatgaatttactacaggcaaagccaccatcatatatctatatgtaccgaggaaggctagactgttaagtgtcacgtatatacggtctcaatggagcctcaggaagctattaaacaacctcaaatcacaaaatcagaaaagtgttgaacatttagaggaagaatagaaaggaaaa

SEQ ID NO: 46604 - DNA, 1443 bp, Homo sapiens
ttttttttttttttattgtcaattattttattcaaatgtttggaacttaaacacaaaatcatcattaagttttcacaaaatgaggcatctgtcgcttgaaaggcaaaaaatatttcagaaatatgtttacagaaatgtaaaaatattaggcatcaagacagatgtgaacgtattcagtagcttgtcttgtctgtcagtcttcctctgagcccgaagatcttactgtactcactcagcatgagctcagctatctggttctggtagaccatgtggatcgccatgtttcctgtttcattttcagctcgcagaaaggtaggtccaaatacaatcccccaagctttgcgtggacatgaggttcttggaggctttggccactatcttagttagatgtccaaagaggactttcatggtgtcacgatttggcggagggagtttttgtacaagagattttacagcttcaattcttgtgttgttgtcttgctttttgatcgcttccacaaactgctcaaagaaactgtaagggaagagcggctcaggcagctcccggaaaaacatcttcagtgctccggtgacaacgtggatgtcctcccactggctgtcgtccaaattcagcttctcttcttggttgacaataaatcttaacttctgtattgttgccagattgccactaactcgatatattccatcaacatctagacctcttttctcaacagcttcaatgcattgctttacaaaccacggaactgtggaattttcacgttcacacactttgtgcagatgagagccaaaaatttgatctttaataagtcctttttcttgcagagttttcagggaaggtcttcgggtaataaacttctttaatctgcttttaactcgatttttgtcgcttgtatcggaagcactgtgatgcagtctgaacattaaagattttctgtgctctggtttctgttcttttatatcactgtcatagtgacttagcaattcagtgctagaggatctttggattttgaataattcccaggtttcttgatggacaacttgaatcctttggcaatctgtcaattgcatttttgatagcgtggaaccaatccaatatgatgaagtcaatatctgactgtagaaggaactcatttcctgatactgttgtgatctgaaagacattctttctgctcgatttttccttggcccattcaatgtgtgctccacacaaatccacactttctggtttgtgcccagttttcatattggacagagcctgttgcttggattctttgtaaaattcaattcttcgactagaaagaacaatccaggaagtagaccagtttttccttagtttctttcctccatctgcaattttagctttttgcagataaccttctttttcaaccatcagttgttccaatggaggaatgacatctttcaagatatgctgtgaatgattcc

SEQ ID NO: 46605 - DNA, 2666 bp, Homo sapiens
atctttgttgaaagaactcttttattctacctttttgcacaccacctctcatgaaaatggttcttgacaatgccttccgtctctcatctaccaagtgtcttacctagagaaggtatttaggacttttgaataaattcaagactttgctcactagtcagactgtaatttttagaaggaataggagcatcctgactagaagcgtgataaaacctggctatccagaaaataaagaatggctgctaactataaaagctgttggaagaaagggccttaaaatcttaaaagtctttgtattttaaccaaataccttcatagtgcaaatatggataaattcacatgcattttacttttacatactcataacaagatagtaacacagactaaagctgcagtgttttcccaagtgaatcttcattttaaccaaactcacaaagcatttatggaaattaatacatctggcaaagcaccagacttgaatcaagcagtctcaatgctacagtgtaaaaaaagtaaattaaaaaactcaagatgtagaagcagtagccatatcagcaaccattcttctagggaagggacccacatatacgatccttccccaagaactttgatgctaccccgctgaagagtttaagcacaaaacacagtgcttgtatcatataagtaaggactttcatagaggaaaactgtaatataaatgcatttttttttttttgcttttaaaggatactgcaatataaatatattaagcatggcctcaaatatccaacattttcctatcttacattttaaaccaaagttaaaagaacctacaggctttataaagaactctcttcacagcacagctgtagttcactttaaacaaaaaatgttccctttgtgctatatccttagaagtaaacataatatacagataaatgagaagtttcgattctgcatcaagcattattcaatctcaccttctgatataaacctgcatacagtcaaacttgcaaagcattcacttaatattttagttgaaacaaacttaaaaggtatatgggttttcggtgaaggagacctttgtgagttccagtggtgtccttggcactcagaggttcagctgaagtcccgactggtgaggacaagtggagccacaagggtccagacgtaaagcaggaggcagacccagctggagctgatcttgacccacacagctggccacttgctggtcatgctctgaaactttgcatcagggctgtaccagctggtcagggtcatcatgatgtacaaggaagccaagcagagcatgaggtggaataaggagtagctatactgcactccctctttctcgttgtccacagccccgccgaggctgttccatcttcttcatcactggcaccaactggtagtttgtatcaccaaggatgacgctgtcacaaccctgacagggtcagcttgtctcacttggctattagtggaagtgcggatgctagaatacaagaggcagagaacaaaagacaaacagtccaataaaattatctgaatccagtaaagacccactctttgatggtggcagtaggggtagggacccacagcagttgaatttccaggagccagggttggtgcagttatgcgtgtaataaagctcatcaggttgggattgcaggaacgatcaggttcattggacatggctgacccaggtgaggtacatagtgtagagggtgatgagggaggactgcaagaggccggagcgaggctggtgttcctgaatttttgggtggatcgatataatagaagccacaacgcaaaggatcaggttaatactgatgaagaacttgttttctgtgcagccatctggtttggtgtaatatgtatagagcagcccgacacagatgattgacaggatataaaaggcgcttgtgaaagacagtaaagcagcataccacaaccttgggtttccttcttccattcgatttacccatgattcattcccaagaatgagcaaaatctaccagcagcaccagctgaatgaggatgaagagggcggcccctatcatgccaacaacaaaccagactgagctgaaatagcccccagggatgtagaaagagccaaccatgattccaataagggcagcaattttgaagaaccaaaacccattgtgtactgccgctcggagatctttacttgtttttactttgaacatgagcagagaaaagacaaagaaaaagatggccatggcaaagctgatccgatacacagctttataaccaaccagcacatcacaatctttatctgcatttatatcagcctcatggattttaaatcccccttcacaaaatccaggaatcttcttcaagtaagtttccatctcttttcctctgccatgatataggatacgacagtgcctcaggaggagaatgaaagcataaatgaggcgagtcaccgtggaattcttactgttaggacagcaactacacagcaaacatgaggcaccgctgcagaggcatggaacccagctggcgagggagaagacacccagcacaagcccccatggtgacgccagtgatggaggtggccggtcctgaggctgctttctaacacggtggtaactgccagctgaggtgactccccagaaacatgacggtttctcaggccggaaacgcagccttccacagacgcacggatg

SEQ ID NO: 46606 - DNA, 557 bp, Homo sapiens
  misc_feature (1)...(557): n = a,t,c or g
ttggnanngctatgacatgattacgaatttaatacgactcactatagggaatttggccctcgaggccaagaattcggcacgagagtcagtaaacaggtagttaacttcgtgtaaccaagcaagggttttgtttatcttttttaaagtagaaaaaagtgaggctcaaactctctctttctccttgtcataactattggtttacagtctttatttgtttaaaagtaaagcacattgtatgtatttatttggcaatacatgaggccattaaaaccctgagcctaaggtaccacagttagtctcatttgcctcttgtcctgtgaactccacttagaatgtcattgaacttgggcagacataattctagtgtctgttccaaacgcactgtgtcacagaagctagaattaccattagaggcacaaacccctgagaatacacaagggggcacgcttccagtagatgtgttggggaaggaggagggcagaggggacaggggacaggattcagctttgtggtgggtcctgagggttcctaccangggtaccaggattgggaaacaa

SEQ ID NO: 46607 - DNA, 470 bp, Homo sapiens
accatggtacagaacaccaaagccgaactcacgcactcccgggagaaggtccgtcaattggaatccaatcttcttcccaagcaccaaaaacatctaaacccatcaggtaccatgaatcccacagagcaagaaaaattgagcttaaagagagagtgtgatcagtttcagaaagaacaatctcctgctaacaggaaggtcagtcagatgaattcccttgaacaagaattagaaacaattcatttggaaaatgaaggcctgaaaaagaaacaagtaaaactggatgagcagctcatggagatgcagcacctgaggtccactgcgacgcctagcccgtcccctcatgcttgggatttgcagctgctccagcagcaagcctgtccgatgggtgcccagggagcagtttctgcagcttcaacgccagctgctgcaggcagaaaggataaaccagcacctgcaggaggaacttgaaa

SEQ ID NO: 46608 - DNA, 937 bp, Homo sapiens
gaccccttcctcaaaaaagttttccaggatagaggaaatttccttaaaatccataaaacttgtaacagccgtacagtaggaataaggtttggaaatctgcctggaaacctgatttcctcatccccaccttgtttcccaacataaccactgctctgtgcccctgccctctctgccaggctttctccccgatgccgtccagctctgatcctgagtgtcatttcttcatcggcttccaggctgtccttgctagctggtttgactctcacgcatcaagcgtctcaaatttgagaatgcggaggagaaaagaagtgttgcgagaaggaggtgcggccttcagttgaggtctattaggaaaagattccaaataagacaagggcggggggcggcagtcgggagagcccccaggaagccctgtagatgcccccaccccagcccatggagttgctatggttaagcagcctgagccgtacagttgaaaaggggcggtggggcccatctccaaatagcacagccagttcagccgtctgtcctcaacccaggagagctgggaaagccagtggactcctgcacctggttcttgtcactcctggcgtttgtgtacagatcaccacttctctttttggttcgttgttgaggagtcgttttccggacggctccatcacagcattgagctatcaagctgctgttttccacagttggtggtcacagccagggaagttgctgtcttgatttgttacattgtcagtaatccccaaggagccaatggatgtcagtaggagtttctgttaaatgtctccttgatggggactcagtactgtgtagagacgctgtgtttctcttctgggggtgtgcatcagaaccactggggccttttaaaatctacagatgccggccgggcgccgtggctcacgcctggaatcccagcacttggggaggc

SEQ ID NO: 46609 - DNA, 563 bp, Homo sapiens; identical to SEQ ID NO: 970

SEQ ID NO: 46610 - DNA, 2230 bp, Homo sapiens
  misc_feature (1)...(2230): n = a,t,c or g
tttttttgccagtgcctatggtgcctgtttaattgaaatcttgtaataaaagtttaaatacataaaattttttttttttttttttatcaaaagaacatcccccacttccctgaccagatacatccagaggggaggcaagtggagactggctgtctgtagggagtggagaaatggcaggtccagcttgggctggtgtcctcttcctcagaaagtgctgtgggtgaacccagagtctcagggagcagaagcccccctcgctggctttcttcacgcggggtcctcggcaagctgctctgcactgcggagaacgtgcgccttgtcctcagaagacgaggaagagcagggcctcatgccgggggcagtacgatgttctccacagtgcgctccatggcgcgcacctgctccggggaggctgtcaggaacgccaggggcccgatgcgctgctccgcacaggagtggcagaggtagccccccttgttttccttcctgttgctataggtgatgggcagcttcttcatggtaaggacggtgtcaacagggatggcattgttgcactgtcccacgcagcagcgcaccacgcctgtttttaagacgttgcttgtcagctctgcttgcaagaagtactccccagccaaagtcaaaatgttttccaatgatttggtcatgatgagacgcttcttggctcgagttactgcaacatacagtaaattccattcatcctcagaaaatgactcaactctgaagtgcggaagctggggcaggttatgccgggcacaaggcactttcacaaaatcatccaaaacatgcacagtgtcaaactccaggcctttggctttgtgcacagtgcccagaatgtactctgcaaagtccaaatcttctatatggcatttttctatcctttgcaccagctctggaatcctgatgttatacttttcaacaactgcgatcttggcttcaagctccttgtcctcggcagcggtcacatacctcttgaagccactaaagccttctttgtgcacccatcttctgataaatttgtctttaatgacgaggttttgtttcctccgttcttcctctggctgaagaaggatccaaatatcaatgattctgtccaatccaaatgatttaatccccccaatcaaatgtatccttgaagggaattccccttccgtcacccgtacggcctcatcaaacacgttggcgttggtccgggacaacaaggccacttgcccctttgcgtcacctctaatgccactctgatggtttcctccaaccaaagtctttttcctgactctcttgcaaacatccaagatagtagctcccacataagctatttccacaccaaaccgaaaactctgcgtgagatagaagacgtgggtgtggggcactgtgaacagggcgttgaccgcaccccggaaggtatagatctgctggtgcgggtcccctacaaagattttcccacatggctgagacagaactatgttcatgatagctggtgtgcagtcctgggcctcatccacaaagatggcgtcaaaagaggccagcgaaggcttgctcagctgccagagtttcaagtagccgtcatgagtcatctggtgcgcctcttctgtgcactcccccagcttccgcatgttatcccagaggcggctcgcttcaaggacaccattcagtttttcactctgctcaaccatgactctctgtccttggctgttcttacaccaaataggcacgtgatcaatggtcagctcttcgtcagccgaggcaaagaagttttctagagtcttacacacaagcttggctcttatgaatccacccttcccttcagcaaggacggagttgaccatgaagggtgttaacttgaagagattcaacttcttctttgactggtacttccgccctatgtgcccgtaggccatggagtggaaggttttgcagatgacgttgctggggaagacgcgttcggcctgctttgcgatgctcttgttgaatgtnacatacagaaacctgctctgagaccacttctctgcatacttgaccagcgttgaggtcttcccagtgccggcaaaggccataattttcaccacctggagaggttccatcttgtgattcagaatcagctgttgttcatgtgtaagttggatggttttcttgcctggccagacagatggctcctctttaacttttgtggcctgagtgcaggaattctcctgaagatataggcaatagaaaa

SEQ ID NO: 46611 - DNA, 305 bp, Homo sapiens; identical to SEQ ID NO: 17586

SEQ ID NO: 46612 - DNA, 353 bp, Homo sapiens
  misc_feature (1)...(353): n = a,t,c or g
ggtggggagccctttacccttctggtgaagttaaaccatagaagtttacaatttgcctttcacaaacattagcagtccgggcatggtggctgaagcctgtgatcccagcatgttgggaggccgagtgggaggattgcctgagcctaggagtttaaaccagcctgggcaccatggtgagaccccatctctattatttaaaatgtttcttaaataaaaaaaaaaaancagcntcaaagngcancnntgaagngagcttactttaatttgnaagtnaactgnngntgaacatgaccnntntnntngntgaaanntnnnnnntactnnntgattnnannggnngaaattttcctgaa

SEQ ID NO: 46613 - DNA, 2444 bp, Homo sapiens
  misc_feature (1)...(2444): n = a,t,c or g
caccatcaactcccacaccactgctggggaggtggtggagaagctgatccgaggcctggcatggaggacagcaggaacatgtttgctttgtttgaatacaacggccacgtcgacaaagccattgaaagtcgaaccgtcgtagcgtgatgtcttagccaagtttgaaaagctggctgccacatccgaggttggggacctgccatggaaattctacttcaaactttactgcttcctggacacagacaacgtgccaaaagacagtgtggagtttgcatttatgtttgaacaggcccacgaagcggttatccatggccaccatccagccccggaagaaaacctccaggttcttgctgccctgcgactccagtatctgcagggggattatactctgcacgctgccatcccacctctcgaagaggtttattccctgcagagactcaaggcccgcatcagccagtcaaccaaaaccttcaccccttgtgaacggctggagaagaggcggacgagcttcctagaggggaccctgaggcggacttcccggacaggatccgtggtccggcagaaggtcgaggaggagcagatgctggacatgtggattaaggaagaagtctcctctgctcgagccagtatcattgacaagtggaggaaatttcagggaatgaaccaggaacaggccatggccaagtacatggccttnatcaaggagtggcctggctatggctcgacgctgtttgatgtggagtgcaaggaaggtggcttccctcaggaactctggttgggtgtcagcgcggacgacgtctccgtctacaagcgtggagagggaagaccactggaagtcttccagtatgaacacatcctctcttttggggcacccctggcgaatacgtataagatcgtggtcgatgagagggagctgctctttgaaaccagtgaggtggtggatgtggccaagctcatgaaagcctacatcagcatgatcgtgaagaagcgctacagcacgacacgctccgccagcagccagggcagctccaggtgaaggcgggacagagcccacctgtctttgctacctgaacgcaccaccctctgggcctaggctggctccagtgtgccatgcccagccaaaacaaacacagagctgcccaggctttctggaagcttctggtctgagggaggtgtctccgaggatccttttgcctgccgccttcattgatcctgtattaagctgtcaactttaacagtctgcacagtttccaaagctttactactcttagaggacacatgccttaaaaaaggaggggaggaaccacgctgccaccaaagcagccggaagtgccttaacttgtggaaccaacactaatcgaccgtaactgtgctactgaagggaactgcctttcccccttctgggggagacttaacagagcgtggaaggggggcattctctgtcaatgatgcactaacctcccaacctgatttccccgaatctgagggaaggtgagggagtgggaagggggatggagagctcgaggggacagtgtgtttgagctggagtgctgcgggcagcctttctcatggaatgacatgaatcaacttttttctttgtttcatcttttaagtgtacgtgcttgcctgttcgtgcatgtgttcataaactcaacactttaatcatggtttcatgagcattaaaaagcaaagggaaaaaggatgtgtaatggtgtacacagtctgtatattttaataatgcagagctatagtctcaattgttactttataaggtggttttattaacaaacccaaatcctggattttcctgtctttgctgtattttgaaaaacacgtgttgactccattgttttacatgtagcaaagtctgccatctgtgtctgctgtattataaacagataagcagcctacaagataactgtatttataaaccactcttcaacagctggctccagtgctggttttagaacaagaatgaagtcattttggagtctttcatgtctaaaagatttaagttaaaaaccaaagtgttacttggaaggttagcttctatcattctggatagattacagatataataaccatgttgactatgggggagagacgctgcattccagaaacgtcttaacacttgagtgaatcttcaaaggaccctgacattaaatgctgaggctttaatacacacatattttatcccaagtttataatggtggtctgaacaaggcacctgtaaataaatcagcatttatgaccagaagaaaaataatctggtcttggactttttatttttatatggaaaagttttaaggacttgggccaactaagtctacccacacgaaaaaagaaatttgccttgtccctttgtgtacaaccatgcaaaactgtttgttggctcacagaagttctgacaataaaagatactagctaacaaaaaaaaaaaaaaa

SEQ ID NO: 46614 - DNA, 453 bp, Homo sapiens
  misc_feature (1)...(453): n = a,t,c or g
ggtgnnnnnntttgnacnctatgactgattacgaatttaatacgactcactatagggaatttggccctcgaggccaagaattcggcacgagcgagaggcgggggcgctagggccgagatcatgtctgactgggagaggtttccttggcagcagaggacgctaggtttgggatgaaagaagctgggcagatgcaaaatctggagagcgcgagggccgggcggtcagtcagcacccagactggcagcatgaccggtcagataccaaggctttctaaagtcaaccttttcactctgctcagcctctggatggagctctttccagcagaagcccagcggcaaaaatctcagaaaaatgaagagggaaagcatggacccttaggagataatgaagagaggaccagagtatctactgacaaaagacagaaaaccatgttctgcttgtttgaaaatgatt

SEQ ID NO: 46615 - DNA, 314 bp, Homo sapiens
ccgagaccaacgagcggctcttcgatgagaagtacaagcctgtcgtgctcaccgacgatcaggtggaccaggcgctgtgggaggagcaggtcttgcagaaggagaagaaggacaggctcgccctgagccaggcccactcgctggtgcaggcggaggccccgagatgaaaccctgaggcccccgagtcctggcaaactgcttgcctggggtggtgcagttctgagtgtgcctcacctgcagaacagctgagacagatgatgtgcaaagtgttttctcactggatttgcacaagtttggggagcctttctgcccct

SEQ ID NO: 46616 - DNA, 868 bp, Homo sapiens
tttttttttcaggtttgcagagtggaagtttaatgggaccatcaccgtgataccccatcacagcagtcccaggctggaggccccaggctctggccgcctctcccagcatggtgggcctggagagagcaccagcaccacctcccactttccctggggtattgctttgcccctgtgcctcccaccccaggaagctacaagagacaggctgtcctgtccccacactctccctgggtcctgggactccctgttctgaggggctaaggttgcctggggccagagggccctccccagggacaaccatcctctccctgtgtcccctgccccccacactgagggaatgtctgtgtccttgttcctctgccaggggccaactgaggctgccaaccctaggggcggggtgcagggctgtgcggggagggtggctcagatccctgcaaggaggcgtgctgcagggacagcacagcctgggcccccggcagacattaaggcacagtgtggcggtcaccatagggctgctggggcccttgccccggggcggcacctggcaggtgctggcatccggggctaggcacagctgtcagtgttgagacaggaggcatggtgtgtgcgggctggccccagggcctgcagtgcaagagagctgggagtggggaggccaggtccacaggtctctgccagacacaaggaggtccctctccccattctccctgcctgggagagcccaggggaggggcttgtgggcctgggcagagctcatggccagagccgagacgcagtcatggcaggcctggcccacagaaggtacaattgtggtgtctgggaggtcgagggtcagcccgccaacagggctaggcagaccctcgtgccg

SEQ ID NO: 46617 - DNA, 945 bp, Homo sapiens
cgggaattgttcgctttagtgccggcgccatggggtcggagctgatcgggcgcctagccccgcgcctgggcctcgccgagcccgacatgctgaggaaagcagaggagtacttgcgcctgtcccgggtgaagtgtgtcggcctctccgcacgcaccacggagaccagcagtgcagtcatgtgcctggaccttgcagcttcctggatgaagtgccccttggacagggcttatttaattaaactttctggtttgaacaaggagacatatcagagctgtcttaaatcttttgagtgtttactgggcctgaattcaaatattggaataagagacctagctgtacagtttagctgtatagaagcagtgaacatggcttcaaagatactaaaaagctatgagtccagtcttccccagacacagcaagtggatcttgacttatccaggccacttttcacttctgctgcactgctttcagcatgcaagtaggtatttcattaaacattcagaaaagttaccaatttacaagtgggtttttcatccccaaggaatacttctaacttagttgatatcaattcagagcatattttcccctagaaataatattaggaatattggccaagtgactatattcccagtttatcccataatgtagctaacaacttggaactagtgttgccagaattccactagcaaatagcagctgtatatatatgctgggaattctgatttcagtctgccttttgtaagagatgatatctgtcattaaaacagtcttcacatgtgatttttctgctcatattttttaaaaagtactggttgggccaggcgtggtggctcccgcctgtaatcccaacactgggaggcagaggcaggaggactgcttgaggcaaggagttcaagactagcctagacagcataataagaccccaatctcttaagaaaaaaaaac

SEQ ID NO: 46618 - DNA, 2533 bp, Homo sapiens
ttttttttttattgtttgtaaaaatgaatttattaaaatgctcataattataaaagaatattaaaatgcacagaaattaacattaataattataaaagaatattaaaatgcacagaaattaacattaattacaaactttacatcttatcgccacaatgtgtgaaaagcatcatgaatagttctacttcagttaagctgctcatacatttttaccctctcaaacataatatgaacataaaatgggtacaagaagtgtttcaacaagagtacattctgacccccattgtgaattaatgttttatgaaattcaaggcacacatgcaataaaaaagggaagactttggtgacagtttataagatggccttgtttagttttaaaataaaaatgatagctttccctttctaatgatatatagctaaattatctgagggatgtttaatgaaaaatcccctgagtatttgctctaatgtttcaatatgctaaaattcacaggcattaaaaaaggatataaagctcagtttctctagtggttaacactggacaggctgaaggctagattctccctcttcacaggtccactgccacacccatcaatttccccagggctgctgcctctgaagcccacttacagatgcagccaccattgtctgcagacacagctccatgcttttctttatcactgcaaagtcagccgtggactcactaacaaacactgtggaagggcatggggaaatgaccctgcatctccgactacaactttgctcttttgggcatcttaacagtgtcagatattacatttggtgcctttccaatatgtagagggtttttttttccctcctgtccacagcagcacatttaatctatgaagaggattttctctgctggggctatgaaaacaaatgcacatttcttttaagttctatcatacatacaggagataaggtaaaaacatttccttttctatgctgacatacatggcgagtaactgccaaatttaaacactaggagatagtcacacacttcagagaagagaagaggtactagagaggaagtgacacccgcttccagaagcagtatctcaggagtgaagagaggaacagtggcactcccgtcttggctgcgaatgagaaagagtttccttcagtgggaagaaattcatttctccatcccagtgcagtcagacttcatggggcctgtcttgaactctgattgcatcattaacacgatcaagagagacagtgaaatggggtcccggatccactgggacaattcaaaagcctacaatactgctttgatggatcctacataattacttacaaatcattcatggcaggcatttgaaatcaatcatgacctagagttacgctactttattgtaaaaagcctctaaaatctgagttttcctttgctgctgggattctgataggttggctcctctggtgtttaacagcatcccagtgaagcccatgcagcatgaccatgatgcaaatcacctccctcttgtgcacccagcaatgaccctgttaccagtaggggtgagagggcctggctccctgtcttttccagagcgcccaggaggcctgacacttacaaggcaataaagtgaagtagactgctaggctgagcaaaagtgagggggcaagacgtgcatggcaagacaggagtgcagcaggaagtaatctccagataatggttaggtttgtgaccaaacccttttcctttattactcttaactgcctgattggctctagaggaggctaaaaaatcaaatctaatctgagtctctttacttgattatgaataagctgggtatactcctgtctctagtacaatcagacagttacatcaaattactgggcccagagtaacaggatggaggatgcaaggaagccacattctttatggcagagactttggtgtgttgatcactttggcatacagaaataagccaattcctgcagactccttgacaaaaggcactccccacccaatgaccacaatgagggcacttgctgtttctgcccatgcacacagttgtaccccaatggctgtgtagtgagccattcacaaaggcagctggtgatgtgtaatactgcaccttctgtatctaatgaataaaagtcaactggtagaaaattgaggggcttatcttttccagacaattatgttgataaaaatgtaattttaatcatgtgatatcactgttttccaagaaactacacatctttagaaaagattaattatccagatcaacatgagttaaaatgctgtttgaatctgtaactttccctgcttttgtcattttattcccttgagatctgcaaagcagtcaacattgattaggcacggaacctcctaggagtgctcctggaagataaaaagtgtcactgtggattaggacaaatatgcttcaaaaccttgctatcttcactccaacctactaagagtatttttttgagatggaaagacatgctcaaatgaagactgaaactatttcctctgattaactgaggtttcctttctggaggtatt

SEQ ID NO: 46619 - DNA, 528 bp, Homo sapiens
  misc_feature (1)...(528): n = a,t,c or g
gcggtacgagttactagacacaatactaaatgttcctaaacattaagtcatgtaatcttaacaaggacatccacaagtagagtttatcatccccattttacagataaggaaacagagaggttaaggaacttgcccaaatgtacacatttaataaaaaatgtggcaaagtttgcatttaagtcacatgagtgattaaaaaaacccacattcataactcctgcatggagctggaacagaagagacctttgtgaagcaacatctactaacttgagcatcttccttcttcacaccaaggtctggggataggcattggctcccatgcacttgtgctgtcaaataaccagtgttttctgcaagcacctttctgtagggtaactggcctgagcttcctgcctggattgaggggcaatcagggatcagcccttcattgttaggcagttgttctgttaaccctgggtatagctggggggtggggaccntggcatattactttaccaggcagttttggggaaaaggatgtttgggcct

SEQ ID NO: 46620 - DNA, 3404 bp, Homo sapiens
gtcgctcctgcgctggagctctaggccggcgtctctccgcgagccgcgggtcaagtgccagtggctaagggtgcgcgagtagccgccacccgttcggcgttggctctggcgtcggggtcgttgtgtcgtgacaaccgctgcggtagccgtttccgaggcagcagttgcggccgctttagccctgagcgggatctgcggctgcctgcgagtctctgctgtgccgacccttctcttcgcggaccccacgccaagcagcgaccctgagccgacagccggagcgcccggcaaatggcggcctcgacggcctcgcaccggcccatcaaggggatcttgaagaacaagacctctacgacttcctctatggtggcgtcggccgaacagccccgcgggaatgtcgacgaggagctgagcaaaaaatcccagaagtgggatgaaatgaacatcttggcgacgtatcatccagcagacaaagactatggtttaatgaaaatagatgaaccaagcactccttaccatagtatgatgggggatgatgaagatgcctgtagtgacaccgaggccactgaagccatggcgccagacatcttagccaggaaattagctgcagctgaaggcttggagccaaagtatcggattcaggaacaagaaagcagtggagaggaggatagtgacctctcacctgaagaacgagaaaaaaagcgacaatttgaaatgaaaaggaagcttcactacaatgaaggactcaatatcaaactagccagacaattaatttcaaaagacctacatgatgatgatgaagatgaagaaatgttagagactgcagatggagaaagcatgaatacggaagaatcaaatcaaggatctactccaagtgaccaacagcaaaacaaattacgaagttcatagacgagatttgttcaacactgcaattgtttgttagatgtaaaccctgtgactatagtacgttgcttcttgttcttcacaattcatgacttaagtaccaaaatgcataccagttattatatattgccaagaattaaatgataaacttagagactgattagactgaaaatgcctaatcgatatatatattcttgtgcctagtactttaccacaaatacagtgtaatatcatcagtccaaaactgcattacttttgtaaaaacactggttaatttgtataagatattatagagctttttatgctttagaagttaaacaatatctttgggggggaactaatttattttcatcacttgaaatgtggtagctcttacaaagtttattgatttgatttttttaaaaatcaaaagccaattgaacaacaggatatatagactgataaatatttaggctgaatagtattttaacacttgtcttcaacttgatttgtctgtttaattgaaaagaattataagagttactgttgcattttctgacctactatttttaaaattcctgttgagtttctttgtgtttacaaggaaaggactgaactttttctcatcaaaactagcttttttccccacaaataaattatcaggttaaactttcaccaatgtctgctctgttttttgtttttggggggtttttgtttgtttttgtttttttaatgtttttggtacactgggcagacttcagagcagttttttaaaaaaataaatattctaatgtagctatctcgccattccctttaaatacctgtcttaacctcctgcttttctttcctactcctttccacacatacgcacacaatcttctaccttttaaaggatcattaagactgtcaccacattaggagctctttctctcactcttctgtcatttgctgctatgttgaaattcttattttgaccatcaatgcctatgaattcttctaatacgtgaagaaaatagtttgagtagcagcagtgctataggtgggaaatacagtttagctgctgaatttctatacctctctgatttacagattgctaattaaatggctattattagtttggattaattagacttaagaaaacaactaactgagggttttttttgtttgttttttgaggggttttctttgcatgagagttgtatgtaaccaagtgatatgattattcctgaatgtacagacagaagtaagcctgggacattgttaaatagtccctgctttaagggactacgataatgtgtactatgacaaacgtgctttattcttctaacgcagtaaggaattaggtgggaattttttccttcaaccaagtgcagggaaagccctgtgtgtcttgggtttaggttatgggtttcatttctagccatacaattggatggaattgtgtacaacttttgttaggtacccaaaataaatctgttatatgaacagaccttctaaaataacgtctgtatattttatatatagatacatatatgaaagaaggcttttattgaacagcttatcttccacttgcaggtttatggaaacagcagtatttgaaaataaataaaaagtgggagaattccttgctgttagaagaatgtggccattattttgattttttgaatgagatatataatcaaagtactgctgaactgtgagtgcagtattctaaacatttcagctaggaataccactgatttagaaacaaaactgtttgtctctggtttctgaatttaaaatgttgggattacctgtttaaatctgtcttgggggatgtagagattaagtctgtacatgtgcgtgcacatatattcatgcaccctctgattttggttttcttgtttctgagttcttagaaagtacccacatactcttttttttttttttgtagaagtagctgtcatagagtgaagaaaaggataagactttaaacagttgattctttttgtgttttctacaaactattttttgaaatttaaatcacaaactcattttctggtttttagaaagtagatgatgatttcagaggagtaaggcatgccaagcagcatgctcagtggggttttaggctgtcacatgcagctgagaaaaggtatgttcaagtcataagtaggtaattgatagggtatgaactagtcaaaatatgaaccattatgattcaagttagattttcctctggagagacagatctgaatgttcagttctagccaaggtagattttactttcaactttttaatcagtatcactttctgtgcttaactatttggtgttaccttgtctgttttcatttgtctaaaattctgcagagatgactaaaatttgacataatggtgtaaatggattgttaaggtaactttcagttgaagattaaagcaagatgccattttccccatgactttggttttgtttacatttttccctttcagttagtatacactacacgtactgtaataaaatacaataatatgacaaaaaaaaaaaa

SEQ ID NO: 46621 - DNA, 638 bp, Homo sapiens
gggaaacagaagttggagaaatacaacagaataaaagtgtcacttacgatctctcaaaattggtcaactatcctggttttaatatatctactcccagaggaattccagacgaatggaggatctttggttccataccaatgcaggcatgtcagcagaaggatgtgtttgccaattaccttacttctaacttccaagcgccaggtgtgaagtctggcaacaagaggtcttcatctcactctagcccaggtagtccaaagaagcagaagaatgaaagcaactcagcgggatctcccgccgacatggagctcgattcagatatggaggtaccacatggttctcagagcagcgaaagttttcagtttcaaccaccattacctcctgacactcctccactcccccggggaactcctccacccgtcttcacccctccactcccaaaggggcaccccgccgctgactcccagtgactcaccccagaccagaacagcatctggagctgtgggatgaggacgcactgactctagaagaactgggaaggaacagcagaggcggatctggggcagctcttgagcaggccgaggagcgtaaacagcgatttccgacgttcctgtgggacacaccttttaactgggcatttc

SEQ ID NO: 46622 - DNA, 1880 bp, Homo sapiens
ttttttttttatccttacacgtccatttattaaacaagttccttcatgacaatttaatacaatagttattaacgattagtgttgagaaaattatttccctctacatacaaaaatacagatttgaacactatgaaaaagatcaagacaagtaccatgaaaaactggtccttcaaatgaaagggggaaaattgagggcaatgtgaggctttgcctgctgtcggggacaaatcaatagcagcaaagctttggggccccaacccactccatacatacagacttgaacccaaaagccaggccagccaggggacgcccacccagggcttccacgtcagctgaaaaaccaaacacataaacctaagttttgcccaacggggttccgccttccagaaagccccacagttgtgtctttaaactgccgaaatgaaagagacttgatgagtaaaatgtgatagttgttaacattgccccccaaaagtgccaccaggtgaagtaccacggagaaatcatattggaaagttactacttagccatctgacttgacttccttggttatcaaataattacatattctgacccttcagaaggacaccaaaagctacaattttatgtttcaatccatctgtaccttcatttgcaatggctcagctagtttactcaagggttttgggaccagacataactcacgtcctgcaggaaggagaagcaaaaggagccggtgaagagtacgtgtctgtgtcttggtgtcatctagctcctcacagcaaacagcctgttttgttcaggcctgaagcctggaaaaggccgccgagcctagccagagcatccacaacgaaccaatctgagatccgagtggaagatgagagccccggagctggctgaggtcccccaggaagcttcccactctgcagtggcaggaaggccatgcctctgcaggacgctcgcactgattctggaaggggcccaggccagagaatacacttgggctcagttcaccagcccaaaccacaggggaaggagccggacaccggcctctcaccattttacacccaaagacaggaggtcagggctctgatgctactcttctgtttgtaaaatatggaaccactttctttgtactgtttgaggtgagcagtggctccaaactgagcaagtggttaaaaaatgccaaatgcaattatactgacttataattatttcacagaaatatactcttactctcagactatttaaataagcaggaacaagatgcaggagaagcagcagcagagaggaaagaggaatagccagggaattttttttgttttttttcttctttaaaatacatacgaagtgtaaagagaaaatggccaaaacctcaaaactaccattgttgaaaacaatattaaaaggacacaatctaaaatcatgctacaaaaatagtgttatcttgtttaactaaatgtacatctttttttccaattccatgattgacaagagtgcttatgcgacgcatggaaggcaccagaggtgaagtgattatttgccttaaaatatacaaagaattgcctactttgaaaaaaaaatagtcatacttgtaaataaatagtttagtgtttctgccatgggttcctgaacccctacaaatttcaacatatacaaatagtttcaattcctaccattctcttagagggaaccacgtcaaacaaaatcaagttaggaaaagcactgattttatccaagtaggtcaatttgaggcaagattcaaaaactcattttaaaatgggttacagagtgaaagagttgggaacaggcagccccctttgggcctgggtcagcctacgagtccatcccaggtgtcctgccctcacatctgccagccctcaggccggccaggtctcccc

SEQ ID NO: 46623 - DNA, 1037 bp, Homo sapiens
tttttttgagcagagaacatgctttattgaggagtagatatagaagagcacattctaccacatgtggggaagggtttagcttctgtaaaaggcctttatcccttaagaaaacccctagtgaagttgctttttgataaattttaacagtgacactgaaactggaggggagctgccactgaacatgcttaaaattagctcccccaacccacagtgaatataagtagtgtacagagatgacaagagaaaggcacaaatgaccggagtcagggattgtggtgagggctccacatgaagacagcatgttggaggagaccaagttgggaagggtgacatgtcatacatcaaaagttgccccaagatagcaggttataatgggctagagagaaattagagggaacatctcttccttcacttgaacaacaccaaaaatagaagaccagagaatagaaggatggtgacaaatcccaaaaaggaaatggaggaggagttcgtggaagggcagaagcactttaaacccctagagggagggtgaggcactgttgaaaagagaagcaaactttggccaggggtggccattctgccttgctgagtcatggggctgagatacggaagtcactttcaatcatttctactttctcccagggcactcagacaaaatcagtgcaaggtatatggaagtacagatgtactgtatcagactagtggaggtgaaaaggtttctgcagtataattaaccagttaatatgcagcatgaaagggaaaagtggaacattactttggcacctgcaaacgtaaaaagtgggagtaaagagagaaggaaatatttactagtgagtactttacggtgaggcaaaaagtagtatccgttccctttcaccaagacactgcccactgcccactgcccacaggtgaactcaaatcaaacccagaaccaccaccccttcattcttctctccatctcattcagatcaattatatgctattaccatgactagtccctgggaaactcttcaaaagtatttggctctggttagccc

SEQ ID NO: 46624 - DNA, 830 bp, Homo sapiens
tttttttttttttttttttgattaaaccagtatttattaacagcatgcctgattctgtggaaagcagacttgaaccctggtcattcctactctcaggggcagcatgttaaggatagcagcctgcaagtctatctcttaaactccacttgtgtgtacaccttggtgatgtcattgtacctgccttcagggggttggtagttagggatcggtggtgtgtaatgtggcccttccttctcaaaggggaacaggttaggatcccgcttgatggcctcagcatggagcttcggggattccagttgcagttcctccagagcttcctgctgggcttctagcatagccctgatggtgtccctctccatcttacgctcttgctgcttgtacaaggaccacttcttcagaagcagagctctcctctcagtctcctcaaaggtgagctccacctgaggccgctctcttgctttatccaagaactttagaggggtaataaaatcttcaataggaattagctcttgagtagccttttccagttttcggatcttccttttcaagcgctcctttgcttcttggtcttttttaggatctaccttcttcttttttcgaagaggttctgatctcatgggaatgagttcccagaaagacaacaatgagcgctcgctggtgagtctctctaacgctgcgtctgccaagttcccacgagacccgctaagtcaggacgcagggctagcgagatacttcgcagcacggaggccgtcatggctaccctcgccgcttccgggcgtgcgcccctccacagtccggcccgcggtgccccctgctgaggtccggcagac

SEQ ID NO: 46625 - DNA, 416 bp, Homo sapiens
gagggagggcagaaacccagttaacaatgtaagcgggcacggagggaagatcagcgtgcaaagctaggtcggcaagacgtgcaaggtgcacccacagccataacaatccctccccagaccccaacgtgtcctcacggtggtggcagtggccccccgcactacagaagaacaatgcgaggcgagctcaggcgcgctgatggtggtttccgatacaactccccactcaaagaaccccggagagctcttgattccatctctcagtagggtcctgaagtccatgctgtctgaagacacagggtctccccctgcgtctgtgccaggacagagggactgccaccagccaagctgcaatccttttaaacgctaaaaacggccgggcttggtggctcatgcctgtagtcccacagtttgggtgg

SEQ ID NO: 46626 - DNA, 1891 bp, Homo sapiens
gagttacttcccaaaaatgttaatcacagctggattgaaagagtatttgggaaatgtggcaatgttgtttatataagtataccacattataagtctactggagatccaaagggatttgcgtttgtggaatttgaaacaaaagaacaagcagcaaaagcaattgagtttcttaacaacccaccagaagaagcaccaagaaaacctggcatatttcctaaaacagtgaaaaataagcccattccagccttaagagttgtggaagagaagaaaaagaaaaagaagaagaaaggccgaatgaaaaaggaagacaatatccaagccaaagaagaaaacatggacacaagcaacaccagcatcagtaaaatgaaaagatccagacccacatctgagggctctgacattgagtccactgaaccccaaaagcagtgctcaaagaaaaagaaaaaacgggacagagttgaagcatctagcttacctgaagtcagaacagggaagaggaagagaagcagctctgaagatgcagaatccctagctccccgatcaaaagtaaagaaaattattcagaaagacatcattaaggaagcatcagaagcttccaaggaaaatagagatatagaaatctctactgaagaggaaaaggatactggagatctaaaagatagctctctcttgaaaacaaaaaggaaacataagaaaaaacataaagagagacataaaatgggagaagaagttataccattaagagtgctatcaaagagcgaatggatggatttgaaaaaagagtatttagcgctacaaaaagctagcatggcttctttaaaaaaaaacaatatcccaaataaaatcagagtcagaaatggaaacagacagtgggagtacctcaaaacactggaatgaaaaatgaaaaaacagccaacagggaagagtgtcgcacccaggagaaagttaatgcaacaggaccacagttcgtgagtggagtgattgtgaagatcattagcacagagcctctacctggcaggaaacaagtccgggatactttggcagcaatctcagaagttctttatgttgatttgctagaaggggatacagaatgccatgctagatttaaaactcctgaggatgctcaagcagtaataaatgcctatacagaaattaacaagaaacactgctggaaactcgagatcctttctggtgatcacgaacaaaggtattggcagaagattttggttgatagacaggcaaaacttaatcagcctcgggaaaagaaaagaggcactgaaaagttaatcaccaaagctgaaaagattagactggcaaagactcaacaagcgagtaaacatataagattttctgaatatgattgaaaaaaaaaacagttcacctcttaatacttcacaagatacttgagctgttcttgggagattcacttttattatggtagcactgcataattaatgtgtttttaattaaaagaaatatctttgttcctcaacttgtaaataagacttttttctagagacaaatatgatgtataccacaatttttcttaaacattttatttgttgaaattatcttagatgtcagtgtcaggtgatttagtaaataaatgtgttttgaacattatttggaaatgtgttgattttgtttttatactgtaaaaacaaaacataattgcaaaaatactacatgaatatatataaagtttagagaaatgtttaacactaaactctcactgtacttagtttgtaacttgcaataccttcaataccttttcatgttgatttatacagacatgtttaatagttcattctattcattccactttgcctatctgagcttccattgaacaatagaccatagggattggttctaattaaaatgttaaattttt

SEQ ID NO: 46627 - DNA, 484 bp, Homo sapiens
cgacttccggggcggcggttgcatcagattctaggaagtgtctgtagcccgcagctgcgggtccgggattcccagccatggcagattcctccgggcagcagggcaaaggccggcgtgtgcagccccagtggtcccctcctgctgggacccagccatgcagactccacctttacaacagcctcaccaggaacaaggaagtgttcatacctcaagatgggaaaaaggtgacgtggtattgctgtgggccaaccgtctatgacgcatctcacatggggcacgccaggtcctacatctcttttgatatcttgagaagagtgttgaaggattacttcaaatttgatgtcttttattgcatgaacattacggatattgatgacaagatcatcaagaggggccccggcagaaccacctgttcgagcagtatcgggagaagaggcctgaagcggcacagctcttggaggatgttcaggccgcctgaagccat

SEQ ID NO: 46628 - DNA, 1338 bp, Homo sapiens
cgttcccggagtagcaggagtagctgtgcgagaggtgccactcctgggcgcttgctttgcctccagcatgacccccgaccctggcttgcaccctgaatctagctgcgagccttgggcagaatggatacctgaggaaaggtatggtttctctccagctcagatctaactggactctcggctcctgctggctggacatggaggatttggaggaagatgtaaggtttattgtggatgagaccttggactttggggggctgtcaccatctgacaggagtcacccacttgcaatctgttccctgcatccaaaagcccagcatcttctcctcttacccgatcgactcccccagtccgggggagagccgggcccagtgggagagcagcagccagcccacccacccccatcagatccgtcctggccccacagccttctaccagcaactctcaacgcctgccccggccgcagggagcagctgctaaatcttccagtcaactgcccattccctcggccatccccaggcctgccagccgaatgccactcaccagccggagtgtgccacctggcagaggtgccctacctccggattctctgtcaactcgaaaagggcttccaagaccaagcactgcaggacacagagtgcgggaaagtggacacaaggttcctgtttcccagcgactaaatcttcctgtcatgggtgccactcgcagcaatctgcagccccccaggaaagtggcaagtcccaggacctaccaggtaaagagatcaggacagcaagcaagacttcagtagcaaaccactacagtcagtacctggactcgcctctacccagcagaccctgactccagcagattctggcccagggacaggaggaagagatgccaccagggctggtctcccaggagtagagaccatgggaaatggggtggattaggattgagctggagaagacttaaactctctgggttgaaagaagattaggggaaaagaggtcaccttccagcagtgaaatgaacaaatagaagatgagaagtacaggcaagtggtttgtctttatccacccccactgttgtggtcagccccagagaattttatcttcttccttggcattggttcactggacatttccacgtgagcggcctccgtagctaacctccctgccctctgaggagccatcttcctgaatcgcattctctactggactctggcctgcttggagaggtggcagcaggcacctggtcttcagaaattgtttcctgtgaattctgtgactcctaataggccagtttgtgataagcttactctatgagtcttcatttttctaaaataaagtgaatgtattt

SEQ ID NO: 46629 - DNA, 2077 bp, Homo sapiens
ttttttttttttttgctcttgggcgtcatttattttttgcataggcataaattaggatctggagataaaaaacttaagaaccaatagtgcagcatttgtgacaggagagcgcaaaacaaaccctggctgcctcgggatggagcggggcggcctcaccaccactgcatccagcctcatgctccagagcggatttgaggctcagtgctgcagtgaaggcctgcccgccttcttgccccttccccgcagccagaccaccagacacagccggaaccagtgccccaggcccctctccacggccaggaacaagaaactgagtatcacccagtgccccacagaacggggctaggaatcaagcccttagcttttcagttagaaaaacagaccttgaaaaatatatacataatacagtggggcctgctggctctaaaagtcccctcctcccccttccctatccagggtaactttctgcagcctcttcccccagcccccaccaactgccccacagagaacaaaccagaagggcgactacctgaacaagagctgcaagagcccaagggggcagcctgagcggacgacccctacatcagggcctggttagatgtgggggccggtgcagacagacctcgcaccccgataccctgaacgtccccacaagagcccaggagttccatgctccccactcttcttgctataaccccagatgctaatggccccaaagacaggtctaggtctccataccctgggagaatgtggaaagcaagctcaggggcacctggcaggccctagcaggaacagggagcagggtgggccccaacctagcatcaggagagagaaaagcaactaccgtccccagcagaggggaagcctaccagggtttgccctgggccccttagaagatcacagcagccagtcccctttagggcacaagaagccccatggcccactgctaccctccccgggacaaatacacacttttgtcgaaggccctcagggaccctgtggttcaggcttccctaggtggagggcactaaccttgtaggagagctgggcagctctccatcaagtgcttcctgcctggggaagtcccatcctgctctggagctaagcaccctcctcccagagggcctcgcttccttgcccaggggcagaggcagctcacctagcccaggccgtagcttgcccctcccacagccctggcacctgctttcatcagctccccaggcaccagcccctgaaccccagccaagaccagtcaggtcctacctctcccaacttcccagtcccccatgatatgctacatatatacacactcccaggatgggaagcagacgccacgggcacagagggaaggaagaagggagctgctggagcctgctaaccgcctcgagccacctgctgctcaggagaccctgcccgtccttttcatctgcatggggccacaggctcctctcttgtgctcctagaagtcagagcgccgagcaagcgtgtgggggaagcggcggggtgctgttcacccactcccagatggctggcagcaggcaccagtaagcagggctagtgggcgggctccccatgcactctgaagcggtagatgcaggtgtactcggggtggccccagttagtcaggatccgcagctccaccacctggtacgtggccatcgtaggggcctgaaagtgaaacgtctgaataggctcgccgtcctgatcgtaagtgaacttgccaaggagtgtcccctccctgctgcaggtcttcgtcaaacccaaagatggcgaagtccttgggggcactggagatagtgctgttgggtgacaaggccttgggcacatgctctaaggtaacggctgtggggcggatgcgggcagagaggcggaccacggcgaagccttgtggcccctggaaggcccagcagttgcctgggtgcacatctggctggaggatgactcggggtgactgggagtggtaccacagggggatgccgaagaggctgaggagggccgtcttggtctcgtaggtctcagaacatcgggtgctgatgacgctggcccctcctgactccagggcgtagtctgccagccc

SEQ ID NO: 46630 - DNA, 595 bp, Homo sapiens
gtgtttccagaggagactgacaggtaagtcggggagtgagactattgccctcaatgtgggcaggcactatcccattggctaggggcctgaatggaaaaaccctgtagaagaagggtgcattctctgtctcttccaggatgggattccctcctcctcctgctcttgaacatcagaactccacgatcttcagcctttggactctgggatttgcaccagcagcctcttggggctctcaggccttcagccttggactgaaagttacaccactggcttccttggttcttaagcctctcaacttgggctgagacacgcctgagcttctctggttctccgacttgcagacgggctattgtgggacttctcggccttcataatcacaggagccaattctcctactaaatcctctctcatgtatccatacaaatatatattctgttggttctgtctctctagagaaccctaatatatccagagtcaaggcatctctttgaactagggcattcacataattcccacagtacaagacaaatacagatatgcgctcatgctactggaattcaacatcgtatatgaatagcttttaattaaacttacg

SEQ ID NO: 46631 - DNA, 1062 bp, Homo sapiens
gttggtgctagaggcagctgcagggtctcgctgggggccgctcgggaccaattttgaagaggtacttggccacgacttattttcacctccgaccttttccttccaggcggtgagactctggactgagagtggctttcacaatggaagggatcagtaatttcaagacaccaagcaaattatcagaaaaaaagaaatctgtattatgttcaactccaactataaatatcccggcctctccgtttatgcagaagcttggctttggtactggggtaaatgtgtacctaatgaaaagatctccaagaggtttgtctcattctccttgggctgtaaaaaagattaatcctatatgtaatgatcattatcgaagtgtgtatcaaaagagactaatggatgaagctaagattttgaaaagccttcatcatccaaacattgttggttatcgtgcttttactgaagccaatgatggcagtctgtgtcttgctatggaatatggaggtgaaaagtctctaaatgacttaatagaagaacgatataaagccagccaagatccttttccagcagccataattttaaaagttgctttgaatatggcaagagggttaaagtatctgcaccaagaaaagaaactgcttcatggagacataaagtcttcaaatgttgtaattaaaggcgattttgaaacaattaaaatctgtgatgtaggagtctctctaccactggatgaaaatatgactgtgactgaccctgaggcttgttacattggcacagagccatggaaacccaaagaagctgtggaggagaatggtgttattactgacaaggcagacatatttgcctttggcttactttgtgggaaatgatgactttatcgattccacacattaatctttcaaatgatgatgatgatgaagataaaacttttgatgaaagtgattttgatgatgaagcatactatgcagcgttgggaactaggccacctattaatatggaagaactggatgaatcataccagaaagtaattgaactcttctctgtatgcactaatgaagaccctaaagatcg

SEQ ID NO: 46632 - DNA, 769 bp, Homo sapiens
ggcaagatggcggaccgtggcggcgtgggtgaagccgcagctgcttggagcgtctcctgcatctgtccctggcctaaacccgacgctaggctggagggagcgactgcgggccgggctggcggggactggggcctcgttgtggttcgtggcggggctggggctgctttacgccctgaggatccctttgaggctgtgtgagaatttggcagcggtgactgtatttttaaattcattgacacccaaattctatgtggcacttacagggacctcttcattgatatcaggactaatatttatatttgaatggtggtacttccataagcatggcacatcttttattgagcaagtatctgtaagccatttgcaaccactgatgggaggaacagagagcagcatttcagaaccaggttctccttcgaggaacagagaaaatgaaaccagcagacagaatttgtcaggtgactacttttctaatgtgttttcagagctgtgtatttaagattgagtttggctctgggagatagaaaactcaaaacagcagagtgctgtggtgtgcatgtttgtgtttcccccaaaattctaatcaccaatgtgatgttacgaggtagggtctttgggaggtgatcaggccataagccatccctcagggatgtaataatgcccttatgagagaccccagagagctgcttgccacttctaccgtgggaggacaccacgagaaggcgccgtctgtgaaccagaaagcagaccctcaccagacaccaaattt

SEQ ID NO: 46633 - DNA, 2641 bp, Homo sapiens
ctccatccgcagccacaggggaactcgtctcttacatactctcatcttctcccccgctcccttccactccaaggagcgaggagggcaagcggcctcccagctccctggtacctcgaggcaccattccagccagggacgctgccgggtagactctccactccccctgccgcccacactgcagcagccacatccatacacacacgctcgcacagtgttctgaggaaggaaccttcgccacagactcctgtactattaacaatctgtaaccaagctaactgtctcatccatgtgttgatttcctgtttcctcctcccccgcctcttccagttcaaaggagtctgcaattggaactgctgattttcggtgggttttgtagttgatttttccaagagcgtcgaagactctctttctcttggttcaccttgcctgtcgctagcaagcatctggttcagcggaaatgggatgtgagaatgatgaaacccgacagaagtatctcagcctgcagtcagttattatgtataggaggtgagctagttaacaaacttgtaccacaaaacaatatcgctttaacttttctaaagccaaatttcccatgtaagctgcagtttctatctttagcccatcatcattttctgcccccccaaaatctgttgaaatgattcactgatgcaaaacattcacccgtaatagactgagaattgagccttaacttcagattaacttgtgagaatcaggaaaattccttcaactgcattgcatcctcttggaccagggctagaatggggatttcaggtttctatgagcctccccattacccctaaagtagaacattttttaaattgtgttgccaccacttctaaaaatttagcaatattagaataggatactagtgaagtaagaaattttgcttgttgttttgcaaaccaaatagtttcctcaaacacaaatcagtgttcccacgaacaagttccaattgagaaacactaagggttatggtgaataaaaccatagggagctttttccccccaacccctggctattttatattaatggggagaggggatttttaaatgtcataaatttgaagagtggtgggttgcattttcttcatgggtttatgttttcgtttcattttggactcaatttcacatcaccaaattcctcatttatacttggggaaaaaacaaggccatatgtaaaaacccttccaatgcctaagtgtctttctcctgcaactccaaacccagactcgccactttgggtgcacaggtggttaggtcagccaactggttctgcctgtcgccttgccacggaggaggcttctaattagctggaaaagagtatttttctaatacgttgcaaggattagccaaatcttcttattgaagaaagaagaaaagtgaagagtggttacctatacctagcatagtacaatcagaacctcgtggagaccaccggggacaggcttgcggacgccggctgttcttcccgccacgatctttctgtggtagcggccagcagaagacatggcctgctccccactccctttccccactccttctttattgcacacagggacaccagtcttcaaggaaagggacttttttccagtctgccaatcatattgggaaagtgctagctgtgctcaccttcatgggggctgtttccagctcgtccacaagctcatcgattttctttagtagattaccggtgtaaatacccagtgtgcttatgagtcagttagtagacgtcttcattcattggagtaactggtttaggctttccagtttggaaaaggagcagagagctgtccatctggattgatggaagaaaagagaaccctcatccatgcctggagaacatctagaaaaccttcagccagcctcccagtgctgtcgagagaccaccttcccccgacccggaggcacttccttggggtctttctctagggtctcttctctacaaagcacaacactaatgttcgtttccttagacctcagttcaagtgcccctatttatttcaataagaacgcacatatcccagctgttttttgtttgtcacctctatttagttgttacctgtttctctcttctttcaccccttgtccttttccacccttttaagagttacgctagcagatcttactccacgtatactttttcggtttgtgaaggcatcggttaagggcacaaagacagccatggggacatttatgtaaatacgtctctaattgccacactgcagctgaacagtgtgtagtattttcccagtcagctttgccatactgacgtcaatcatttgagagaaattattcagattttatttttgtatctgtggtaacaaaacattaaccaaaagattttctgtccagaagcctccccgaccccccaagctatttgctcacattaacaaattaaagtgcctgaagcataattcattctttacctgtatactaaaaaccctgttgtattgatttttttataataagcctttttacctctgtgtaaaaaatatatatacaagtgtatgatgtacattttagttcttaacttttttttatggtttctaatatgtatgaccaatgtagccattgctttaaaatgtaccgtgtaaatataaacacatcctatcagaaaaaaa

SEQ ID NO: 46634 - DNA, 6482 bp, Homo sapiens
  misc_feature (1)...(6482): n = a,t,c or g
ggaagaaagtaaaaactcaaacaagctcatttgatatacaaaaagcagaatggcttcgaaaatataatcccgagcagctccttcaagatgaaggctacaaaaaacatataaaacaccactgtaataaggttttgcttcgtgtgagaatgctgtattatctaaagcaagaagttattggaaatgagtgtcagaaagtatttgatggagttgatgcaagtgacattgatgtttgggtaccagaaccagaccactcagaagttcctgctgagtggtgggattttgatgctgataagtcactccttattggagtttttaaacatggatatgaaaaatataacactattcgagcagacccagcattatgcttcttggaaagagtgggaaaacctgatgagaaagcagttgctgctgaacagagagcgaatgattatatggatggggatgtggaagatccagaatacaaacctgccccagccatctttaaagatgatatagaggatgatgtttcctcaccaggagatcttgttatagcagatggagatggtcaactgatggagggtgataaagtatattggcctactcaatcagctttaaccacacgtttgaggcgtctcatcactgcataccagcgtactaataaaaacagacaaattcaacagatacaaccgactttctcggtgcctaccagtgtaatgcagcctatttatgaggaagccactcttaatcctaaaatggcagccaagatagaaagacagcaaagatggacaagaagagaagaagctgacttttatagggttgtatctacatttggagtggtttttgaccctgacagaggccaatttgattggacaaaatttagagctatggctaggctacataagaaaactgatgatagtttggaaaaatatttgtacgcattcatgtccatgtgtcggagggtttgtcgtcttccttccaaagaagaattggtggatccaaatatttttatccagcccatcacagaagaacgtgcttctaggactttgtatcgcattgaacttctaaggaaagtacgggaacaggcccttcgacatccacagttgtttgaacgcttgaagctttgccatccaaatccagatttaccagtctggtgggaatgtggccctcatgatagggatttgcttattggtgctgccaaacacggggtgagccgaacagactatcacattcttcgtgatcctgaactctcatttatggcagctcagaggaactacagtcaaagtaagatggctcattcaaggacttctaccccacttctacagcaatatcaagtagcactttctgcttctcctcttacctctctacctaggctcctagatgctaaaggtattattctagaggagatgaaagttaaaagtgaaaaccttaaagaggagcctcagtcttctgaagaagaatctatgtcttctgtggaaaccaggacactgataaaatctgagcctgtaagtccaaagaatggtgttttaccacaggctactggagaccagaaatctggtggaaaatgtgaaacagacagacgcatggttgcagccagaacagaacccctaactccaaacccagcttctaagaaaccaagagtccacaaaaggggatcagaatctagttctgattctgactcagattctgagagatcatcttgttcttccagatcatcttcttcctcatcatcctcttcttgctcccactctcgatcaggctctagttcttcttcatcttcatcttgttcttcagcatcttcttcatcctcttcctccacctcttcctcctcctcctcctcttcatcttcatcagaagaaagtgacagtgatgaagaagaagcccaaaaacgagaaagtactactcacatgaaagcctatgatgaagaaagcgtcgcgtcactgagcactacccaggatgagactcaggatagttttcagatgaacaatgggacaccagagtctgcttatatcttacaaggtggatatatgctggcagcctcgtattggccaaaggatcgtgtgatgatcaataggttggacagtatttgtcaaacagttctgaaaggaaagtggccttcagctagaagaagttatgatgctaacacagtggcttctttctataccacaaaactgctggacagccctggagcagctacagaatacagcgagcccagtgtacccactcccccaggtgccggtgttaaagaagaacatgatcagtcaacacagatgtcaaaggaaggtggtttgaagttgacatttcagaagcaagggcttgctcagaaaagaccatttgatggtgaagacggtgctctggggcagcagcagtacctcactcggcttcgagagcttcaaagtgcatcagagaccagcctcgtcaatttcccaaaatccataccagtatcaggtacttccattcaaccaacccttggtgccaatggtgtgatattagacaaccagcctatagtcaaaaaaaggcgaggaaggaggaagaatgtagaaggtgttgacatcttcttttttaacagaaataaaccacctaatcatgtttctttaggcttaacctcctcacagatttccacagggataaatccagcactatcctatactcaacctcaaggaattcctgatacagaaagtccagttccagttattaatcttaaagatggaacgagacttgcaggagatgatgcaccaaagagaaaggatttggaaaaatggcttaaggagcacccgggttatgtggaagatttgggagcttttattcctagaatgcagcttcatgagggaagacccaaacaaaaaagacaccgttgcagaaaccccaataaactagatgtgaatagtctcactggagaagaacgtgttcaactgattaacagaagaaatgctagaaaggttggaggtgcatttgctccccctttgaaagatttatgtagattcctaaaagaaaattcagaatatggagtagctcctgaatggggagatgttgttaagcaatctggatttcttccagaaagcatgtatgaacgtattctcactggtcccgttgtgagagaggaagtaagcaggcgggggagacggcctaaaagtggaattgcaaaggccacagcagcagcagctgctgcatctgccaccagtgtttcaggcaatcctttgttagccaatggactacttccaggtgtggatctcacaactcttcaggccttacaacaaaacctacaaaacttgcagtcactgcaagtaactgctgggttgatgggaatgcctaccggccttccttctggaggagaagctaaaaacatggctgctatgttccccatgctgctgtcaggaatggctggattaccaaatctgttgggcatgggaggactcctgacaaagcctacggaatctgggacagaagacaaaaagggaagtgactctaaggagtcagaaggaaaaacagaaaggacagagagccaaagttcagagaatggtggagaaaactctgtgtcaagttctccttccgcatcctctactgctgcattaaatacagctgcagctgccaacccattagctcttaacccactattactatctaatatactttatccagggatgcttctcactccaggccttaatcttcatattccaactttgtcccagtccaatacttttgatgtacaaaacaaaaacagtgacttaggctcgtctaagtctgtagaagtaaaagaagaagattccagaattaaagatcaggaagacaaaggaggaactgaaccaagtcctctcaatgaaaacagcacagatgagggttcagagaaagctgatgcttcatctggatctgatagtacatcgtcgtcatctgaggattcagattctagtaatgaagactgattcccagactctgcacttaaaatatgaactgattttggattttttctttaataattaattgtaaataccccagtgttgagtgcatcaataacttactgaccgaacatttcagttatttgtttagaagtgcaaactgctttcagagactttttgcatgtaatatttcttaagattcataagtttctgaactcgtatgtactatcaaatacataaaggtgtaaaattacaacaaaaggcattataattttgttgggggttaattttatgaaaattatgctcaataagagttgtatatttaatatatttgcagtgaacacagaatactttatgcatattactgatttaatttgaatatagttttacagcctccttgacacctataatttacagatcaaaactcagcaataatttgggcagctaatgaatgtcatgaaagctgtagaatctacatcaccatccattgctttaattacatgaaaatgctctagtgttgtgatgcactgctgatgtttccaattcaggtacaagtatgttttaaagaagaaataagtttcccaatcagccaatttaactggctacctgttacctcagctgagttagtttaggaagtttacattcgtttctaattctatacttgttttcaggggttttttaaacacatcctatatatcatgtcaatctgggcaagaaatatggacttgctttttgctgagcttaattccagatatcaggtaaaattaagtcataanataatccatggtggncatggtgactttgggacccctattggccatnccttagttttaacttttcaaagtttggcctcctattagaaataatcatgtctcagatgagtaatgtctgtttccagggttcagaaaaggcaaactcatgaaatgccactgaaaagaactttcaacacagcatacttcatgtaaaagaaattgtttgtttgctttctttgtgtagatttctatttgtgttttatgtcatggaaatattccagaattaacagataatagtggtaaagtaatatgcagatagtctaaattcattttgagtttctaggtgtaagcagactaaatgttgcccagaatcagtgttgggttatcagtttatattaaatatactgagttgcccgttttgaaaatgcactttgaataatctcaaaaagatgtacaagttatacctgtaaaccacaaaagtgaagcctgaggcttctgttcaatttcatagactcctttaccatgtaaaatttgtctgatatttgatttgtgatacaatttctcctgctaaagctgctattattctgacaaggtagaggtccaggttcacctttatatatatttaaaacaattagtactggattgggacataaaaatattgacattctaaggagagatatatgttagcatttttctggtactcaaataagttagtagtaaagtctgcaagggcataaatttagggggaaaaagtgtcccagttctctcctacagaaaaaatactttcagtatgttttgataaaactgttgctttgtcatgagttagtcaattgtatcaggttttccaagacctttaccagtaaattatgtttctgtatgtaaaataaccccttattagagagacagtgttatatgtatttacaaaattatataagttccattgggattgtattgattttgtattttcccaaaatagtactttgaattgatagtcctttatgcaatgtcttagcaatagtctctataatgcccatccaggagaagtgggtagtaattcttcatcatgaaaatgatatattacatatttagtatcttccctttgcagtattgcacttttgtttaactagaatacacctatgagatagccaaagtttcaaacacagttatcttagtttaccggtggagtatttcaacaccaaccacatttcccttcctccctctaattctacccacatgatctttattccttcctttcgccaattaaaaaaaaaaaaaaggaaaaaaaatctgtagatcttgtcactaaaatctaatttatatcaaatttatgagagaaagtattttcctaattatggtcaaataaatttggttaacatcctagtgattctctttctatataataaggcaattacagttttcaaagcattaagtctaacataactttaaacattctcttaggtttcaagacacttctatttaatattcattggggaaaagttgtccagctatcagctaagaaaacacatgcaaatatggttgtgtaaagttaagggttataaggaaaaaaaaatcagtagaattacataatactaaagttgcagttgaaagaatatccaagtatgtgttggtagttactaaaagaattatagctgttattgccttgtatttatagcccttgtttcaggttttatgattcaagtcttagtccaatctttcttttggacatttgcaatatttaccagttgtgttttgtgtagtctgaatttgctttctgtagttgagcaaacgtcttaaaaagtcatttgtaatttattaaattactttctatgatgttctatagagcaaatggaagtttaattat

SEQ ID NO: 46635 - DNA, 1536 bp, Homo sapiens
ttttttttttttttttttcccagcattgactatatttgaaagagctacacttgagaaggtaccatatcttcacatccacactgcatcagagaaccccagaatggggtactaaaaataaacacccctccccaaaaaacgcactcaggcatgcacacacatccacacgcatcctctcagttcatcagtgcactataactgagcttcaggggtgagagccagagctcagatgctggaagtaaacctttggcaaaaaaaaaaaaaaagaaaagaaaaccagagaccttccaactcctcttcccttccagagagaaggtgatgaagacaggagcagaggtgaggagacacagggccaccacactgcccaatcccagggaccccactcccactgaatagatgtgaatgatggcccttcaagttgtgcaatcacagctgcccacctgtaagctgcagccctgagaggggttcccaggagtagctcctaacagaaaaggaaattcgacttccatgctccaccagtttgccctggactattgagggtgttgtggcacattacaacggggtctggcagaggagctggctttaagacgcaagcctatgtgtttgcccgtgccctgaggtggatcacaggtagtgaatgagctgcctgggcttgaccccatttcatctattcagccaggaagctcagcaggaataaaggatatggcctgggcagggagcatcatagggcctggaggctctagccagttagcttcgggcaggctgcagtgagacctggccaacatatgatggctaaaatccaagtgtaaaagcttaggataggtcaggcagtacttcccgggggctcacactgtactgtcccactggaaaaggtaagcagtggagaaccttggtaagtagggaggctggccagtgtggacacacacacacacacacacggacacacacacacacacgcacgcacacacacacacacacccagaggcttgcacccctagtgtggatacgcacacacagacacacacaaacaaacacacagaggcttgcacccctagaacctagagaagccacagctaggagaactcccttggtacccagcataggggcaagagctggtgctgaaagagagaaactatatgtgtctctaatttagaacttatgcacaatcattggttcttatgtcccaaggtccttttatgtatggcttgagcttgtaggcccagttggaaccctatctaatcctctctcacaggaaggctatataggctctcaaaggcaagcctcccctctctttcaccccattagagtcccggtagccattcccataccgcctagagcttgactacgcaaaaactgtcaggaggcagactgacctaatggtcagactagctctggccctgcagcccagatgcagtggggagtccaagagcatctcatctctctctcaggctgaggcactgaggttgcaggagatagggctgagagccggaagtgacagcctgacccagaaggaacagggaacagatcatacatgcgtgt

SEQ ID NO: 46636 - DNA, 1400 bp, Homo sapiens
ttttttttttttgaagaattcattgtgtatttattattcacagttaatcactacctaccaaatgctatccgcagagttaaaggattaagtacataggtctttatttaaacactgattttttttttaaatatatacacacaaaacttagttcagcaaggcttcatgatatacaccaattccaaaataaaacaatcaaatggtccaggtgtagaatgccagattccttttatcatctgcgaggaaaagagaagcaggatgaggaagagtgagggaaggcggggacagggctctgccccaggaaggaggctgccgcctcctggcacagcaaacgctccaggcctgggccctgttcatatctggagtcggagggagactcccatcggccgctttgggactgaaaggcccaaggctgtcaccagttcccggaagagagggaggcagtcttgtttttgtcgtgggaaggggtttgggtggagaaaaagattacaggcacatcaccacaggggaccagaagtggagagaagacagagagttctgccgaggccttggtcttcctgtctttccaatcttgccttccccaactctccctgcttcctgggaccatcggtaggggtggggagcagcagtcaacacagcccactgggaagggaggcacaagcagcactccagcttcccagtgctgccctcacactcacctggacaggtcaggggacacaggatgaaagccatggcccaatctaagagcaagacaagtgaaaagtgagtactctcactgtgtaccccagcataggaatagtgaaacctgctacaactggaggctgcgttcccatgacttcctcctccgctctccttgtctgggacttgctggttccaggggtgcatatagggagggggcgggggccacaacccccgagacggtgaggacaggcttccgacccccctgtaagccagatccagtgggatgtgggagagctgggcggtcaccttccctcttgccccggtggcccatcacactcacactgcaccctgggcaagcagttccctgaacccccaaggggctcacaacccttaaagctggagcttaaagcctcctggcttagtacaagcaggagaacgcctcaccttccactcctgctttgtctcctttgctctaccctggctcccctgcccggagggaaaaatatttacacagagtaggagacaaattggctgaaaagctctggactgtctttaacttattttaaaacaaaacaaattaaaaaaaaaaaaaaacaccactcagaagcaacccttgaaataaggaaaaaggcactatgaaaaaacaacatgctcgataatcccactggaagggccaacaaagtggaaagagacaggctttcaggtgggcttttttttttttt

SEQ ID NO: 46637 - DNA, 733 bp, Homo sapiens
gaaagatatagggttacagattaacttccatggggatgaactccacccgatgaaggctgctgagcttggggctgaactgggagcgcaggcaatcagccacctggaagaagtgagtgatgaaggcatcgttgccatggcaacggccaggtgctctgccatccttctgcccaccacagcctacatgctgagactgaaacaacctcgagccaggaagatgttagatgaaggagtaatagttgctctgggaagtgatttcaaccccaatgcatattgcttttcaatgccaatggtcatgcatctggcctgtgtaaacatgagaatgtccatgcctgaggccttggccgctgccaccatcaatgcagcttatgcactgggaaagtctcacacacacggatcgttggaagttggcaaacagggagatctcattatcatcaattcatcccgatgggagcatttgatttaccagttcggaggccatcatgaattaattgaatatgttatagctaaaggaaaactcatctataaaacatgatagatttgaaaagagaagactttttgactatatgaaataagtcaatatagttatattaaaagttaaaacaccttaatatttacaagaattatatcacttaaacctgaatgtacttcaatgtctttttaagtcactcaaaaaacccaagggatagatttattttcatttaacacatgcatttgacatataaacaggtaaacc

SEQ ID NO: 46638 - DNA, 651 bp, Homo sapiens
gtgcttccacaaggggacatttgtgttactttgctccaggggtctgtcataaaaacaatggtaactacttcatccctaggaagcccaagacttcagggcactgttagctgattggtaaataagggacacgatattcacgggaattgtttactgctccccactagtaattctcatggggccacttttttaactctttctaattaacacctcttctcagcatagagcagaggatgcagtcatttctctgttgaaatctatgtagtatttatgtagaatgtcattatatgaaaagcgaattcagaatcctaactctgggaaagcgctctctggaaatgtagtttgataatagtgtcttataggggccacgggaatttgtttctctataaagcgatgggctccagtgtcatgttaccagagttatcgctcagttttgtttgttaaggcttttgctagaacctattatgtatccagtttttaaaacatacttcattcccttgatagcagagatccagagcacagatggcaagttgtgtggatgatactgaatatgtttattttcctaaagataaatgtcacgacacgacatttctcagtttttatttagatgtttattaccatgtgttaacagaatcttaaaacccaagggatttc

SEQ ID NO: 46639 - DNA, 1445 bp, Homo sapiens
  misc_feature (1)...(1445): n = a,t,c or g
ttttttttttttcatttgaaaactttttcaattttctaatttaatagaaataaccaaaacaatgtggctttcaaacaagggtttaaaactaatctaatacaacttctacaacacattccagagcattataacaagaattatttacaggcagctaatgtattaaataaccatgaaaagaaaaaacttgcttttattacacaccagcaaaaacacaggaacgaaacaattagaaactgcaaccttgttttaaaaaattaaatatgattatttagagaatacgataccacagaaacagcactttttaggggatcatattgaagggcagttaactatgtgcaaaaataatagtactagtagtaataataataatgaggggaggagaccaattgaaatactggaagcaaggaactagtaaggctgtgaatttaaccctttcgtgtgtaggtatgtctacataaaaaattaacaggctttcaaattgcacaaatctttttttataggcttatgtatatgtttcactgtgttttaaaatggtagtagatgcctacatttttcagaacaaggagcagacatgcattccctcccttaagattggaatttaggccacacttgaaagggaatattgcagtggcacttacaaaatcattttggtgccttcccacacataaatttggtgaatttaaaagaggagcatttttacattttaaagatcactttctagaaaagggctaaacttaactttgtacactttgtagtttgatatgacaaatatatccaaattaacttatttttgaagatagttttgtttcttcgatacaataaaaaatatataaaggaccacataggcaaacacaaggaactaagatgaaagaaatgctatacatgcattttgaccaagtaaaagcattatttatttcaattaactaaaaattccaaaacttatcacaaaaaatgagacaactgacttagcattacctaaaattcccttatgttaggataccggaagtcagaaaagtacccaacttgtggatccaaaaaataataatttcaatagtggatccaatgccttatcatttctctgtagtaatggtttgatgtttcccatatagagcacgacctacaatctaaccatactttagaactttcacatgctttgcctcataaagcaattccttcactcagtgaaattggctgagccaagtgctgnaaacccaaatttaggtcagccggancggattgngnaacacttggttcttagttttctgatgggaagaagtaaattgaagtacagcaaaaactttaaaagcttttaagaaaacattattatgtggacttttctccaaatcttctaaaatactgccatttaaaaaacaaatacaaatgtgagagagtataaaaacaaactgccttcagggactgacagatacaattttgtctttttaaaa

SEQ ID NO: 46640 - DNA, 508 bp, Homo sapiens; identical to SEQ ID NO: 1033

SEQ ID NO: 46641 - DNA, 1298 bp, Homo sapiens
  misc_feature (1)...(1298): n = a,t,c or g
tttttttttttttttttaatttgctaaactttattttatacatacacgtttacatttactagtcatggtgtcaacttgttaacacaacgaagccctaatggacccgttttgaaattagaagctggacagttacaggctttggtctcttcaagaatccaattcacccctgggtttcgcttggcacacaccccaggagaacgtcgatgcacacagctgtgtagctgcaaacggaaaccactctcttttctctcgtatttttcagtcagactcactcaggattttgaaatgaatcatcacgagaaatttgttttaaagttgaatcactgagaacatctaacaactgttcacattctttatcacaaaaactgaagtcggaaaagacgccctgaaaacttgcaagggctaatactctatgatagaatattactactgttcaccatgttaatacatttacttactaccatacacctgaacagtcacggcagaacaagagcatgtgaatgacgaaaggaaacttgctttcagggtgtcagattatagaacatgcacaggaatttcttccacttctaacctcgctcatcagtcacatttacaagaaactcaattttaagcaaagagatgcctgaaataactaagacgtgtacaaaaacaagttaacctatgaacacaaggtaatattctgatagtcttcgatgtgacttccaacatatctgagtagtcacttttcagttttttaaacacgtgagaaaaatagatttggattacatctttgtggacggctacgatacagtttggaaaccattatctcagggaccctgctctctcctctacacatgcgcacgcaaacacacacacacacacacacacacaatgacacatggtggtctggtctaatatagtgtgtctgaattcagagggcagacattaacagccaagttttgtttttttgagagagagtctcactctgctgcccaggcagaggttgcaatgagccaagattgtgccacggcactccagcctgggcagcagagtgagactctctctcaaaaaaacaaaacttggctgttaatgtctgccctctgaattcagacacactatattagaccagaccaccatgtgtcnnnnnnnnnnnnnnnnnnnnnnnnnnnnnnnnnnnnnnnnnnnnnnnnggagagagcagggtccctgagataatggttttccaaactgtatcctagccctttccacaaagnctgtnattccaatctattttttnttaaggtgtttaaaaaaaacttnaaaaagtgaacttacttcag

SEQ ID NO: 46642 - DNA, 1005 bp, Homo sapiens; identical to SEQ ID NO: 1037
  misc_feature (1)...(1005): n = a,t,c or g

SEQ ID NO: 46643 - DNA, 5135 bp, Homo sapiens
  misc_feature (1)...(5135): n = a,t,c or g
ggaaactccaggaactcctaaaaagaaggaaactaagaaaaanttcaaacttgagccacatgatgatcaggttttnttggatggaaatnaggtgtatgtatggttctatgacccagttcactttaaaacatttgtnatgggattaattcttgtgattgcagtaatagcggccaccctcttccccctttggccagcagaaatgagagtaggtgtttattacctcagtgtgggtgcaggctgttttgtagccagtattcttctccttgctgttggaagttggtgaaccatctaaagaagagaaggctgtggccaagtatcttcgattcaactgtccaacaaagtccaccaatatgatgggtcaccgggttgattattttattgcttcaaaagcagtggactgtcttttggattcaaagtgggcaaaggccaagaaaggagaggaagctttatttacaaccagggagtctgtggttgactactgcaacaggcttttaaagaagcagttttttcaccgagccctaaaagtaatgaaaatgaaatatgataaagacataaagaaagaaaaagataaaggaaaagctgaaagtggaaaagaagaagataaaaagagcaagaaagaaaatataaaggatgagaagacaaaaaaagaaaaagagaaaaaaaaagatggtgaaaaggaagaatccaaaaaggaggaaactccaggaactcctaaaaagaaggaaactaagaaaaaattcaaacttgagccacatgatgatcaggtttttctggatggaaatgaggtgtatgtatggatctatgacccagttcactttaaaacatttgtcatgggattaattcttgtgattgcagtaatagcggccaccctcttccccctttggccagcagaaatgagagtaggtgtttattacctcagtgtgggtgcaggctgttttgtagccagtattcttctccttgctgttgctcgatgcattctatttctcatcatttggctcataactggaggaaggcaccacttttggttcttgccaaatctgactgctgatgtgggcttcattgactccttcaggcctctgtacacacatgaatacaaaggaccaaaagcagacttaaagaaagatgagaagtctgaaaccaaaaagcaacagaagtccgacagtgaggaaaagtcagacagtgagaaaaaggaagatgaggaggggaaagtaggaccaggaaatcatggaacagaaggctcggggggagaacggcattcagacacggacagtgacaggagggaagatgatcgatcccagcacagtagtggaaatggaaatgattttgaaatgataacaaaagaggaactggaacagcaaacagatggggattgtgaagaggatgaggaagaggaaaatgatggagaaacacctaaatcttcacatgaaaaatcataatctgactaattttgggactgaatgaataagtacaagaggttggattttctatgttggctgattaccatattgaacacatggcatttgtagcattctttaaatctatctactgaaatgtatttgacattcaagcagttatattcggtccttcattttatagaatattggcactattattggtacagtttaaagccattaatatgttttatccatttgataattttacagtaagtaggtctcattcattttgacagttatcaaagatgtactttccacagttaaatttacattaatggcaatttttgatagttttatggctttttactgttagactaatcaaaaataactttaaaaggaacaaagaaactccaacatttcacattatgcatagttatgtagccatttcacagtttctttaagatgtgtaaactcattgtccttgatagtttttatttttcattataaaattataccaggagatttcttttaagattctgagttagcagagttcaaaactattttgtggaaacaagccaactagtaacaatgcagcaacacttctggtttagctaaattatttttccaatgtaggaaatccacactgatttgtacgtctgactgagagaaagatggtcgtctccagcagagaaagtgaacagcatttgttggaaggtgatggctctccctcctccctccccatttcattggcgtaacgtaaagtgtattctgtacataatttacaaataaaacattttattttaattgttacttattatttagatatttctcaacacttaaattcataaaattaagaccatgtaagggtatgtttttagagaaatggaagtttgagtaacccacagaacatctgtgatctttctacagcagcttcagttttgtgccaacattccatgtattttgaatatgagcaaaaactgatcttaagagcagacttaaagtagctttgtacgccttaatgttcattttgatttattttaaatctttacattcagaaatgagatactgtattatcagaccaggaggcattgctgtgaaagataatttcctattctaaaatatcaaatttaaaataaagataatgaaagaaaacataagagaactattggactctaattgctttgaactagttttgcagtttgactttacgtcttatacatcttagttacaagtctttggaaactcttgtttacttatgagcataatcattccttggagttatactaactaataatgaatattaaatgatttttcttcagtcacagtgagagcatcttgctttgtggttgaaataggtagtgtatgtcagtctttgctttaggctgtttctcatctaagtgtttgaattaaagatgttaaatttttctaattgtgaaaaatatgttttctgtatcgacacattttattaaacttggcttgattgcttctttatagtagtccctgtaagtggacataaatgtggctatttgatgttaatgcaactatgtcaaggctgcaatcactttaatagtttctttttagcaaataaatgttcattgatgaagtgcctgggtattttcccgtcccatttgcagagctctactacttcatttccacagtaagcatatatataatgatcacttctgagtttatcaccagtaacattgatacctattttggggtataaacatggtgtttttcagaaataaaaattatttcattaacctttactattactgtgataatacccaggcactcaatattcatcctgaaattttttataatatatgtaatttgtctagtcttaaagacatttggagcatggccaacaggaaggtcagcttcttactgatgtgtgtggattcttacagaatgttagtacaaatttttataaatatttggtgatccctggggggaaatatcattcttactatggttagaaagtgaattagaaatttcagctcagtttctattttactattcaagttgtgtactttaaacaaatataaaaatcaaaaggctgcctctattacaatcctcagtggaatagatggctatctttcttggctaacattaaatattcttgtaccagagcatggaaaatcgtttataattgttaatagaatggcgatttttttttaagaacttcagatttgctatgctgctgtaagtagaaagcatgaagctttttgatcatgtagggcttattgtagagggtatcaattggcctaactaagcaggattgaatttaccagaggctaagttcagatagtaagaataatgcatatgtgattgttcttaaagtcaatgtattaaataaggtatttttccttttccctcttactggatttttcaattttcaaaccatatggcctaggtaactttaattgaaataatatagatttagttgaatactattcaggaagtaataaattttaatatatcacattgaaattatgcagtggtgatgaattttggtgtttcccccctctttctggttttacatcatgaggatcagttagctgctgacaagaaaagtcatcttgtgtcttttgtaaattgaattttttttttaaatctattaggaactggaaaacagcaagtatggttgattctcattattcaaggtagttatgttctataaagtcactgcgaacactgaattagcaaatatagaacctaggggaaatacaaggctagatttctgcaagccactggtcacattttcatcaagcagtcaacatgtaaatttctgttgtaaagacaccttatttaatataatcgattcattaacattgaagtcatgaccaacaacactgtaactcatgcctgaatgaagcttatctgacacataagcttcataaggcacacaacagcctttttacccttaggaacagctttttgccccttagcactatgcttgggggccattttaaacagtgaaatcaaaaaaagaacagaaatgcaaaaaccatggcattagcgtaaaaaggacacgtttatagtatgaaagctggaacatggccttgttcaacctcagcctcagaatatgtgtacagcaagttttttgctgtaccaccaaaattttaggttaggcaaattcacaaatacggaatccatgaataacgaggatcaactgtacttaactatattttaaagctgtgacatttatctacctggtttatggaatagaatttattgctgaatcatgctccagtatttgagtgatgttttaaatatcctatgtctgaaaataattcctcctaattgtgtggtaatttgcttttactgtttccacagtatttcaggtctttgctcattcactcagtaatactgagcacttaccatgtaccagaattttactaggcacaaccatgaataaaaatacaattctcttgcaccattaaatagtgtgttaagtgctacggcagcaaattgctacatgtgctggatatctcttgttttcccctccagctccactctgctcttgcccacaaagctgacccgaatggaccacagcagagggctcctatgcctcctggcttctgagagggtttggccaaggagtgtcctggccagagatcaaaggatggaagggagcctattctcggctcttctcctggggatggggggctgccttagcagccaaaggtcacttctcccaaactccttccctgctttccaggttgcagaccctgcact

SEQ ID NO: 46644 - DNA, 416 bp, Homo sapiens; identical to SEQ ID NO: 17645

SEQ ID NO: 46645 - DNA, 1849 bp, Homo sapiens
  misc_feature (1)...(1849): n = a,t,c or g
cagaatctcagcacccacctgcttatcctctatggtgtccagggactgctgaccttcgggtacctggtgctgctgtcccacgttggcgagcgcatggctgtggacatgcggagggccctcttcagctccctgctccgacaagacatcaccttctttgacgccaataagacagggcagctggtgagccgcttgacaactgacgtgcaggagtttaagtcatccttcaagcttgtcatctcccaggggctgcgaagtgcacccaggtggcaggctgcctggtgtccctgtccatgctgtcgacacgcctcacgctgctgctgatggtggccacaccagccctgatgggagtgggcaccctgatgggctcaggcctccgaaaattgtctcgccagtgtcaggagcagatcgccagggcaatgggcgtagcagacgaggccctgggcaatgtgcggactgtgcgtgccttcgccatggagcaacgggaagaggagcgctatggggcagagctggaagcctgccgctgccgggcagaggagctgggccgcggcatcgccttgttccaagggctttccaacatcgccttcaactgcatggtctttgggtaccctatttattgggggctcccttgtggccggacagcagctgacagggggagacctcatgtccttcctggtggcctcccagacagtgcaaaggtccatggccaacctctctgtcctgtttgggcaggtggtccgggggctgtgtgagctgcccgggtctttgagtacatggccctgaacccctgcatcccactgtctgggggctgctgcgtccccaaagagcagctgcgtggctccgttacatttcagaacgtctgcttcagctacccctgccgccccggcttcgaggtgctgaaagacttcaccctgacgctgccccctggcaagatcgtggccctccgtgggccatctggcggaggaaagaccaccgtggcttccctgctggaagcgcttctacgaccccacggcaggcgtggtgatgctggatgggcgggacctgcgcacccttgaccctcctgctcccgggccagttgtcgcttcatcagccagagcccgtcctgtttgggacgaccatcatggaaaacatccgctttgggaagctggaagcttccgatgaagaggtgtacacagccgcccgggaagcgaatgctcacgagttcatcaccagcttccccgagggctacaacacggtcgtcggtgaacggggcactaccctgtctgggggccagaagcagcgcctggccattcgcccgagcccttatcaagcagcccacggtgctgatactggatgaagctaccagcgcgctggatgcagagtccgagcgggttgtacaggaggccctggaccgggccagtgcaggccgcacggtgntggtaattgcccaccggctcagcactgtccgtggggcccactgcattgtcgtcatggccgatggccgtgtctggaggctgggacacatgaaaagctcctgaagaaaggcgggctatacgccgagctcatccggaggcaggcccatggatgccccgaggacagcggccccaccgcccaaaaagccagaaggccccaggagccaccagcacaagtcctgagaagggccccctgaggtgtggtcgctgccaagcatcagtgttagggctggggctcagcctgggggagcctactggggactgagcccccaggagggccagcatgtggagagttcgctgcggctgctcctgctcacaataaagccggggccgagcagctggcaggggaggccaatccctccctcccctccccagtcctgccggctgcctccctcccaaaa

SEQ ID NO: 46646 - DNA, 862 bp, Homo sapiens
ctttaattatataattaaagaaataaacagtatcacaatccatttttaaaatgttcttaatatttggcataatgcatagtttgccttaattagaaactctttgataaaagtaatgtacttttcaaagtgatttaaaaaactgtcaggttgtagttttttatttacttgacttccattctattcctccctatgctctttccctatttttccaattttatctttcactactaaaaacctaaaagtgaagtactactcttcttcttcactttaatgtcaaatataaaggtactccactaataacatatggctactattaaaaaaaaaaaagatttcaatgcagtaacagccatagctttagggtattcttaggcaacaccccagacaaaacaaatctgaacacttatatttcatacaataacataatgcttttttcttttcacattactgcttaccccaaaagcatggcaatatacattttcaaaaacaatcttcccctgtaattacaatgaaaaacaagaagcagaatacccatcatcattacagaaacaatgattgtatacttttaacataatattcaggtatttttaatcactatcttaaaccaatttttaattatataagttaactgtatatgcttactggctgaaaaaatactggcacaacctacctactgcttttaatacacaacgtggtaacttgtgtcttctgcctaatagcacaattatcagaaaaagaatgcaaaaggtatattagagaaatgaagaaagcatcagaaaaatttcctcagccttggtttatcatctctttgtctttcctttgtatatatactgaagttgactggtcctctttcattactctattc

SEQ ID NO: 46647 - DNA, 2315 bp, Homo sapiens
gcttcttcagatcaggggacatgtcttgacagtctttgtattcctgttgtttagcatagtactggcacatcataggtgtgcaagataagaaaatgagattggaagaatttatgctacttcgtgcgcctaacaaatgtggatgtctgtattatactgatactatattttcaatagttagcaaagaaggccatttaatattttaatactgaaaagcagaattgtgctcattttattcaatacttaccatataccatacactagatagtaggtggatgtaaagatgcagttcctgctctcaaagaggattatgacctagaaaaggttacagattggattgagataactttataggcctgaacaatacagaaaagatttctaaatcattgaagacttcagggaggaaaagagattgaatgcgtcggcaatttttatcattcccgttactttgaacaatagtgtatgtaagtgcaaaaaaaaagaaaaagttgctgatcattgtggtgagaggaatgtaaaatatgagtatttttcttgctgctaggtttagttatattgtgctgcttattcttaattctagtcctaacaaatttgatttcaaaagcacatctgtggtcaaccaacttcattgttaatatttgttttattcatattaagtgacaatgtaagaatattcatgttaagtggtactgcagattttataaaaaggagaggatccaaaaataaaaaagtattttgctgatttccaactcccatccctctttttcaggaactgcaagcacatgttgaccagataactgaaatggcagcagtaatgaggaaagccattgaaattgacgagcaacagggttgcaaggaacaagaacgaatatttcaacttgaacaagaaaacaaaggcttgagagagatccttcaaataactccgagaatcatttttgaacctaaggaaagatgatgcgtcggaaagtacttctttgtcagcattagtgaccaacagtgatttgagtctgaggaagagctgaagagtttctgagtctgtgagcttcttacatggctccaaatggtcaaataagtgaatgaatgaatggacagaaaattcaatcctttatttttttctctgtaaatatgtacagtgcacgggctatgagatagcaacaaaaaatgcatagttaatggtcatagactttattccaaaacataattggaaaatagaaactgagccattgccaaatggtaaagaaatgaaaagttttcacagtgactactgaatataccaagagcttttggcagtactgctggctttctgggtgattaattaggtaaacttgaatattcccagtaaatgtttgagaatgcataaaattataccaatttaaaaatataaatttttgccactgttttgtgaacggaggatttgtacgctaaatttcatccttatttggcgtcaaagttgatgcaaagtttatgtaccatgagacttctagtgattgcctactttcacatttatttaaatttttgtgaaagaaaatacagttttaaaggctataggaatgtgttatatgtaccttaaacagataatttaattttagcaatttatcataactgatacttagctaacaattgtcccataacttgtttaagtgtaagaaataccatttcaggaatgaaaaagaaggaatactactttctaagaaagaagatcttataatagacatatttagtaggttaaactactcctttgaaagaataagttttggttcaaagtcaataatgaagacgagatttgtttttctcttctctggctgatttttaaggatattatgtagttcatttagttaacagaattgaaatgtttgatatggcaagataggtatggtaatttcaaagtgaattgggaattcctctggctcatagaacccttttttttttcctttaagtattcttgagatacaaaaaaaaaaagtaaataaaatttcaaaaaaaaagttccggatctgtttttaagctccatctggtcctcataacctgcaagatttttcttaaaacctttcagctgaaagtgggggtaaaggtggagtaatctgtggatttgtttctgttgtcttttaaaatgtcaaatatataatatgtaatttttttaaaaaccaccagatacagaaatgtgctttaacatcagttgaaacctaaattttcttatgttgtggtgattgtattaaaaagggataaaagaagagtgtcaaacatggttaaatatattgtactcatttatgttgaatacgtattaaaattaagacaaatggaaaattaaaaaaaaaaaa

SEQ ID NO: 46648 - DNA, 355 bp, Homo sapiens
gggcttatcaaagccacaaaataagttagtgataataatatagtcatgtgttacttaatgacggggacatgttctgagaaatgggttgctgggtgatttcataattgtataaatatcatagagtaggcttacacaaacctagatggtatagcctattatacacatagactcaatgatacagcttatcgctcctaggctacaaacctggacagcatgttaccgtactgaagactgtaggcagttgtaacacaatggtaagtatatgtgtatctaaatatatctaaacatagaagaggtaatgcattgcactataacattaccttatgacagccacgacatctctaggtgacaggaa

SEQ ID NO: 46649 - DNA, 2299 bp, Homo sapiens
ttttttttttacccaaatttttctttaataaagacaaaggatttaacaatttttgcgcaactatacttaactgacaaagatgatttgtttaggatcttaaggatagcaaagatatatgctaagagggtaccaccaggaaaaaagacaaatacattctatcactagaaaatgcttcaagacaaaaatattaattcaataagaaaatatttcattttttttttttatcacagagacaattaactcatttctgtaatccagttacgtggcatacattcctttttctagtttctcatgcaaaagtttggaaagtttttctcaaaacagagcaagttagcgctaatggtttcaagtcagggctgggagtcagcctagaagagcatgctccagaaggccatttacacttacctgaccccagcctgatgctctcccccatccaaaaggggtcagttaattcctattactaatgaattatctcttatacttactctatagacatataaattaccacaaatgtgcctataaattaacaagatatcattcaatgtggaggagagcagctggaacccaatgacacccctggaggtatcttggttactctttttagaaaacagaaaaaaacctgcctcattccaggtaatacataaaaataacactttaacacaaagtgtcatcctgcctgtattctttccctaaaatgctgtgtaaggaactcagaattaaataaaattaggacataagaattaacaagtacacctaaaacagacaagaagtgtaagtaaggactgcttcctgtaatcctaagcatattgttccatgggtaattttcagaacataaaaatacaataaatactataatggaaatatagggattcatttattactttttggtttacaaacaaaggcacccaataatgcttttatttcttataaaagattctcaatttacatttaaaacaaacaaaaacccacaaaacaatcccaagttaattcctatagacaacacaaaaaagggggaaaaggaaattcttttccctgctttcaagctttattacacaggttcaaaaatgattattttatgccatccttaagtcaaagaacgtactgccaagcttctctgcactaagtcttaggacatgttaatgttgccaagtcaaatataaatatagtctcaatgacatcacaatttacaaatgcatattcccaagatttaaaactgaatagggggaaaaaccccaaatgttttagaatacagtttaatcaaatgagttaagtgaaataagaaacatttaatttagtaggctatcctgttaaataagaagtttgtgtaggaaatataatcaaacagaactaaaaatcacgtctagtaaatgacacaaataatttctcaaatctttaagtctgacttaagttcaaagtctagctggtggggattaacaatctatatactctttatactaatcttagaactttaaattctagaatgacaaactaatttattcattagttttcttttgacaacagaactctaaacacacaaaattaatgcagtgagtggcctcagcaccctcccagttaacatttctttaagctagattacaagaacaataaaaccattcagaagacatacactccctatgcacttcataggcctgcccaagttgtccccaactcttttgcaagacacacagacaattcatctgattctaagtctattcggcagaagtataaaaatcatacaaatgttagcatgttttcaacacattatggaaatacatttggagagatggagtactcaatgtatattatgtgggccactttaaataaaaggcatcattatctattccattttcagacattgtcatggtctcttatacctttatataaggtatggtcctagaccagagactttagtatcattccaaagaatatagagatatttatatacatatttcttttaaaataatatttaaaagttttactacagaaaatctggcttcaacatggaagcatttttccttttcaagattatacacctgcatgaaagtaggtgatttcctttacatttagtttttcacaatagcaaaataaactttttatacattgcatttaaattgacaaagaaagttaagatgtaaagctccatgtaactttttgtattgcgaactgttctctttaaacatactccagatacactgctgattatctaatacagtacaacttgataaacttaattagaagtgttatgctgaacaatttgttaaatcaaatgtatgttaaaacagtaagtagagttaactat

SEQ ID NO: 46650 - DNA, 997 bp, Homo sapiens
ttttttttttttttttttcacgccaacttctaatttccctttaatttgtagatttaaccacagaactgtctcgatttttataaaaattgatcccaagatccaccttctgccgtggctgccacagtccaggctgagcttttcctcctgagccacacacgtgtgttcccgtccagcccaaaggggagaggtgtggggcggcggggcggggaggcgccttgtgctgtggcactggacacggtgctcatctgcaggatggccacgaagacaaacggcacagacgaagacaacacaagacacacgagcctggtcttccatcctcaggactaaaactgcgctgagagcaattcacataatctctgagaaacggcttccttacttgtgcgcagcgtgagccggtacatctgggcttgcaggttcggctccaagcgcagcaggcatccaatctgggtggttttcgtgtggatgattccagctcccacgaaattcgcaggattaggatcaacttcttcaagaagtgcagaaccaaatccaatgatcttggctttggtgacttctgtgtccattgggtgctttgctttgaagatgttctgcacttcctgctgtggattgctcaactgcttccaacgttgaaagaaatcctgagaagccatttctgtcggctggaagaatttgttgagagtgatgggcagctgcacagacacgttctggaaggtgcccccatacctgaactgaatgttgaggactggcgcctccgtgaagtcggacacgcactctatgttgaccacctgctgcacctgcgcgcccccctccacggtcgggtccacgggcttggtctgcaggttcaggttaggctgaaggtcgtctgaacagattagtgttggggtaaagtttaggaactgcgtggaggtcttattaccataaaagataaacatccgacctaaattctgccgaaattcagacttaagtccaatttgaagcagctggttttcaaacaacc

SEQ ID NO: 46651 - DNA, 696 bp, Homo sapiens
tctggaataggctctttctgtactttttttagagaaaggaatgctccagatgagtcaaatgtacccatttcttcttcagcatcctctacagcaccattcgggccaagctatccctgtcatcatctatgctcccactgccagagcgaacccttcggtaaccccgttcatcatctctatctcgaaaatcaaactcaaacctccgacgtcgttccatgtgttcccgccagcctgcagaacgagggccatcaggactgtgaggtcgccacctctctccatccctccttgatccagctagtcgccaacctccatcttcatcttctccattttgttcctctctaaagatgcgccaattttcactttctgagcgtataaattcatgctttctccctactgatgttggtccaccttcctcaaaatttggtctccctacatcttttcgtcctggtttttcaaaacgtctgtcacccctttcctcccagctctgcgatctatgcatttctctgccacctcctcgaccaaaaacaccctctacttcatcaaaacttctttggtagaaaccacattcacctctgcctctgcctcgccctcttgaagaacttcgacctctaggagcccccaccactgttcctcctcctcctcgtcctgtcaatcgcaggacagcagcactatttacagacatggaaaagtttctctggt

SEQ ID NO: 46652 - DNA, 1583 bp, Homo sapiens
  misc_feature (1)...(1583): n = a,t,c or g
tcgtgtttaagttttttactctccaaatgtaatacaattcttcagctaaaacaggaataatgagacaaaatggttcgaaaagtacaatagaaaaatattgttcactgggtttatttttccaaatgagcatcaggctatttacaaatacgcagccctccaatgacgtgtattaaaatggcaagtctatcactgtttgaaatctaaatgaaaacaaatttattaaggcacatttgatctgagaatttaactttctgggtataatgacagattcatttcacttttgtccccaaaacacatgagcaccaaaattgtcaaagaacacttaatatttagtaaaacagtaaggaatataaaaattaaggaggggaaaaagcgtttccaaaaggaaatctttggagatcggtttactgcaaataaaacagactaaacacactcccggatacacataaataatactaactaacaggtactcaagaaatggcagagctctgaacaacagatattaaataaattaaaggtatttcagatacaaaggataaaacaaaacagtaatgaaagaatgaaaaccatctccacccacataacacagacaggatgaaaggaacaaaaccaaatacatttttccccaacgttttgattagggtgtatgtgtgtgtgtttcagtctgtgtacatcagatttattgtaataattcatctttgtcattctaaacattaatattttaccctttaaagagaagggtcaagaagagaaaatgccaaatccttcttgaaatttaatgccaggtctatttaggccgaatgaactaccacgagaacagccacatacctcactgtgccttcttcacgccccttgctttaaaacctacgtggccagctgggcttgcatggtgaaacccccgtctcctactaaaaaatacaaaaaaacctagctggnccgtggtggtgtgtnccctgtaatccccagcctactcgggaggcaaaggcaggggaattgccttgancccagggaagtggaggttaaagtgagcccaagattgcggcnactgcattcccagccctgggtaacagnagntngctccgtctcaaaaaaagaacaaaacaaaacaaacaaaaaacctacgtggccatgctgagcagagtaccatgaggggaaatgatcaactctggaaagctctcctgaagacaatgatgaaacagctattatcacatttccttatcttacaactggaacatgaaatggctttaaaacaattgtaaaaaaaaaaaaacaaaacacaaaaggtagaatctgtggaatgttaacaatcacaacagaacatttaccagagttacagtgttttgttacaataatactttgcaggaatgttcacgttttctgccataggactggagcaaagggtctcaaaagaaaacatttttttaaaaaagttttgttcatcaggtacatttcaagtcaaagttaagcaggtctgctacataatgttcagcaagaagatgtgttcaaaggcaaacactgatcaccttcttgttcagaaagctcaatcttaaaggagtcctatgtaagaaaaccacttgtaaaat

SEQ ID NO: 46653 - DNA, 450 bp, Homo sapiens; identical to SEQ ID NO: 1053
  misc_feature (1)...(450): n = a,t,c or g

SEQ ID NO: 46654 - DNA, 407 bp, Homo sapiens; identical to SEQ ID NO: 1054

SEQ ID NO: 46655 - DNA, 1576 bp, Homo sapiens
cttccggtggagatggctgcggccgtggcggggatgctgcgagggggtctcctgccccaggcgggccgggctgcctaccctccagactgtccgctatggctccaaggctgttacccgccaccgtcgtgtgatgcactttcagcggcagaagctgatggctgtgactgaatatatccccccgaaaccagccatccacccatcatgcctgccatctcctcccagccccccacaggagggagataggcctcatcaggcttctccgccgggagataggcagcagttttccagggacaaccgaatgatagcccgtctgccaagaatgttggctctgagtgcagagggacaagcttctttatgcgacaccagctgtcgggaaacacaagatcctgatgaaggtcttccccaaccaggtcctgaagcccttcctgggaggattccaagtaccaaaatttggttgcccttttttgttggggggcacaacatgctgctggtcagtgaaaggaggcccaaggttaagggagatggtacggatcttaaggactgtgccattcctgccgctgctaggtggctgcattgatgacaccatcctcagcaggcagggctttatcaactactccaagctccccagcctgcccctggtgcagggggagcttgtaggaggcctcacctgcctcacagcccagacccactccctgctccagcaccagcccctccagctgaccaccctgttggaccagtacatcagagagcaacgcgaggaaggattctgtcatgtcggccaatgggaagccagatcctggacactgttccggactcgtagccagcctgtttagccagccctgcgcataaatacactctgcgttattggctgtgctctcctcaatgggacatgtggaagaacttggggtcggggagtgtgtttgtcacttggttttcactagtaatgatattgtcaggtatagggccacttggagatgcagaggattccatttcagatgtcagtcaccggcttcgtccttagttttcccaacttgggacgtgataggagcaaagtctctccattctccaggtccaaggcagagatcctgaaaagatagggctattgtcccctgcctccttggtcactgcctcttgctgcacgggctcctgagcccacccccttggggcacaacctgccactgccacagtagctcaaccaagcagttgtgctgagaatggcacctggtgagagcctgctgtgtgccaggctttgtgctgagtgctgtacgtgtattagttcctttactgctgaccacattgtacccatttcacagagaaggagcagagaaattaagtggcttgctcaaggtcatgcagttagtaagtggcagaacagggacttgaaccaagccctctgctctgaagaccgcgtcctgaatttcttcactagagcttcctcatcaggttacccagaagtgggtcccatccaccatccaggtgtgcttggatgttctccaccctcgaggtgtacgctgtgaaaagtttgggagcactgctttataataaaatgaaatatactacttcctttaaaaaaaaa

SEQ ID NO: 46656 - DNA, 892 bp, Homo sapiens
  misc_feature (1)...(892): n = a,t,c or g
acccgaggggaggccttgtaggtttccaaagggcggagctccagtgggaaaacttgaaacttgtcgtctgcggatatttatttccacttcttgtatggcctgaagaatctaggaggagaaaaagccagataccaaacttacggccaggcagacgggtcgcgggtgttgacagggtcctgagggagtttgaagccttattctcgagccgcctcctcttctctacccacacttgcaccgaggtcaccccggcaccctccgcaccggttcggttttggtctctgcttgtcctctcagtccttggtactttcgtctccctcagccggaggtggcaaactcagacatctacgggcgcccgaggccctcgcagccctgagccccagctttcacttccctgggctgcccctctccgggagcaggcagacgccccgttctcggagcccagcgctcacttagagcgactgaggttggtcgaaggatctttccccacatcccataatcagggccctaggacactcgcaggtccctttaactctgcttctgtcattacactagaacaagtagtgtttctgtttagagtcccatttcacaaattggttagtggaggcacccgtggcctggcagcttgcacagtggctgtccacctcggggggggtgtggacctgagccgtggctcagtgacaaaccaggcacccaactatgcaaggcccctgcctnggtgggcatcctaccctctggactgggcccatggaagccactgggcgggcagctggggtgtagttcatgtgaagccccattcccctcacgcttttggggccactgtgaatggggccaggaaacggatttttggtgcagctgcattccctaatagacctagttccctccacgttagtta

SEQ ID NO: 46657 - DNA, 1663 bp, Homo sapiens
  misc_feature (1)...(1663): n = a,t,c or g
tttttttttcattttttcttaataaatttattcacaaaaagtgatattgcagagggtctgggggctgtacatgggcaggggcttggtgagctttgtacatggggctgggagacaagggagcctccaggtggaagggtattttttaataaaaaaaataatggagctacaaccaccccctcccccctccccgattaaaaagacacaaaaatagacgtctctgaggtaaacggggagcctggggcttaagggtgtttaaagggcttcacaggtgccagagcttagaggtgtcacaggcaccggggtggctcctgcatcagttggtagaacagcacgtagccctcgctggatgccacctggttttcactgacaggggagacacgagagtcattgtagacatgccaaccagtctggcaccggcacagggctgtgtagtggccatagtggacgctgcctgagtggttgcaaagggcatacagctggtatacaggacttccggctttgtcactggcaaagtcccctaggctcagtcgctgcagtggaaagtctacacctactgaactttttttgatggagcctcgggaggcagaaaatcgattcagatggagcacgaggattcgagggaatctttgtactgtcaactttttggtacttcgagttttctgccgacatcggtcacacactggggcattctccgactctagctcttcttccttagtgaaaaggttgaaacaatcccgcagagacaccttgcccccagcaaatcctttcttggggatgggcagggacaggtcacaaaaaacctcgaaggtcgtggagcgatacccacaggcctggcacttgagacaacttttcaactggcccacaaacaggtccacaatcttgctgtcctctcgctcccaggtaacgtttccacattaggttggctcggtcatcatcacttaactcaggttcttctagcagagcccctcctcggcggggtgtagagggaactggaccattggcaagtatcggtggagcccggcggcctcggcggttgatttcaaggtgtagccgctccatgaggagcttcaggaactccttggggccatccctgctggctgtatccagagaaggagggaacatatttctggaaaaacagctcggaatcgaattaggattccaacagcttcgcaggagtccagggtgccagagggcaccaatcaacatctgcaaaaggcttcagtgagctcttgggctcggcctcctccaggcacctcttgccggaagtcccttctcagacagaagtcccgaagaggtcgagtgctgctcagacactgcagcacagcattcaggaagcacgtgtttccccaggtttcgaaggccaacatgaccagagcccagaaggagtgtgtgatgagccatcttgtcatcagagtagaaaggctcagaggaccgggcggatatcatgtggaaggagccatgggaagcagggggctctgtccgtatgctgaacagggtagggggtccaggaaagccccctaggcggcggagagaagtgctacgtcttaaagtgggtggctcaggccggagggccaagcggctcagtgcagccccaagctctccggtgccacggtgccctnccaaggcaatccccattggacgcaagtccccactgcttacagac

SEQ ID NO: 46658 - DNA, 2289 bp, Homo sapiens
ttttttttttttttaggtacacacagtaaagtttattttggtgcatggtatacttcactccattaaaaataaattaatcagcaaattcctgcctggctcagctctggtttatgtaaatagtgcccagctgtaatgagttacaaggtgttattatctcacacacacacaggaggcttcactctagagctccgctcgcaacaaaagcatcttaaataaactgagagaagcggtttgatttgtaatgttttcacagaagtgggatatacctcacccatatagagtttctttatatgactcattttatagcaagttaaatgaaggaagtttgatgggggagggaggggcaatatggttccccaccccctttcttcactttaagaaaatcccccaagagatgacccgcactgagggaggaggggctggtcctcaggtgctcagaccaaggtggctctgcagcacgtgcttcagaagttgggaagggggaccaaagctgggcacaggtctgggtctgctacaactaagccaggaggaatgttctcttctccccagtatctcatgaaaggggaggccaagacaggagacagcatgttcctcattcagttcactgggagtgacaaaggtgactttgttctcaaggcctccttccaaatgacttaggatgtgaaagcccttggtcatcagaggcctccctggggtcccagacgacaggcctggctgggctgtatcttggcctgaacaggagacacatctccatgaactagaggcaagagcagcagagaccatcccagcctcttccctttctccgtctctaactgagctgcgcggtgccctcattactgcgtccaccatctcaggcaagtttctaagtccctggaataaagaagggccatggcagagagaagtctctgtttcttttaatggccaactcaaccccatggctgaaagccgagcggacaacgcgtggtcaccgaccggactcggcagcattacaatctgctcctaggccacagcaggccctggggggtttcccttttgaacctacaccatcccttccttggcctttgggaaaagctatcagtcacatgtagttgctggagggggttggggagtgtgtgctgggggactctcactcggggcttcccctaagggagaggacaccccgggagagctaggggttctcccagccctgtaccccagcagatcagactcctgggcacactaagaggaaactcaacacaaatggggccaggtatttgacagatgctgttcagaggtcagttcaggccactttctgcagggtcctggaccaacaggcacttctctcctggaggttcctcgaagccagctggcgggccgtgcggagggcccagcccatcaaagtccctcgtcgttgtaagtcggagaatggggcttcaggatgctctgaggattcttctccactagagggcgccagctcacctcccctgtcagaagcagatcctccccgttcatggagtccaggtactgtatctgtttcctcacatactctaccagcaattcaagatgtcgagggtcttcacatttccggttgaagaaggttctccagagggcagcggccagcccatgatcatctgaaaggatcccctcatcatatcccaagatcgctgcatagaaatgatttgtcatgaggatcatgttcttcttcaggatatagggattaacccccatgactctgcgcgctgctgaacatcctcccacataaaatgaactatgatacgacacatgtacttcccactccggccttcctgcttcattcggactagacacatccagacgtggagtagggttataagaaaccatgaattgaatgtatcaggcatctgacaccttagaaagaattcctcgaagtcagttttctccacacagctagtatacatgcgcagggcccgcaatcttaatcttccatttactgtatttcaaaggtcccgtgaatcccatggcttctattatctttggggaaagcaccaaccttctcctcaacaggctgtggggaatctttggtagtagaaagcttacgtgtggtgtgatacttcctattcagctgtatgtctattccaggaatctgttctgatccaccacatgcttgggactggctcatctggggccactgggaagtgcgagacagagccctgtccccctgtccttgggtaggagacacaggtatcaatcggctgcatactggaacccactgagaaatgctagtctggttcctaaggactcgcaccagcaacgccatgttcctcaataacc

SEQ ID NO: 46659 - DNA, 6079 bp, Homo sapiens
caaactagagatggctgttttggctccaactggagatacttttttcccttcaactcattttttgactatccctgtgaaaagaatagctgttagtttttcatgaatgggctatcgctaccatgtgttttgttcatcacaggtgttgccctgcaacgtaaacccaagtgttgggttccctgccacagaagaataaagtaccttattcttctcattttatagtttatgcttaagcacccgtgtccaaaaccctgtaccccatgtttatcattcataaactgtttcatcagtctcctcgaaagactctgaatagtcgactactgaacaatgaacacctggatctgagactaagccggacgatgactgggttaaagctctcccggctcacccctccagacccgctgcccatccctcttccttgctccatgcccgggggctggacttgtaaaggccaagtcatcaaggtttcttgccctttgggatgttgggtcagtggggagccggagagctggagctggggtcggaggaggtagtaggtggaggtgttcttccctgattcccttgcgggatgcctcgggctggcctcccctgagggtcttagctccgagaggggaccctcttttccacacagccttctccacctctggattttggtaactgctccctcctcatcccttcaggattagtggcctcagtgggagtctggcttttactagtcctggcggacttgtggtttctacataatgtgctcgcacttttgcaaaaaatctttttatagaaccctcctcagataattctgagtgtcatctatctccctgactggtacagtatctcttctgaaaaagcagagtgcattcaagtctgtaggaaaacccttttcttagggaggtgattttttttctctctctgcttcttatttggcctactttacaatttctaactaactagttattggcatttactgacagtaaattattgcagtcaccaataaatgatagtacattgtgaaacaaaatatttgctcatattagcaaataggacattctttggctttgaagtctttcttttgtgaagacttcacacacggttgcttcagcacacagttgctgctcaggttttatgtatagatgataataatagaaagcacagtttactaacatggtaaaccaacggagttcaagtcaagtcagttaataccctaagaattagattttatttcttattctgaaaacttgctacacagggacttatctaacccatagtgtgctctgttgctgacttgattcaagttgcagcgtgttttgcgctgactctaaggtgcggaaatcctcacacctggcaaaggagaattcaaactgaactttttgaatataaggcaaaaacttcaagataagggaatatgattgatgattggtacgaaaaatgtcaaaatgtgttcccctaatacacgacaaaatagagtgacttctggacataaatctgccatttattaaaccattcactacaacaaataaataggtataaaagtggaattggaatttttatacttatttgttgtagtgaatggtttaataaaaatagaaatcactggtaatttccaccccaaactaaactatttcccttcttttaaaaaaatacacaaccaagattttaatgtaaaatattttgctttaattgtattttatgccttgattaatgaaacatggaaatattgattttcagttttggtcacctgaggaacctatctttgtttgcttttggaaaagcccattttctaaacagatacaatattgccacaacaatgtgcagaaacctttttgataataaaaaattgttctttgcctctaagtggatatttgcaattattttctctctcctaactagactgtaaaaagggctgctttagatcctgtagcttactccagttattaggttattaacaaacacccaagtctcgaagatatttctaattaaaaaagaaggcatattcagagttctttttaaataaatgttgtttacttttataggcatctttaaacttctggattttggtatgccatttaaaaatacttccagatacacatggaaattagtaatactgcagccgtatccttgcaaacacatctgtcagtgtcaaaggtttcaaggtttttcttaaaaaaagaaaacaaaaaagcaaacacctatactgcccaaatgggaggattagatacatggttagaaatccctcaggaaaagtgttttttcttttcttgttgctgccttaaaaatagaataatgactatttctgatggatagagacatagcattttaagctggtggtgtgtaaaatcccataggtatgtgcatgactttcagagagtatttgggggggaggttaacaagatgtggtgccatttataagcagtgttattgtttttgcttgccccgctgccacaagtcagctaagtcataacaaaagcttcaaactgatgctaaggaaggccatgcccctttggaaacaataaattcccaatctgttttatgttatgtacctgacatcttttcctgcattctctaccaggaaataaagatgaaattaaatatcaaaattctaatcgatgatatcagtgcaatgttcaggaactattcattaagatattagaaaaccattcaaagtggtaggacatcagagcctacttcttacattgctgtgggagaaatgcaggtttcaaatttaatatatatatataatttttttaaaagcagaagtttctttttatatttggtaaacttaagttccataaagccagacgctatacagtgcaaaggctaatgtggcaatagctctaaagacacagttgctgctcaggttttatgtatagataatagaaagcacagtttactaacacagtaaaccaacagagttcaagtcagatgagtaccctaagaattaattagattttatttcttatgctcgaaatttgctacacaaggacttatctaacctttattttgctctgttgctgacttgattcaagtctcagtgtgttctgtgctgactgtaagatgcagaagtcctcacacctggcaaagaagagttcaaactgaaaaggggtttggtgcttcctggtttgtccaggttacctgttattaatttattattagcagcccaagaggagatatgtgcccaatgtacaatatcttatgtttgacttataaacattatcccaaagcaacatcaaatacagttcaaaagcccaagaggaaagggggtaataagaaatcagaacactgaagaatgtttaaaacattgttttctaaacactaacaaaaaaaattaagggcaaactgaaaatacaaatgagatttacaggcactgtgtgtaggaatgtgcaaaaattcacttagcttttcttttgtttttttggtgttgctttaagaaactttatcaaatatatttcttacaaatataaagctttctctcccaattgaaggcaattaaaaaaattcaaagtttatcaatactcagtacacaggtgaaccagtcaaattcattttctttctggaaaagaataacaaaccaatatttaggatgttcagagactcaacaaaaaccattctagaaatcacccagaacaattgttttctgttgccaaagccttttgttcttcaaaagtcaccatccaccagctgaagattttacatgcagataccagataccttaacttgtatttctttagtcatcttttggcttggaagtttcctctgttgtctttgctgaatccttcgctttacctccattcttaggtgctttggagctggaagcagccttcttgcacttatcctttgctgtgttctgtgaggtttctgtagtggagggacagctgtccagatctcctgagagagcatcaatggggtcttggtcatctgcaggtttctttgaatcctctgatttctttgtaggtggcttcactggtttgtcctgtccattatcatccaggagatgtctgtattcaggtgggatagtgtcatctctttctccaagcttgtctctatgttcagctttagctttttcctttactttatcttccattggtttgttctcatcctgggtcaggctgcctttgtcctagactgtcagagagtttatccaaggcatcatcgaggtctttgtcactctgcgaggtatcacggggtggggctccagcttgggtcgttgaagctggggtttgggaaaccacttcagagatggcagcagcaagtttagcatcttcaaatttaagagatgaagcattttgtggaccagagaagtcctcagacaaagcatccagaaggaagtcttcactcatgggtggaagctgttccttagactcttttggcaggagtggctttccatctttatccttgacctcttctaatctataatcaggaggaattgtttcttctttttcaccaagcttttcacggtcttcttctttggccttctccttgactttatccatcacaggttttccatcttctggatctgcttcctttttccccaggctatcagccaaggcttctacagcatcatctgggcactgtgcccttcaaggtagccggctcagggggtgctgactgtatactacacatggaggtccgagacacagcctccgacacaggagctggagcagcggccttagattcttctgtcttttcagttggcttagatggtttctctttacattcagaccggtcaaaatcttctgaaagttcatcaatgagttctgattcactccgaggcttgggtttttcttcaggctctggcaatagtggttttccatctttatccgtggctggttttaatctgtactcagatgggattgtttcatcatcctcaccacacttctctagtttttcttctttagcttttgcctcatcgacttccttaattgagcggaggtcgagctcaggttctgcttgccgggtgcccagtgaagccgacagagcctcgagtgcttgatcactcattgtatccttctccacctttcttttcttctcttggggtggagcagcacttctgactgtccctgctgactgagcttttaaaacttctgtagattcctctttttcagttttctttccagcagctgtaggcgacccacaggtgaagtcagatgacaaggcgtctatagcatcatctggccctatgggtttcgaagagtctgcaggaggccctgtgatcccttcctttttagccaatagttccctatattttggaggaattgtgacttctcttttacccaattcctctatgtaggtggaactcattggatctgaaacttctggtccagtatacgttgtattttcttcttcagtttcttcaggtcctcctaaagtatctattaagtcatccaaagcagcatccatgcctgactttcccgatggtttatccggtttagattcaactggcacagctggggttaatgatttcttttcttttttcttgtcacccggcttgccagatattgcagtgataccagcaacactctctccaccagcagaaatcatgtcttgtggtttagtctttggttctgttgatttctctgatggctgctgttcagctgatctggaaactgcttttttattgtgagcatcgttacttcctgtatctgatgcctgcttgggtaggctttttggctctgtgtgttcttttggctttccttcttgggattttttctcatgaaccacagacagcttggttgactgtgacttcttctcaggttctgtttttacagcctgttttttgtgttttttcttgttaggaagatgtggtccttccatctgttggctgactggaatggccttggtttctgtgggattcatactggaagacttgctggttgcaccagaggaagctgacaccttggtggccgaggctgttccaccagcataggttctggaggattgactgctgccgaggcttgctgcttttttctcatctgatcctttcttttctcctggtttggaaggcgattcactggttttttcactgacatgctcatgggtgcggcgggcggcctgctcgccgggccgcggggaggcggcgggcttctggccg

SEQ ID NO: 46660 - DNA, 1305 bp, Homo sapiens
tttttttttgatggttttatcttccctttattacaagaaggaacaataaaatagaaacatttgtatggaaaatgcagtgaggagtggtagggaagcaggtgaggaggggacagggcagagaaactcccggttcagggagggaaggggagcaggctgcccccaagccctcccacgcagaggatcatgacccgaggtccagggccctagagctggtggggcagtgtgggggacagttctgtgcccggctccacgcagcagtctcgacagcaacagccagctgccggccccccagccactggtgtcagcagctccccatggctcgccgtctgcccctgcccctcctggctggtgcccagctgcagtttcctcatgtgccgcaccacagccgtggcattgaaggcttgcttccacttgctcttggcaaagttcttcttgatctgctcactcaccgactggtggatattcttatctagagctgtatctcctgcaatccatgggtgctgcaaggcctgctcacaggtgaatcttttctctgggtccttcctcatcacgtggcggatgaaatctttggcagagtcagagatgtcgtcccagtaaggagagtcaaactcgtactcggccttcaaaatctgttcaaagagtttggcatcattctcgtcatagaagggagggtaaccgcagagccagatgtaggcgatgacacctatggaccagcaatccacagccttgctgtagggcttctgggcccaggacttcaggggccacgtatcccggagttccacaggcggtggagagcacactgcccgggtcctccatcttggagaggccaaagtcggagatcatgattttggagtcttcatccaggctgtagtacagcagattctctggcttgagatcccggtgtacaatgcccaggtcatgcaggtatttcacagcatccagcacctggaagatgaggcggctggcgtcccgctccgtgtagaagcctttttccacaatacggtcaaagagctccccacccgacaccagctgcatgatgaggtagaggtggcccccactctcatagatgtcatccagggctacaatgttggggtgcttgatcttgtgcaggacagcaatctcattctccatgctgccttccttgccctccagggcctccttggcaatgcatttgatggccaccagcttctgcgtcctcttatcttctgccaggatcacctccgagaaggcccccgtgcccagaacatctcggaagtcgtagatgtctctaatgtcctccgcctgcttccacctggtgcgtccagc

SEQ ID NO: 46661 - DNA, 615 bp, Homo sapiens
gaaaaaaacatccaagtccaaggctattactccaaagcgactcctcacatctataaccacaaaaagcaacattcattcttcagtcatggccagtccaggaggtcttagtgctgtgcgaaccagcaacttcgcccttgttggatcttacacattatcattgtcttcagtaggaaatactaagtttgttctggacaaggtcccctttttatcttctttggaaggtcatatttatttaaaaataaaatgtcaagtgaattccagtgttgaagaaagaggttttctaaccatatttgaagatgttagtggttttggtgcctggcatcgaagatggtgtgttctttctggaaactgtatatcttattggacttatccagatgatgagaaacgcaagaatcccataggaaggataaatctggctaattgtaccagtcgtcagatagaaccagccaacagagaattttgtgcaagacgcaacacttttgaattaattactgtccgaccacaaagagaagatgaccgagagactcttgtcagccaatgcagggacacactctgtgttaccaagaactggctgtctgcagatactaaaggagagcgggatctctggatgcaaaa

SEQ ID NO: 46662 - DNA, 444 bp, Homo sapiens
tggaaaccgtttgacatgattacgaatttaatacgactcctatagggaatttggccctcgaggccaagaattcggcacgagaactggagaaaaattacaataaataaaagattgccaaaaacaccaagtaaatctattaaagaatcctagatcaacctagaactttcatattaaaagagaaaatacagatacacgttgagcagaaatgacttttagaagtttttagtagaactaataacccttttttatgacgtgttttgggataggattgaggttgaaattgtctctttatttgcaaacaactcagtattagaaagattctttaagtatttattagtcccagtaaccaactgagaaatagagtcgttgaagtgtatgtataaaaataaaatggtgaaagctaagatttatgcgctcttaccattttgatcttgttttcagtga

SEQ ID NO: 46663 - DNA, 1226 bp, Homo sapiens
aatacaagtagatcagatgcatttcttcattgtatcaagtaactccagtttaatgtaatacaatttagtgcatttcagtatctcattcacagttcgacttctgtccaaatacttgtgcaacaaaaagttaagaaatggagacgaactccaggtgacattgtcattacacagcttcaaattctaagacaactcaatgatctttgaaaagcgtacgctgctgttgcctgggccggcgacaccaatgtccctggtaacttcctgggctccctaaaagtgttcccgtcattctatttcccgagcagtttgtaagaatgccaccattatccctgaattaacaagcagccagtggcgagtgttcatgataaaactgaattcatgtgtccaccccactccagcagatcagtgtgacatcttttacgcaaaaattgtttttgcatcctggccccgatagggcaggaataccggagccgggatgtctgcatcccccaggtcggccccacggcaggggtatggggcagagccagggcggagtcaggggtgtggccgggccccatcccccgaggcccgagggggcttgcctttggtttggggactagctcagtagagaaaggggcaggcacacggccggggacgtgctgtttccagaaagaaggcaggcaggcttttcgggctggccgtttgaaccctgagcctaggtgcagtgcaagggctagaagcacatcgcgccgtggagcactagtattgcacgccaggggctgcatgcagtgagccacaggccagaggcctgcagcgggagtctacgcatggggctgaacaagtcaggtgaaaatctgcagggctggagagattatacttggcttgttgtagaagtgtctcaggtagagacaaagcatgcagaaagttactcattcttcaccccaaatctgaccccaaccggtagtcacaacaggcatggacagcctggcaacagctactcaattgcacgtgagtgaaacacacagctgggtccaaccacggcttttccttcaaatcaacatcaatgctcagcaataccgcaacgaacagcgtgaggaaagattctcatgccacggtgcgcgaaagggagtcgggacaggcaaggcagagagactcaaaattcatcgacaggacgtgcttttttttttttttttacacaagaaagtgctgcttacattgttgttttgtgttatttagtgatttgttcagtg

SEQ ID NO: 46664 - DNA, 1281 bp, Homo sapiens
ttttttccaatatttaactgatatttattttacttgaggatgatgtaaatttccaaaaagcatgactatgagacgataaaatgtccatccttatatattttcgtatgccaactagtagagtcctaaaaaattagcatttacaaaatacttggtaaaaatagcttttaaaagttgtcccaagagatacataaaatcaaccccaatttttcatgacaattcattctccctcgttatctacagattcagttttctgtgcctgtgaaaaagaaaggaaaaaaaaacatatagttactactgaaactactataagcaaaggaaattccacccaccaacacacacagttttgaacatttgttttcttttttttttccagctttactgcaaaacctatttcaactctgagtgaagaagacaaggcaggaatatattacacaaacactttgtttcatttattgctttctgcttttcaaaccaccacagaagccttacctgcaagctcccactcttcataatgattaaaaaaaaaaaaccaccacactactatctgattctagtcactgcaaacatgcagaattttctactgtacccttaactctcactgtttcaatctgcccctttactgacagtgtgctgggtggggtgcctctggaggttgagacattaacagttgagcgagagatgtggatctgcaataacattacaggcaataaaaagagacattaagaacgtgctatcaccggctgaaggattgagaaatttctttaaagacactgattcaatcagtgggaggtatttatggaaagtacctcttcagctttagtttcaccattttcagatggtgcagtaccttcctttccagcttcctgcttttcctccttcttccctttagcacctctgctaatctttgctccaggttctttcttagcagatgtttttcttggtttgggttcaggttttggtggagcaggtttcgctgacaatctggcagaccgtcttgtgggcttactttgttgaatgactataatgtatgattcccatcaccttctccaggtaagcacagtgaaacatatcccaagtcccctgggcacgatgacactcaagaggaagtgtttctcctgtttagttactttggatccatctttgccctctgtattctctggagactttctcttcggcataatgactatgtcggtgaagcaaaaagtaaagcaacggactggaactgctggcgccgccgctggatgctgcctctgccgctgcagctgctcacgcgcagggcac

SEQ ID NO: 46665 - DNA, 1282 bp, Homo sapiens
agagactcaaaccctttcaaggcacacaataactgttctggatttacctgacaaacctagttgagtagcattttgacagaaaatatcagactgaaagttcattcaaatgtacttaaatgtacaatacagtgttcaatagtttttattgcagtgatgtttttccaataatttaagtaattctcttcctagtataatacagttttcataaataatgtttacttgctttctttatattttcaaataaaattaaaatgctcgagcacttcctttcagaaagttataaaattaaaaataattattttaaatgctcattcaaatgtgtctgtatacttgctatgcccctttttctataattccaaactgagactgatttttcagagatttttaactttaataattttaaatctagaatcaagtgaaacagatatgttaaatactgagtctagttttcttccatcttatggagcttcatggaataagaaactaatctagtgcaaatgaagattaaatatttctgggtgatggagagatagtcaacaaatttatttatccatcctctgcacatcagtccactggagcaggagttctacacattaaaaatgtaatgggatcagcctaggcattgtttggtgttcttttgttgtattttttagaatgggggtgggggcctaagtgtccttatgaagctgtggtccacgacaggagcttgttgggggagtaccagggttctgctgctttcctgcatctgagcaacacaacagagatcatcagttttaaatagagtagccctcacaatcaaaatatcatagaatatattgtaaagttatgttgctaattttcctttgaaatataaaatattttaagctttttgtcaaaagtggtaacatcttaatacaaataaaaacctttttgtggttgtaagatttagcttataaatcattcaaattgaagtgaaagaattaccaggtcattgttaatgacttagtctattaagaatatatgtatttttgtaaaggaaaagcacttgtagatatttaatcagtacaagatatgtcttttgcagaaataaaatgctgcttagagattctccttaaatattttttatttttgtgctcaaatgtattttctgttgatctatggaatgttctgtacaaagctgtataattgtactgttgggctagatactttttttttttaatctggacttagccaagtatatttcaccatgttaaaatacagtatctttgttattaaaaattaaattgcataaaaaaaaaaaaaa

SEQ ID NO: 46666 - DNA, 1229 bp, Homo sapiens
ttttttatctgtgaacaatcaagctttatttttacaaaaatgaaaattgtagcatgtctcaacagccagcctgaggtagggctggctcagaactcactcagaactgctgggttccctttgctctttcttggtttcaaagcaaaaccaggccacagtgccccaggaatgaacccccagccccgagaggttggtcaagggtgaggtctggctggtgccaggaggctattggcagcctcacctttccttccaggaaggggcagaaaggaaccatctgggaaggtgggagcacctcacctcactctgtaggctgtcatggctctaataaggggtataggatgggcctctccaggccagatccttgctctggccaaacagggacgcaaggcccgggttcagccgcactctaaagcagcaggtcctgcctctccaacaggttcctgggagggactgcatctctggtaagctccaaagtcccaggagtcagaagcctctagtgcaaggtgcctgagcactggggtcacaggcccaggagcacagtggggcagtgaggaaggagctatcactgcaccctccaggcaagagaagtccctgagtagctggtttcccttggcccagaggcaaggggtgcgcctgacggtcatgggttttgaaaatccaggacgtggaggttgtaagacagggcagcatagagatgcttggtggtgagacgcaggcagtacacagggctgctgaggggagtcgacgtcagcgggaaggcgtgcaggcaggccctttgacgccggtcccacagccgtacaacaccgtagtaggaggaacctgtggccagcaaggtggttgccatctgtctgcaggcagtacagggtgctgtcgtggggctcctcccactccatgacacatttccggacgctggtgcggaggtcccagtagcgaacataggtgtcatagccacaggacagcagtgtgaaaggggactcatacatgacatccagcaccccaagcccctgggggaaagtcactgcccaagtgtgtcatcagctgcccactgttgaggtcccagattctcaggggtgagaagtgcccgcaacaagccgtccctgtcacaaaagagctgagtaatgggctgatagcaatggaccagactcggtcttcagtctggatggtgtgtaagcactgccccagccggcctgaggccaaaggccacaccttggccgtcctgtccctggagccac

SEQ ID NO: 46667 - DNA, 1230 bp, Homo sapiens
  misc_feature (1)...(1230): n = a,t,c or g
cggacgcgtgggaaataaaattagaactgcgttttaagttctaatttgcatttattaatttgtccaaaagcaagaactcttggaaatccttgaaaatataagctggaatgttttacttagccatgcaagtcatttatgtatacatccagccagctggaaatctgagaagtaaagaggtaggactggaaggaaggagaaagcttgagtctttaaggctagagcccagctgtgctgcctgccatcttctcaggaatggcagtgcgtattttctggctgaaaagtaaagcatgtatccaccgctttctcatagcctcgaaacatggagaaaagcaacttgcttttgccttggcaagcatgctaacctaagttaattcaagttttttttaacttaccctttccttcactggaagatttttccataagagaattccattgtttcagaaaataattataggggcccttccaagttctttgaaagattcataaccaactattcactattataacatgtttcccagtgtaaatgagtaaggaaaaaaaaagtgtaacaggtgcgtgcagatgaggagtgaccctcatatttaagttattttatatttgactggacattgttcagaagtgtgctttaagggacacttgttggttgtctgcccagcatctctcaagaatatccctcctgtcctccacatggttgtgcagggccatgtgtgaagacagcatgagtcttaacnnnnnnnnnnnnnnnnnnnnnnnnnnnnnnnnnnnnnnnnnnnnnnnnnnnnnnnnnnnnnnnnnnnnnnnnnnnnnnnnnnnnnnnnnnnnnnnnnnnnnnnnnnnnnnnnnnnnnnnnnnnnnnnnnnnnnnnnnnnnnnnnnnnnnnnnnnnnnnnnnnnnnnnttaacccctctttagattggaaaaaataattacaactttaaaaatagcttagtgttgaaccctttggtaaactaaagacccttttataatgcacatattcccaacaaaattaatatattttgtgagattaaacaatgcttgtatatgcttgaactttcttaaaatatgtccatgtcatactattatgaatgtacatttttatgagtcataaatattattttcaaaagcactacaggcccatgaattacttcctcacttttgcagttgattactgaaatgtaaatcacaagaatttgtcaattaaatcattttaaactgcaaaaaaaaaaagtc

SEQ ID NO: 46668 - DNA, 553 bp, Homo sapiens; identical to SEQ ID NO: 1090

SEQ ID NO: 46669 - DNA, 1339 bp, Homo sapiens; identical to SEQ ID NO: 1091

SEQ ID NO: 46670 - DNA, 497 bp, Homo sapiens
cttacatattccttcgtgtcttcatctcactgacctgtgtggacctcatcactctgactctgccttcttggaaaggccctgtcactccacagatgtctggccagcttcaaggcagaaggaaaaacaggaaaagctcttttaacagcagcaggaacaagagaaatgactaaccatactaaaagactggtaacagcagcagcagccagacaggcctcaccttaaggacttgggctgccagagcaaattcagcagagcttatttggcctcccattcacacagctcagttctgtgcccacatcacctttggggaagaaatcagcattctaatcagggacactacttcaggagtcctccacagcgagtccgtcatctgtcactttatgtagatcagggttctagacttcttccctgaggttctcagaagcagctctcaggatgaacgtattgtcctcttcccctcttcttgcaaagtgcacagctaatctaatgttgtctct

SEQ ID NO: 46671 - DNA, 1345 bp, Homo sapiens
ctttcaaataactctaatgaatattcaagatattttagccttttaaaaagttgagatttagctcatggatatattttttggtagggaaacattagggtctccttttcttccttttacctagaatgcctcatttaaaagtgccttgaaaacatttagctccccttcttcatgagcatctgtagagctgaaagtattctggaactttagacagaaagctgaaaggaatctgcagtctcctgctgcagttcaactctgctgtttttcagtcatttcctactgtgagtggagtgatgtttgtgtgtgtgttggcaacatgcctaatgttttcttaatgatgacaacaaatattttaaaactgcatttatcattttttaggtcttcattaaattttaaaatgtaatatctgtttcccaccccctacattaggaggataatttcttaaaccacattgttttaattgatttttcttatcttgatttctttcattagaaactatccctaaatgtaaagatcttttgccttcaaatttggcttattttttctgatttatgagggtttgaaagaaagaattcacctaaaagattccatttccagttttataatgtatttcaggttctgaataacaatatttttccaaattgaaagtaaatattccagaagttgatagcctggttaaaagttagatcctctattaccattctaagcacattcacttctatattgaagttttggtaaaaattcttttttcttttttaataaaaaattaggttattactttttttataaccagatttttaaagcactaggttttaaatcagtgggtatcataaaagccatatataaaagatcctttcttatagtaagacttgtgcttgttagcaggtttttctgttagtttttcccccataacatttaattattactaaaattgtatttacaatagtggtgccaaatcaaatggtaatttaaataaaatctattctgtgtttatgtagggtggtataaaaaagaggtcttcatttagacatgtgatttctaaaattccagaaagcaaaattgataagatgttagaaatttggaccgttatttataatcagggtagcattaaaatggagaaaagaaagttttctgaaaaaatgcagtaaatataagccacatttctaaagtttatttttatgaaagcttcttttaagattttgaaatctattctgcattcccaagagtttatgtttattgtattttatatgatctacaacatataaaattgtgtatttttctttggttgtccctattaacaaaaaagtattttaataaaaaattgaaatgaaaaaaaaaaaaaaaaaaa

SEQ ID NO: 46672 - DNA, 449 bp, Homo sapiens
  misc_feature (1)...(449): n = a,t,c or g
gnntgnntntnncttganactttgaanaccnnttgactgattacgaatttaatacgactcactatagggaatttggccctcgaggccaagaattcggcacgagccaatttttacattttttgagggggagtgagttttaggaaaggggaattaagattccagggagagctctggggatagaacagggcgcagattccatctctccccaagcccctttttagtgactaagtcaaggccccaactcccctcccccaccctacgctgagcttattcgagttcattcgtactaataatccctcctgcggcttcctcattgttgctgttttaggccaccccagctcagccaatgattcctttccctctgaatgtcagttttgtttttaaaagtcacttgcttagttgatgtcagcgtatgtgtatttggtggggaaaacctaatttcggggatt

SEQ ID NO: 46673 - DNA, 2093 bp, Homo sapiens
ttttttccatataactaaaattatgtaatcatttatttataaaataacaaaaatttatgaatagatctgtttattgtactgtgaaaagggtcttggtacatgaaacattatatactttgaggacagcattcagaactgttaagacaaaagacaaactataattttaaactcaatcttgatttaagggaaaggctataaattattggctgaaaagtattcagcatgaactcagattctatataagcatgaaagagtacaaaagatgttggagtccagtaagcccatacctaaattaactgtaaagcttcaaggactttttgtttatttttatatactagttttcttctgtgacaagttgattttatctccaagacttaaggccattccctggctctttgcacgaattcttatatggccgggtaacagcagcatctggtccctggtgaattggcttctcaatgctgacatttggcaagtgcatcttcaccaaatatggaacgagcataaaggttggctgccataaagccacagtaaccagaaagggccttttctggagtcaggcatttcatattggttgactttaatatgtgctgtaagtagtcatttaaaaccaaccctgttgggtgttaaactgtccactttgttttcccccatccaaattcggccccacatcctgacggaattcctgcatccagtgcaagttgcaggctggatatagtcccatgatgtcgatgtgaatatcactgagaaccacacaatttctgtcacttgctgctcccagagacatcataaactatattacccaaaaattattcccattttctgttgatgcttactttgacggttagcttttaatatttgcggaagtcatgaggagcaagagtcaaaggagacggcttttccacaagtttcagatcccctagtgtagctagttctaatgtgcaattctgcaaagtatcactggtttggttcacaacaagtacatcccaggacaatatcatattggttgacatgaacgtaagcttctgcatatacaggatctgagaaacctgtcaattgggtgaccttgttaagtttagatgctaggggatctgctgcctctttcctctgtgtgttacccattgctgccagtaaactcagctgaaactgatcttccttgcagttcatttcattcttagcagttagttgcatgaaggaaatggggtcatctggctgtactgtcacattcctcttttcagattctttcttttgggataatttctcttcttctagtttagcagataacatgtgagaaagggactgtctgcattccttattgaaaatgtcattcattaaaggtgaacattcagacaagaccttgaggcacagggaaattcgatccacatcatcatcagtaattggcttcttaggaagagaggattttcccaaatgcaggatagtagccatgagcaacatagcctcagcaacaaaagaattttgctttttcttctcctgaaccaaaagctacatagcgaaatgcaatcttggtaagagttgtggcaagggaggcagcaacaaagaaatctccatccagaaggaatcctctcaagggaggtctgtcttcctctttcttggtgggtctagaactgctaagggcactctgagttgcataggtacccatttcagtaaccaatttctgaactggccctacagttatttcttcttcaggttttaattcaccagcttctttctttatttctgactctacaattgggatctctccaagggacctgcggatctcagtcatcacactctgaatgtcttccttggtactacagtattctcccaggatccataatgctcctcggtaaatcttgacagatttaatagcatgaaagacttcaagcatcttctcaacaataagcattctcaggttatcaaagcgctgaatggcttcacgaacaaactccaagacatcagcagctgctgcttcgttgttgtcactgagaaattccattaacacaggaataacatttgcagccatatctggaaatcggacagaacaggaatgcaatgttcgcactaggagttgtctgtatttgtcagtatcttca

SEQ ID NO: 46674 - DNA, 2538 bp, Homo sapiens
gcgcagacagtgctccagcgcgcgcgctccccagccctgcccggcctcgggccgggaggaagagtagctcgccgaggcgccgaggagagcgggccgccccacagcccgagccggagagggacgcgagccgcgcgccccggtcgggcctccgaaaccatgaactttctgctgtcttgggtgcattggagccttgccttgctgctctacctccaccatgccaagtggtcccaggctgcacccatggcagaaggaggagggcagaatcatcacgaagtggtgaagttcatggatgtctatcagcgcagctactgccatccaatcgagaccctggtggacatcttccaggagtaccctgatgagatcgagtacatcttcaagccatcctgtgtgcccctgatgcgatgcgggggctgctgcaatgacgagggcctggagtgtgtgcccactgaggagtccaacatcaccatgcagattatgcggatcaaacctcaccaaggccagcacataggagagatgagcttcctacagcacaacaaatgtgaatgcagaccaaagaaagatagagcaagacaagaaaaatgtgacaagccgaggcggtgagccgtgcaggaggaaggagcctccctcagggtttcgggaaccagatctctcaccaggaaagactgatacagaacgatcgatacagaaaccacgctgccgccaccacaccatcaccatcgacagaacagtccttaatccagaaacctgaaatgaaggaagaggagactctgcgcagagcactttgggtccggagggcggagactccggcgggaagcattcccgggcgggtgacccagcacggtccctcttggaattggattcgccattttatttttcttgctgctaaatcaccgagcccggaagattagagagttttatttctgggattcctgtagacacacccacccacatacatacatttatatatatatatattatatatatataaaaataaatatctctattttatatatataaaatatatatattctttttttaaattaacagtgctaatgttattggtgtcttcactggatgtatttgactgctgtggacttgagttgggaggggaatgttcccactcagatcctgacagggaagaggaggagatgagagactctggcatgatcttttttttgtcccacttggtggggccagggtcctctcccctgcccagggaatgtgcaaggccagggcatgggggcaaatatgacccagttttgggaacaccgacaaacccagccctggcgctgagcctctctaccccaggtcagacggacagaaagacagatcacaggtacagggatgaggacaccggctctgaccaggagtttggggagcttcaggacattgctgtgctttggggattccttccacatgctgcacgcgcatctcggcccccaggggcactgcctgggaagattcaggagcctgggcgggccttcgcttactctcacctgcttctgagttgcccaggagaccactggcagatgtcccggcgaagagaagagacacattgttggaagaagcagcccatgacagctccccttcctgggactcgccctcatcctcttcctgctccccttcctggggtgcagcctaaaaggacctatgtcctcacaccattgaaaccactagttctgtccccccaggagacctggttgtgtgtgtgtgagtggttgaccttcctccatcccctggtccttcccttcccttcccgaggcacagagagacagggcaggatccacgtgcccattgtggaggcagagaaaagagaaagtgttttatatacggtacttatttaatatccctttttaattagaaattaaaacagttaatttaattaaagagtagggttttttttcagtattcttggttaatatttaatttcaactatttatgagatgtatcttttgctctctcttgctctcttatttgtaccggtttttgtatataaaattcatgtttccaatctctctctccctgatcggtgacagtcactagcttatcttgaacagatatttaattttgctaacactcagctctgccctccccgatcccctggctccccagcacacattcctttgaaataaggtttcaatatacatctacatactatatatatatttggcaacttgtatttgtgtgtatatatatatatatatgtttatgtatatatgtgattctgataaaatagacattgctattctgttttttatatgtaaaaacaaaacaagaaaaaatagagaattctacatactaaatctctctccttttttaattttaatatttgttatcatttatttattggtgctactgtttatccgtaataattgtggggaaaagatattaacatcacgtctttgtctctagtgcagtttttcgagatattccgtagtacatatttatttttaaacaacgacaaagaaatacagatatatcttaaaaaaaaaaaagcattttgtattaaagaatttaattctgatctcaaaaaaaaaa

SEQ ID NO: 46675 - DNA, 583 bp, Homo sapiens
aaaaacgtgggcccggatggggagtaggaggaaagcatcacttgctgtcccagatcctacaagacatgcgtttcctggcagggattggccaggagcacttcttcaagaagatcgaggctgctcactgcctggcctgcgacatgctaattcctgcacagccgcagctcctccagcggcacctgcactccgtggaccacaatcacaaccgcaggttggctgctgaacagttcaagaaaaccagtctccatgtggctaagagtgttttgaacaacagacatatagtgaagatgctggaaaaatacctcaagggtgaggaccctttcaccagtgaaactgttgatccagaaatggaaggagatgacaatttaggaggtgaggataagaaagagacacctgaggaggtggccgcggacgttttagcagaggtgattacagcagcagtgagggccgtagatggggaaggagcgcccgctccagagagcagcggggagccggctgaggacgaaggccccacggacacagcggaggccggtagtgatcctcaagccgaacagctgctggaagagcaggtgccctgtggaac

SEQ ID NO: 46676 - DNA, 377 bp, Homo sapiens
cactggaggagaagcagacactcactagactgctggcagcccgtggagccaccatccaggagttgaacaccattcggaaggccctgtcccagctcaagggtggggggctggctcaggccgcctaccctgcccaggtggtgagcctcatcctgtcagatgtggtgggggaccctgtggaggtgattgccagtggccccaccgtggccagttcccacaatgtgcaagattgcctgcatatcctcaatcgctacggcctccgtgcagccctgccacgttctgtgaagactgtgctgtctcgggccgactctgacccccatgggccacacacctgtggccatgtcctgaatgtgatcattggctctaatgtgctggcgcta

SEQ ID NO: 46677 - DNA, 1363 bp, Homo sapiens
  misc_feature (1)...(1363): n = a,t,c or g
ttttttttttttttttcaaagccgcgcaatcatctgcattttatttgcacctcatttgcaagttgttaatttgcaactctgctccttccactccaggttccttctctcccatcacccctcagattccccagtggcccaggaaaaaatatcttggtctttgccaaggtagactcagccttgtcagcaggcctgtcctgtgttctcaggggaggcctttacccaaggccacaacaacagcaggaatcccgagtaagacgccaccttgacggcagggaaggctggatcttttcacagggcagaactgatttgatgaggtgaacagtaaggtgagcagaggtgggaaaaggccagtgggtgaatgcaggaacagcaccaggagctagagccccaactctggcctgtgggctgtctcccggtcctcagaggcgggacggggttcctccacccaccaccactgtttccccagtgatgtagctggcatcttcagagcacaggaaagacacgatgccagcacaatcctctggctcgcctaaccttcttatccgcagggtttctttcatgctttcctctttttccttgtccatccagagcatcctgctgaagctagtcttgataagtccaggtgctaggcagttcaccctaatgttccttggggccagctctatggccagggtcttggtcaggcccagcaaggctgttttactgacattgtaaggactgaagccaggagatggactgaaggctgctatggaagacacgatcaccactgagccgcctcctcgtttctccatttctggcaccactgcctttgtcatcagggctggggccttcacattaatgtccagagtcttgtcccacacctcctcagtgacatccattatgcttccaaagaaagggttgacagcagcattggagactaggatatcgatacctccatgaagcttcacagccggtggccaccagccgctcccggtcctccgccttccccacatggcacacggtgcctgtcacgctcagcccctccccctgcagcgtggccaccgccctggtccacattctgctgcttccggctgctgacgaccacatgggccccgtcctgggccaaacgccgggcgatggcgaagccgatcccgtcggtggaggccgttaccagggccaccttattcgcgagcgggtcccggcgggtcatcccggagctggccatccgcaccgaattccaagcccgggcacagaggcctagcagccccgtcttgtgcatggctcagaccagcaagtatgctcgtgccgaattcttggcctcgagggccaaattccctatagtgagtcgtattaaattcgtaatcatgtcatagcagtnttcaaa

SEQ ID NO: 46678 - DNA, 601 bp, Homo sapiens; identical to SEQ ID NO: 17756
  misc_feature (1)...(601): n = a,t,c or g

SEQ ID NO: 46679 - DNA, 2193 bp, Homo sapiens
gagagagagacttaagacggtttctgatttttccactatttaaataatgctgtgatgaatatctttaaaatcttctgatttcttacttttttcccccttagatgcctggaagtggtattttgaggtgaaagagtttgttcattttgaagatatttctgtctctctctcgacctgatgtgtagacgctcacttccagtagcagaaccaccttagttgtgtcttacagattctgaacaaatcggtttctgataagccatgtgttccaaagaatgtctgaataagaccgctctttatttaaatgctaagaggatgtcactactgcaatccatctgtggccgattttttccaagagccaatttcctttgttttggttgcaagaacctgggctctgctggcatgtcagctctctgccctccctgctgccgtggcttttcaagcgcttggcagaatcttgtacttcgtgtccacaatggtactgaatttggcatcttgcacagtcagcagagattaacaagtgtttgaaactgaaccttggccacatggttagtgagtgatttgtaattaagtttatagactcagaaggtatattaggggcatttggaatcagtaggcagagcaaagcctctttgaaaaaaaccacgtagctgattgggttttacaagagtgcatttgtctcccccttccacccccccaccttcaggtcttagtggttcacaagagcccagcagccaggctggctttttcattgtagggcgtggttgtcccagctggtgtagatttcaggccgccccccccaactccctgcccacagtgttgcagattgcctggctggcagcaagtccagaccacccaaatttggttggattcttcatttctccactgtagttggggtccattgattgtgcaggggaacgtgcaggaggtttttctaggcaccgtgttcagtgctgcttcactctaccagagattatggccaaattgcacggaatttggtttcttgccctctgaagcctgagggcccccccccttgcctggctggttgacagacccggggtggtcactgctgagacttcagagatcgcagctgctgtgagaatacggtgaaggtactttgttctggaagatgttgtcatacacttttccccagttattttcaaacttgacatgagcctatgttgactcactgggtgggggtcccttcttacgcagcacacgtggcaagtgcctgaatcggggctggaggcacttcagagcctctgaggggccaccacttctggcccaaaattgcagggttgtagatgaggctgcctgtggagaactggtgtgaggaggaagctgtttccaacaaagagcactttcatctgttgagatggctgtggtgagcaactgaacgagcctacgtgtgtacctgaattttccccgtaactcatttcttccatatgaagaaacaccaaactatgtacagagaactttttacaaaaggcagaccttttttaagctgtgtaacccacatagcctaaccacctggcagaatgactacgaataggggtcattgtgctggtaaaagcctctattacgactgtaagtaagttggatgttggcaaaattaaattgttacagtatttagagctgctgtagctgttccttcacaacataaaataggataaatgactagtacgtctttcaggtgggtggcaagcagaacatgcgtaatattctctacctggtctgtagctgtaactgtgatgtacagacaaagcaaaaattaaaagaacttatgaaaacaaatgcaatgatactaggatatacacttttgtatttttattcttatataaggttatttgctggctattgttggcctctagttcagtctgtgttatttaaattctaatatatgaattatttgaattgaattcatgttcggggccacgttgttgtatgtattgatgtacagccttgaatgtgaataattattgtaaactatattttacaactttttttctggctttattatataaattttctattgggtcagtgatttaatcatataatttaatgaatctgtttatcctttttttttttccaaatacttgtgctttaggtgtagttaccagatgatgaattttcctcgtatggtcagtagtcttgtaataaaaagcatgtagagtgtaaaaaaaaagggaaaaaaaaaaa

SEQ ID NO: 46680 - DNA, 2142 bp, Homo sapiens
tttttttttttttttttttcactgtacatttatttgcatgtttattggtttaacacaggggtcgcaaactcaaatgcccacaggggccaggttaggttagcggctgaagcagtctggggagaggcaaaaagcaatggcagggaggtgggacagaggaatgtgggccccaaactatgggggcagctgctactcagtgccagctgttcgtcgccatggggggaagcgggaccagagccgccgggtcttcggctttttcaagaggacgcataactccggattgttatttgaactgtcctgactttggtaagactctgtgacggtgacagtgaaggaggccgactcatcgtcaatttcacacaagtactcgccggagtcctcgagctggacagcgggcagcaccaggcggcggacagtgtcttccttctgcaggagcagcgcggggctctccaccacctcctctccatccttggtccagcgcacctctgcccagggccggcatagctcacaggtcagcaccacacgctccaggcgcacggctgccacatacaccttgccgctgggatacacgatccacgaggagacgtctgtgatggtgacagtgaagtaggcacactcatctccagcgacgcactgaaactcgcccccgtctgagggctgggtggcgggcagcaccaggcggcgatggggcccctcattctccagcaccacgaagtcactctcctccacctcctgcccgtccttgtaccaacgcacaggggcgtcctctcggttccacctcacaggccagcatgacacactcggaagttatggcatgcacgaacacatgttctcgggggtccacgatgtgcacgggaggatcttggacagtgacgccgaagaaggccgagaccccttctgtcctgcactcaaactcgccactgtcctggactttggcctcaggcaggatcagacggtgtttgcgcccatccatcttcaccaccagcaactcgctctcctccaccttctgcccatccttgtaccaggttgccgggaagtccacccttgagagctcacaagtcagcaccacccgctctgaggttgtgaaggtcaacgacaccttgtcctgggggctcaggatgtgcaccgggctctcttggattgtgagggcagctgagtcctgcacgccggggcagctgaagccgaccagggcaccgctgtcctggtgcttgacggcatgcaggatgagtctgtgctgcagacccttctgctctatacggtaccgcagggccccaggttacacctggccctccggctcgttactcttgagctcttccccattaaggaaccaggtaccctggatgatggtggagagatcgagggagaagacggcatcttccccgtcgtatacctgcacatcctccagacctgccaccaggcgagctgtgggcacaaggtgagcagaaccgtggaacaccacgtggggactacggccatgtccgctgactgtgcagatgcggaagcggtagtcaccctcggagggcacacagtcgcccggcacctccacggctccggctttctcgatgctgaagcactgaatccagtcttcagagcccacttcctgccgctccagccggtagatgaatggggtctcgggagctggctcgggaggcttccaggtcaacaggaccgtgttcttgtggcccttgaacatctctgccaatatggggggtcctgggggactgtgcttgacacattttactctgagaagcgtagtggtacgggagttgcccaggctaaaggtgacctcgccagcatcctctcgggtgacccctggaaggaccagggcatgcatgtggcctgagctgctctggcagatgaccggcagctcctccccatcacggctccagcgtccctcgaccccggcctctagagtttccactagcagcacagcattctctccttccaggacgtcgagcttccggggcaggcgcttcaggatgggccctttgactgtgacgttggccacggtgcgcacccggccccgcatctcgcacaggtagataccatcatcgtctgccttcagcctgtggatgatgaggcgccggacagtgccctcttcgatctgctcgtacttgcggcagggcagcagccgctggtcctcac

SEQ ID NO: 46681 - DNA, 2024 bp, Homo sapiens
ttcggggctcacacctatgaactcttggccaaaccagggcagtttatccacaccaacgggacaggccatggtggcaccgtgtcatcctcgtcatacaatgcctgatcatgctgctcctgtcaccctccacgattccacagaccaggacattccatgtgcctcatggcactgccacctcgccctttgccctattttctgttcagttttttaaaagtgttgtaagaggttccagttgatcagagtgcgcaaacacccttcctgtctgcgtgatgggaaccgcaccagcacacggggcacgcggaagccactgccgcaaggagatggttcccactctcacgcacatgagcagctcctggtcagtcccaagaggcaagggcagagggcatggtggctctcacagagctactttacaaataaactgtgtgtcttcctcaggagtctcttacaacacttttaaaaaactgaacagaaaatagggcaaagggccaggtggcagtgccatgaggcacatggaatgtcctggtctgtggaatcgtggagggtgacaggagcagcatgatcaggcattgtatgacgaggatgacacggtgccaccatggcctgtccagttggtgtggataaactgccctggtttggccaagagttcataggtgtgagccccgaagtaatcccgctgagcctggatgaaggctggctggaagcatctcatgtctgtacccgtcatagaaggagagggcagtggtaaaacaggggcatgggaatgcccagcctggaccccagtgctgactgcccgccgcccaggagtcctggcagttttcaacagctgacttaaagaagtcgtccagtaggaggttctgaagttccgggtttcgatcaaatgcatcctttatctttcctaggaatacacttctaatgatgcagccccctctccacatcagggcgatgcccaccataattgagagtccagccaaactcggtggctgcctgccttagcagcataaagccttgagcgtaagagatgatcttggaagcgtagagtgccttccgaatgtcctccaggaatgatttcttatcaccatcaaactggaacttctggggacccttcagctttttgctagcttgaattctctcatccttcagagatgataagcaccgagcaaagacagcttctccaatgagggtgacgggtacgccgtattccagggcggagatggcggtccacttccctgtgcccttctgcccccgcgctgtccctgatctttggcagcaggtgtttgccatcggtatcttggaacttgagaatattggctgtgatttcaatcaggaatgagtctagctctgtcttattccaatcctcaaaggcctgggccatctcgtcctgcgccatgcccagcacgtctttcatcaggtggtatgcctcacagatcagctgcatgtccccatactctatcccgttgtgcaccatcttcacgaggcccctgctccctcatctcccacccagtcacagcagggttctccagttcccacttttgcagcaatgccttggaagatggtcttgatgtggggccacgcttctttgttccctcctggcatgagcgatgggccataccgggccccttcctctccaccactgactccgctccccacaaataaaattcccttggccttgaggtctcggcaccgtcttgtggtgtccctatattcagaatttcctccgtcaatgatgatgtcaccagtatccaacaatggtaccaatttctcgatgaaatcatccacagcttgcccagccttcaccaggaggatgatccgccggggcttcttcagcttggagaccatctctttcagggactgggcacccaccactttggttccctttgcctcattggccaagaaatcgtcaactttggagacagtcctattaaaagcacagaccacaaagccgtggtcattcatgttcagaattaagttctggcccatgacggccaatccgatcagcgcgatgtcagcttgggccatggcggcgg

SEQ ID NO: 46682 - DNA, 1252 bp, Homo sapiens
tctctctttctctgtcaatctctccactctccaattctccattgtgtctctctgtccactttctcctttcctctccctgtgcctcatcttcctctcctctctctctcccttctctcttctccgtttctctttttcaccccactccttcatcttgtctcgctgtctatattgttttccttctctgtatcttcattgcttttgctttctttcaaactttctccttcacagatttttctttattaatcagaatcatactgaccaacatgtgctgaggactttctgtgtgctctgtgcttcacatacagtcatgtgcatctttccagttccacaagttagttatcctcatttctcggggccatagagctagtgagtgacagagctaggttttgtatgtcaaagcctctgtcctacatgacatggcttttcctgctgccttctcccctggtattcgtctccctcttttctcctctggctctgcctgggctctcctctggctctgccgagggggtggttttcagcctgggcccttgcagatgtgtctgtggcagcaggccacacagaccgcagcgggctgggcagcgtcctgagagacctagtgaagccaggcgacgagaaccttcgggagatgaacaagaagctgcagaacatgctggaggagcagctcaccaagaatatgcacttgcacaaggatatggaagttctgtcccaggaaattgtgcggctcagcaaggagtgcgtggggcctcctgacccagacctagagccaggagaaaccagctaaagacctgcaggctgcacccacctcctccccttcctaccccctaggatgctattcccttgggctgtggtggaaaaatgagggctggagccaaaatcaaatagcttgggagactggacattaaaggggctagaggcctgatggttagtgttaatgatcctgtcttagggcagaggccaccagggagtggggatcctgagggaaggggcagggatttctccttcttcttggtcctggctcccaagggcttctgtcttcatctctgcatgagctctccttcccagagaccaactcttttttattttattttattttattttttaatttatgtctggagcctggctactctgcatttgggattggggatgctgggtgggtgtgtggtccatgttcagcgttctagcaacacgtgtgtgtgtgtgtgtgtaaacgctatgcagccaaaataccatctggccagacgggcccacccac

SEQ ID NO: 46683 - DNA, 1249 bp, Homo sapiens
ttttttttttttttttttatatttaaaatactgtttatttgtgatttaacattaattagcattacatctaagagcaatatcagataacatttatacatttttccacaggacacagaggttcattggctcattctttatgccaaagcaagtaaatagaggcattagcaaaaggtgcaatagttcactgttatgtttaaaaaatatttatgcacattgcattcatttagatatatatatttttaaaaagttatggaaaagcatagttcacaggttactatttctacatacattgtaatacaacataaatgatgtagaacattaaaaaaatcttccaatagagagttaagcaactgaaagtttccaccaagagattaaaacactgattccagtagttagtgagatctagaatgacatttccaggctctggctcaactctgcattatcatatgcacacaaacagagccagctccaaaacacactgtaatcaatgtaattttttgcatgccaactcacccttaagaaacactttgagttatttttacccacgatcattctggatcattgattttgcatcgaactgtgacatcacttgggtgaaaggggaaacgcctatattaagcctaggtttaaatttgtatttacattaaaaagaaaggtcactgaaaagatttttttaaatctgtaaaaatcaagaagtggtagttttcttactggtgggattagacctgctgatttcttctagtgctgccctctaaagatacaaaaaattagaaagatttgacccttttaaaactcaaatatcaacccaagaaagacatggcttttgggcagagaagcagaattttaggaaatttgggacatgtttcccaacaaatcacactttgtatccctatcgtgaatatgagtcacccatcaaactagaattccttcttttcacatccccatcttttggtccccttaatttttcaactttccccctttcattctttttcatttggctaccttatgagacttttctttactcattagcaatactaagagaaaaatacagtttaagattcaaatatgaatctagatgtacctttacatgctctaatcctgttttaacaccaagtccctggattctggagttatatttaagtatactcagtaccaagcagccttaagtatgctctactgtgaaaagattggctaatatgcttaggacacttttatactgaacggtatacaaacatcaacatacaaaaat

SEQ ID NO: 46684 - DNA, 2509 bp, Homo sapiens
aaaaaaacaaaaacaaaaaaagaaggaaaatcttggagggtgggcgtgggaactcaggaccccaaagtggcgagtggtgtggggagggagagcctctctcccccttttctgtgtgagaggaactcttagtgtctggtgcagctattaaatgtgcaatgtgtcaagtagcttgttttacacgctacaacatagctcatttgtaacccattgtataagctgtgtatttacaaatataacacaacaatttaacttttccttagaatacaaaaagtcatgcatggtcctgggggaactatatgcttttccatttttaagtcaggactgcaatactgattccagttaatgagcagctaagcatccaatctgtctaatacagtgaccccctagccatccgggcctggcaatatacaattttttttcccctccaagtttgtaacactccccttccagaaaggcattgtgcaacacaggattatttttaaatgattctgaatttgaattaactttttggagaattctgtgatgcccttagaagaaattggacacgtattgagtgtcacaaagctggggctgggaattgctggtctaatgtttcattagacttaagaacctaaaatttttctcagttgggtggataaaaccactaacgcttagaaactgttttctcatgcagctatgtttctcttatttatgccttgaggactaatttctggttttctagctgttaatgcactgttgaccttcataatggtgccttacgcaagcgatcccttctgtgggggtctcatacaggggtgtgggcgatgcatgctttattaaggctcttgtttcacctggcagtgtactgtatcaacgtataatacagaaaaaaaatctctttaaggtcctccttcacaaagacatagagtgaaactccctttacatgtcagtatttgttcaacactttaggcaacttgactgtcagtgttaaaatggaaaacaggaaaatggaaaaatctgaccaattctgccaccttgagactttcatatagaccttgcacaacaattgtatagatcacacaccggctgtatttaatatgtaacattttcacacatattaaagatacagaagtattaaaaaacccccaatgttaatgtatttgcttaaaaggcacaagtttcacatatctgtctagctatctgttggtaatacagaaagtatactacttttttaaaaaagtgggcagaattcttgtgtatgtatatttgtgtgtacagtatgtgtatgtgtgtatatatatatattatatatatagataatatataaatattttttttaaggagaaactagaatgtttagctagaaaattccacagcctgtgaagaaatatttcaaaatggccataaaggaggtaaaaatgaaaaccataacctaacttttatagaggctttatctttaatttaacgatgtgcggaggactttcttgcttgaatctgttccgggctgtctgctctgtccatcaaatgggcaggtctggaatggggcaccttcggccgttcagaagtggcctgaacagaatgctggaacccaggctggactcggacacactaaggttttgattttgaatttcagccttattagaagatctaacctaagagtaagctaaccacagggattcttttgtagaacactttttatgcagatgaagctattttttcccagcaagtagattcttccagtttttccaaggagtaatttccccgaattggcataccacggcgtggacagctgatatttcacccagctgctggcttgtgggtgtggctctttgctttatatatatatacacacatgtgagtctggctgggctggtattttgtttgatcttcctggaaatgagcagtgactaacgctcacataactggtttttttttttatctgggctgatgaatacatttacctaagaaactcatttcgttttacttaagaggggaagtgcagttttcttttggcagttcagaatccaagcacttgatttgctgggtttgaaaaactccttttttggccttctatgtgcttagccataacaattccattaagcaagaaggtaagcaaaagacaaaaaaaaaaaaaaggaaaaaaaaaaacttgcactggcttgtctcacttacgaaacatgtcggagctgtttgcctgggtggggctgggtaccgtacctgtcaatgcctgtgattttcataattagcacgtacataaagaagtacattctgttcaggtgataactgagcctcaatcaagcagaaactttttgcttgaaattaaaaaaaaatttctattagtgaaatttctttttttttttttttggaagcaccctgttatctaaagaatctttgtaagatttttgtaaaattttgttttacaagattttatttgaaattgttttttgcaagattgttatatttctgtatgaatgtattttttattggaataacataaaagaattcttatcagcaaaaaaaaaaaaaaaaa

SEQ ID NO: 46685 - DNA, 2283 bp, Homo sapiens
ttttttttttttttggggagtaaatacatttattgatacccatttcatatatagttcaatgaaataatctataaatataaaaagcatttttcttttggatatcaccatggtccatgtaaatactcaagtcagaatcatctgcaggaagcactccaagtcacactgttagctttacagacctgaatatacatattgcattaaacagtggcacttatgtactcaagtggtccagtggctttggaatatatgtctactgggcatgtggaatagaaataatgtgttaggtttaaatcaatggaaagggtatcaacccatcaacaaaagcaacaattatgaattcatatcctaggcaaagaaagtaccacagttgacacttggtgtcagaatactggagacaaagtatgtaaaacaatgcctgttgcagcaccacgtgctcactccaactccccagtggacagtcccccaatgccttagggtcactcgtggtcaaccaaatgcaatcaagaagctcgatagcttagaataaaaggtctgtagaggctgatatcaagattaaagtaagctaaacatttcagtgacacaatgagtttcctcccctagaaggggactgtgggaaaacttttaattccctttgttacactgagcatgatcatttatctaatgcagaagaaagaaccccagacatctgggtactcagaacataggtgccaaaaattttcttccatttcaaagttttttcaatacttccgagggaactaatggcaacccaccggtggagccttggctctcccaccctgatgccagccataaaaattttcctcctcatttccttcaaatataggaatgtccttgcctgcagactatgtgtcttcccgagtttagccaaggcaaatgccgtttaaaaggtcttagttgtgcaatgtccaaaactgaaatctgagaggcagtgttagaacttaagcaaggcagaatttttagagtctactcaaatgaaagcctaagtgaagcatataaaaattcagtcttttctattattttcaactggaattgatggcaacattccctggtaaggatgggtaactggtgttatctccaggtccaaaatatcccaactacttaaaggggacccaaaagaggagaaacacacacttgagttctgtggtctccagaatttttttttttttttttttgccattttcaaaaaagatatagtagcttcagttgtacaccaccagttgaaggggttttcatccaaatgagaaactctaccccttgtctctagtggaacaggcaccagattcccacaagcagcagctcccatgtcctgtagcacgtggcatccgaccctggagtgaagagtaagctggcacagagccccgacgctgggattcagactagatggcgtttcgtggcgtgccattgtgtgtcagcgctttcagactggaggcactagtctggtgaccacagctcctgtgagaagtcacacccacctcaaaaacctcatgaatagcttttcggaaacagtggaagttgtagtctattaaaccttttctttcaaagctttcttcccttagaatgcagaccagtgccaaaaatttagtcacctcctttaaataaaggacagttgtatttattcagcttgataattgccatagattctttgtcataagcacttccacttccatcttcctttaacccatatatacaagacacatcaattacaacatcgatcatgtcacagcaaagttcataagattgcatatccacaggggaactgtctgttgcaatgtagattttgctgacaacatcaaagagaaaagctttttcaatacctgaatttgatataaagatatttaataggttttccaaggtcggcagttgtggaatgagtttctgcaccaccttactaaaggcttcaaatattgaatggtcatagatactagtcagataaaagctaagatggagtttttctagccccagcatctgccaaggtcatcattggccctttgatgaatgtccctctgtgtttctattttgtgatcatcagacagaccatcaactttgtgaataaaaacctcaaaattcatgtctgggttaactttgtaggctttagaaacagtaatgtgaagtcttgttaaagcctccatgtagtcatcctgtgcgtcaatgacgtatatcaatgctcctgttcccctgaagatcatctcatagtcaaaggttgggtcaaaaaagtccatttgcccaggaaaatcccatatctggaaattcacaaaagctcgtgcc

SEQ ID NO: 46686 - DNA, 515 bp, Homo sapiens
ccaagtgtctttaagacttaaaagcagtacatctctatgactccccacaggctggactttgctaatcaatctggtgggctagaagagaaatcctaagaaaaccttcctgcttaatccatctgtacacctaatagataagcatcggtataccaatacaatgaagcgatcttcaaatgctttatcattcagcgctggggccccaggctgaggtgattaggagttagtagtagcagctggggccacttgcaggagcggctcccattgtcagcttcagtgccctcagccctttctggcagctgcacagctgagcaagaagaaaccctggtgagaaggtgagaaagccccatgactcaacccgagggcaggtcccactcttaccagccctgcaagtttgagcctgaaaaacatcctttagtgccagggtggaagctccttggggtgccccacacccaccttctgtgacttaagagggccaagacagtggggggacgcactgcaaacaggaaacattccat

SEQ ID NO: 46687 - DNA, 1944 bp, Homo sapiens
catgggtgcaaaaatacttcaataggagaagaatttatatccacagaagatgtggaattagaagaagctattagaagaagtcttgaggaaatgtaattaaagatattaccacacaacatcaagtggccttgaagagactgagataacgaattcttgagtttgttttctaaaggagaccagaaatccactattacaaatgtatttgaaaacatgtttttgctttcatatgttcaaaatctgatctttgttttgtatttttgtgctaatgtgcaaacatgtacagaagaaatagaatacatgttcatgcaaatataaattatgtattctaatataggtgtaacagtttcccagttaactttgaatttatatatttagatttaaaggattaaaaaaaaggaaagctcttgacagttgtttcccaaatagcattagttctttaattttatttgtactgtacaaatgatgctagtttatttttttagcagtgaaaatgaatataaaaaaggtgacataggtcaagttttccataaattctacttctcatgtggcactattatataatacctttgagatctttggtttacgtttattaagaagagggtaatggaaactgatcatggaaacatttaaaattttatcagcaatgttctttgtgggtgccatgcatatgtaaattattgctttaattagagcagcacattgctaaaataaaaaatacaccttaatttttaagaaataatttaaatgaaacaatttccattccttttacctgcttagacttttatgtgacttgtatggtctcctggttaaagggaatggtgtcagaatatttgcataaaattatttttcataacagtccttttttatatattggtgtaaacataatattcttcaagaaataatgttgaaagcctactcaggaataatcttccttaactctttaaatttttatttcatgtgaagtgttttcagtttagttattcactgaattgtcagtttccttcatttggtattacatatttaattcttaaatattgaggccccattgtgagtaataaaaaatacgacataagtagaagactaagaagggcttgtcatattatctttgtgtatatgcttcatgttatttaaccagaaatgtcttatctctaaaaatttttagtagtaattatttaccaaacttaaaaacatttctataaatataaagcttttctttatatttaagacaaaatataaaggctagaatttggttccttctctgtaacactaaatattttagtgtgaaattgaatttttttattactatagtcttttcaatctataatttgtgtttttaatttcttgatatgtcacttctgttcctccctgcttgcattttttaaaaactagacattgtggcttgagaatttatcaatcatctttcccgaaatgaccacattgtgcttttagtttgtatgtttaagtggtcaagcaaggctctaggaggtagtcactggagctggaccttaaacacatctgcaggagctcacaaaatgggagcaaaagaggcattccagaaagaagagtagttaagcagatgtgggggcagggcaagaggagacagcaccttgttgccagagattctacacaaaggtgtgatggacactgatgctctattaagaagcttttgtggtgtgtgtggtagagaataattaaggcttctgataagacaggaaagggatatttcatcatgactgttaagaaaaggtaactgggttgtttaatgttttaattgataattgtcactgatcgtatttctacttgttaaataattaaaaatcatcttaaaattcatactttgactttaatttagacacaaggagatgtaatcgctgtgtaacatcagagaaagctatatggattatcgtcagaagtaaatgtttctaacattgacaaaaaaaaaaa

SEQ ID NO: 46688 - DNA, 2254 bp, Homo sapiens
cctcctcaaggctggccaggctccaacccttggaataatccgagtgctccatcttcagtgccatctggactcccaccaagtgcaacaccctccactgtgccttttggaccagcaccaacaggaatgtatccctccgtgcctcccaccggaccacctccaggacccccagcaccctttcctccttccggaccatcatgtcccccacctggtggtccttatccagccccaactgtgccgggccctggccccacagggccatatcctacaccaaatatgccctttccagagctacccagaccatatggtgcacccacagatccagctgcagctggtcctttaggtccatggggatccatgtcttctggaccttgggcgccaggaatgggagggcagtatcctacccctaatatgccatatccatctccaggcccatatcccgctcctcctcctccccaagcccctggggcagcaccacctgttccatggggcaccgttccaccaggagcctggggaccaccagcaccatatcctgcccctacaggatcgtatcccacaccaggactctatcctactcccagtaatcctttccaagtgccttcaggaccttctggtgctccaccaatgcctggtggcccccattcttaccattaagttaacaatggacgaagagatgacgctttgctttttgaagtacatgtatatgcacatgaatgcatatataaaaattgctggtttcactattagagggcattcatgaaagaacaactcttgcacctctcagagaagataactgcctcttgtacttggatgcgtagtacatcatatgtatacaatcagataaaagcatagaagtaaatcattcggatgtgatttttatttggttttcatggaaagttaaagtgataaagtatattgaatagttctttgacagaatttgtttaaactatgaaactacacacttaaaaatctaagatgtggattattgttagaatctgcaacttcattggcaaattatttcaagtatttttctataatcactttccccttctaaataaataaacttcgagaataacccatcataatccaaacaaatgatgcctcaacattttgagctgctctgtcggacaaataaacctggtcctcttgaggttatattttggatatacatttttaaactgtcagtaattattgtcagatgtggagttcaatagccagccagtgttcatttttatccttgagcttttagtaaaaacttcctggttttatttttagtcattgggtcatacagcactaaagtctgctatttatggaaactaacttttttgtttttaatccaggccaacatgtatgtaaattaaatttttagataattgattatctctttgtactacttgagatttgattatgagatgtgcatattgctttgggaagagctcgaggaaggaaataattctctcctttgttttgaacctcaaactagataaaccctaggaattgcttaactgcaacaagtaattttcattcccacaaaaacctgaggcagctcttttgcccagagcgttccctgtagccacccccaccccacttgcccttggttctttagaaggagcacacacatcccttgattcctccctgatgtgggtaaactgggcacactccaggggtctaaaacataaaacagttgtgtttagggaaccttaagtcatgcagacatgactgttctctttgtacaagtgtgaatcaaaatatgtatctctttttcagagtctggttaagctatgtcattgtctactgcatagtttcctgagtctgtttgtaaagtgcttatggctaacagttcagttctgtatttgttgacaggtaaataagtggagttgagtgccatctttgaaaaaattaccctctagctctaacactgaaaataataataaattgtagatctctgcaactaagtttaaagcagtgtgactgtgttgcttaaatatcaagtattgtttataaccaccaaaaaaaaaaagccctggtagttttttggcaccttatgtttaaatcagattcttagatttggagtagacctgaccttgttatttattagataacattttgaatgtatccattggatttctaaaatgtattgtgaatttctcagacaaacaggatttatgctggagctctgttttgcttagaaataaaatatttagtagtttatttctgctctaattaaaatgtcaagaatgccaaaaaaaaaaaaaaa

SEQ ID NO: 46689 - DNA, 1529 bp, Homo sapiens
  misc_feature (1)...(1529): n = a,t,c or g
ccgagcggncgggttgctccgggccgaggcgcgtctggctcttgctgattgaattcctttggtgcagtttagcatgttcctctgtgttctgcatctcctgtagtgtaatgttcaagctcagaaatgccttatgtggatcgtcagaatcgcatttgtggttttctagacattgaagaaaatgaaaacagtgggaaatttcttcgaaggtacttcatactggataccagagaagatagtttcgtgtggtacatggataatccacagaacctaccttctggatcatcacgtgttggagccattaagcttacctacatttcaaaggttagcgatgctactaagctaaggccaaagggaagttctgttttgttatgaatgcaggaatgaggaagtacttcctacaagccaatgatcagcaggacctagtggaatgggtaaatgtgttaaacaaagctataaaaattacagtaccaaagcagtcagactcacagcctaattctgataacctaagtcgccatggtgaatgtgggaaaaagcaagtgtcttacagaactgatattgttggtggcgtacccatcattactcccactcagaaagaagaagtaaatgaatgtggtgaaagtattgacagaaataatctgaaacggtcacaaagccatcttccttactttactcctaaaccacctcaagatagtgcggttatcaaagctggatattgtgtaaaacaaggagcagtgatgaaaaactggaagagaagatattttcaattggatgaaaacacaataggctacttcaaatctgaactggaaaaggaacctcttcgcgtaataccacttaaagaggttcataaagtccaggaatgtaagcaaagcgacataatgatgagggacaacctctttgaaattgtaacaacgtctcgaactttctatgtgcaggctgatagccctgaagagatgcacagttggattaaagcagtctctggcgccattgtagcacagcggggtcccggcagatctgcgtcttctgagcatccccccggtccttcagaatccaaacacgctttccgtcctaccaacgcagccgccgccacctcacattccacagcctctcgcagcaactctttggtctcaacctttaccatggagaagcgaggattttacgagtctcttgccaaggtcaagccagggaacttcaaggtccagactgtctctccaagagaaccagcttccaaagtgactgaacaagctctgttaagacctcaaagtaaaaatggccctcaggaaaaagattgtgacctagtagacttggacgatgcgagccttccggtcagtgacgtgtgaggcagaagcgcacggagcctgcctgcctctgccgtcctcagtttcctttcatgaggcttctagccaaagatgataaagggggaaatggtttttagtgcgtatattatactgcctcttaggtgtactctttataagctggtaaaccaagaatctagggagtggccaaactaaatataatttctttaaaaaaaa

SEQ ID NO: 46690 - DNA, 2203 bp, Homo sapiens
tttttttttggtttcaaaagggtgtttactatttggccaaacaatattttttaattgtcagtcataaagtgaaatacatactaaaatatatattaaatattcaccaaatctgcattgctgctacatgaaaacattttttggtctgttggaaaatgtaattcctgagatcattgttgggctttgtcaatcattttcctcaccatcaaatcaccttaagtgacttgggagtgtgaatctaggatgttcaattttagaccaattttctctatcttctaaatgagtaaacaggctctgtcttttataaaaggtagaaaaataaccatggtgtgctaatttttttcaaggtataccatatggaaaagtataggctgaacacaaaggaagtcttttctgaatggctctcaatcacacataaggaacatatgttttccagttaatctgtccttgatgtacagcagtccagctgttgttttgcatttattaaaatattctctgctaaatagttatgtttgtctttaaaagtaaattgcataaaattacatccaatttctttcctcctaaacccaacatattcctcacccttccacaaagcaaacacatggtgcactgaaaccgaggtgttacccagctttacatactgttctgcccatttgtgaggggtgcaaccacaacataagtcagaaaaaaagctatccagcttttcgtggaatctggtgaagtttatacttagcgataagcctctaagcctgaacttagcagggctagcaaaactttatttatttcctaactcctattattttagaatggttttcaaaataatactgcaagttcctaattgaaatacaaaacagaacaaaaagctgtgagaaatcttttttttctttggctccttaaagacttggaataatttatattagtgttgcatacattttaccttctacattttgatgtacttgctcttgaaagcactagaacaaattaattgaaataaaacctctctgaaaccatttgaatctttgatcctaccatagagttttaaaggctttcaggatataacttgtattttcccctgagtctgagtgtctacatgattatagaatgcatgtctcttgcttcatggtgatatccaatatgcatggaatactgaaaaataggtatttcccaaaggctcctatataccaggcatctcagactgacactgaaaaccttttgaagcatttttaacaacaaataatggactatttcacagactgatgccaataattagttttctggacctacagttgaaagcaaaattatctttttaactaaataggatcagcttcaaaatcctttttggagatgtttttatctattaaatgcctttattaacaacaccatcttccattttctattactccaattcgatttctcctgcatacaaggtaatgagtagaatggctgtgaatccagttaacattccagcattctgaatcatgaagaaggtgaaatcggtttttcttccagttaccttttctctcagcatatcattcatctctggaaacatatctgccagagaaatatagaggaacatgcctccagcaagtgcaaatataatatttgggagcgaaattgttgcccaccaaaatgccaaaagctaggcccaacatagcaggaacatgcagaaaggaagttgaatagcaaggcttgtcggagtgcctcatccctgcattgagtaggatcacaaagtctcctaactcgtggggaaactcctcacataggattgctatggaagtactgagtccctgaaggagagacaaggtgcaggaagccccaatcgccaggccatcgatgaaattgtggagggcatcgcagagcgttatcatccaggcaatcgtccctatttctgacagtttgggccccttcaaacaggtacatgaacttggctctttttttccatcctgtagagataccacactgacattatcaaaatggatatgtccattagcttctgtgacagcaggatttgcatagcatgtcacaccattgatggcaggtaatgctttaggttgatgagttttttcttgaggaccaaagttattcatttccaaagtggggtatgaccatttcttgaccatatgtcttttaattaacatctttaggcatttcttttcaaaaaaaggaaaagtagggtaaaatcccacccaaacacaggcaactgcct

SEQ ID NO: 46691 - DNA, 573 bp, Homo sapiens
cggtcatgtccggcagaggaaagggcggaaaaggcttaggcaaagggggcgctaagcgccaccgcaaggtcttgagagacaacattcagggcatcaccaagcctgccattcggcgtctagctcggcgtggcggcgttaagcggatctctggcctcatttacgaggagacccgcggtgtgctgaaggtgttcctggagaatgtgattcgggacgcagtcacctacaccgagcacgccaagcgcaagaccgtcacagccatggatgtggtgtacgcgctcaagcgcccaggggcgcaccctgtacggcttcggaggctaggccgccgctccagctttgcacgtttcgatcccaaaggccctttttagggccgaccacttgctcatctgaggagttggacacttgactgcgtaaagtgcaacagtaacgatgttggaaggtaactttggcagtggggcgacaatcggatctgaagttaacggaaagctaccgcggcccatagcgctcacagccgtaaagacttaagtcgttgaccgaaagcggctttttcacttacctgggctttttttttttttt

SEQ ID NO: 46692 - DNA, 396 bp, Homo sapiens; identical to SEQ ID NO: 1138
  misc_feature (1)...(396): n = a,t,c or g

SEQ ID NO: 46693 - DNA, 375 bp, Homo sapiens
aaaagaaccaaaacaaacactttttagtggcacctgtggatttacaaagggttgcctctctgtcattccacaacttcagaaggtgtgacaggttttccctatttatcattaccaataataacaagtattgagagttttaaaatttctcccagaagataaactaacaaggatggaaggggagggcaaaggatatctaaacatgagaataaggacatgttagagggggggaaacagttgtaacaataaggaaagagaagagcaacagtggaagagacaggttgtgtgcccctaaagattctgcacccccagtttggaaacactgatacattttaggacacagagcactcctagatctctacgaaattttagaatgaa

SEQ ID NO: 46694 - DNA, 828 bp, Homo sapiens
  misc_feature (1)...(828): n = a,t,c or g
gcggtgctcacactcatgaggagccttaagctcacaggtgcagtgcggtcttcagcgcgcttaaaagcacgangttnttcggcagnccaggttggcctctgcccaggaagttgctggttccacgtctgccaagacagcatgtctnacttcctcatcccacaaagccacagacaggcgaacgtccaagaagttcaaatgtgacaaaggacatcttgtgaagtcagaattacagaagcttgtccctaagaatgacagcgcttctttgccaaaagtgacacctgagaccccttgtgaaaatgagtttgctgaaggcagtgccttgcttccaggcagcgaggctggcgtttctgtgcagcagggggctgcaagtcttcctctcggtggctgcagagttgtgagtgactctcgcttagcaaagactagagatggcctgtccgtgccaaaacacagtgccgggtccggagcagaagaatccaacagcagctccactgtgcagaagcagaatgagccagggctacagacagaggatgtgcagaagccaccacttcagatggacaacagcgtctttctagatgacgacagcaatcagccaatgcccgtgagccggttctttggaaacgttgagctcatgcaggacctcccacctgcgtcttcatcttgtccttcaatgagcagacgagagttcagaaaaatgcatttcagagccaaagatgatgatgatgacgacgacgatgatgcagaaatgtatggggccatacaaaataatgtccttgagtatttagtaccattaacaatttgacaatttagcacattacaagatttatataa

SEQ ID NO: 46695 - DNA, 921 bp, Homo sapiens
agccgctacaaccacacacacgagtccacaagactatggaccatgttccctccacctttaacgccgattcaggtaatacctcacaacgactatctcggctctattaggacttgtttaattgcttaattggttctttacgatctgttaaagaatgctttattaatacaaatacacacaaactctgaagcactaagaaatttaaatatctatgtcacagcaaacaggtggcaattcaacatccagggtcgacagaatgcttgaaggagactgcaacagattggattcccatggtggagagggcatcttcacaggtgaaggggggcccagctgaaacagcttttcaagctctctctcctcgtcaaggatcatgagaggcactccactcaaggggaggtgcgcaatctggtgctcttcaggcaggtcaaaactctcaaagtctagaggattgaagggaaagaatttttctatttctggataggcatcatctgagggcagggaacagagcttttttgctttaacagtcttctcagtcatctttttggcagaaaagcttggctgtttttgtttgaggggtcccttggtctttacagacttttctgtagctctgttgacagttcccaaagcctttctagtagctttaggtaaggctggtggggcatcgaacgttttgccaaaacgtggtgttgaaacttgagatctcccatctaaggctttgattgaaggtccagaccccagcttcagcccatccttagcaaccacacgggtgcctggttctccattttccttatcaacatagatcagagtagccattctggattattttaatccagctctcaaatcttccagcctgagtcagaggctctaaggtcccgagcagcgcgcggtttggggctggcactcatcagacagttgccgttggtc

SEQ ID NO: 46696 - DNA, 822 bp, Homo sapiens
acgacgagaattagattgaaatctgttgtgacctagaacattttacttcaggcattcagcagatttcagaaagaattaccttattttaagttagtttctttgttagtttactgtgtgtctcttattcaataaacaagcagaatttgtgtcctgccctatccatgtcttaaagatgagaagttggatccactgagttagtttcattggggcgggggaaagaactgtaattaaacttgtttaatccttattttgtattgtagctattttttgtaaaagcaacttaaaatcttttaaaaattttatagtgacattagagacaatggtcatacaaattatcacataaacatggacttgaaaaattaggcttttcataaaacacatcacatgtcattgactgctttttagaaatacacttccaaggcagtacatctgtattgctactgaaaagtgccatttcacagaacacagacttctttttgctctttgacatcttgaaaacatctgtttttcttttttaatacaaaactttgtgctcaagacaaatcttacatgaaactctcataaaccatgaaaatgtagctggccttcgggccttaggcatgaaataagcatgaggaacatattcccctaacttctacccccagcccagcaagttatcctttaagaaatctcctaggaattctggagtttgaaaacaattgctctatgttattcctgcttccagtctctaagtaacaagggcatttaaaagcatagtctcttaaggtccactatagtggttctttatttaaggaataactcagctgggtgcagtggctcacg

SEQ ID NO: 46697 - DNA, 1348 bp, Homo sapiens
  misc_feature (1)...(1348): n = a,t,c or g
tttttttttttttgaaaagctagtagtttatatagatagatatatagatatatagatattgatagatattgtgtttacatagtccacaagttaaatgcaggtatccataagaagagcattaacaataaaaatacaatctgtgtgtagccaagtacagagacttaaaatggtaaaacagcaaaaaggatctcacaaaagtacaaatatacagtacaaattgatttatttaaaacagttacaaaaaagcacaacaaaatagagattatccttagaattattaatgctttgttaaagatcaggtaggattagagggtaagaaatggtattgggtggagggagcacctgactagttctaaggctttagatacaatgcagttgattacatattaattcagccattacatactggggatagtagatgggggatcagtaatttatctacagggaactcctacacagatccatccagacctccccagtgccatccttctccactccttaggaccctaaagccacctggatgacaacattcccatcctttctccaccccattcccttatcccgtatattcttccctcgcctaaggtgctgtgcaagctgagagcagtctgctctctgcagctggatcatatactgttttggctacagggatcctgtgtgactaagaaggttgtaggggacagccttattttaatactttaagttagccatgagtacagtcagtccctcccccaacacaatctagattctcttgaatccaagtatcagtcaagtgagggatcaaccctgccttcagcaataccagcaatgcactaaccactcacagctcacaactacgtgcaaactccctgcccagggggtgggtgtaaaaccactgtgtcatcagctcacactctttctctgaagaacctcagtccccatgacagtcataaagacaaataaatgcttgcaagtttgacaacaggtaaaggcacatgggctgctgccacacacactgcaggcaagaaccccaatttgaggccatcttcactgctgggcatttgcagtggaatggctttgggatcacaaaactttgagttcgcaatctaccagggagggatctaggtttaactggagaactaataaagaaacctttagtgtgaaaagtgcatttatgactattgttcctgctggggaggcagcagggcaaaccgcaacacctctcctccttccgccccaggcactgtgcatggtctgcagctaaggagagagtgcagtcgactctagcatctctggggccagtgtcatcctaggcacagaccaggcttctggtccaaagatggancctagagttgaaagagcaactgac

SEQ ID NO: 46698 - DNA, 663 bp, Homo sapiens
acttgatttaagggaaaaaatgactggctatattcagtcagatatggcaaaaagtctcaaggtgttaatgtgaatgattaaggtcttggggggggtgtcccctatcagactacaggtgtttagaggcacagaaaaaggtgcagttgggttcttaatgtgaaatgatgagaagcacaactccagtgtgtctctttgtgtagaatgtcagcagacaccccctgctagatgtgctggatcatgggaaagcatttccatttgttactagattgttcagaagttttaatttatgatgggtgtggtggctcatgcctgtagtcccagcactgtgggaggctgaggcaggaggatcatctgaggccaagagttcaagatcagcctgggcaacatagtgataccctatctcttaaaaaagaagaagtttttaaatttgaaataataataggtactggatttatgcaaatgtcttttctgcgtcttttgagatgagtatcaggtttttttttttccttttatcatctgatgatgaacttaatgtttccatttgtattaatggaatactaagtccctctgtgatttctgaaccaagctattcctaggcctgagttttattttgttgacacagaaataaattagaaggccaagcgtggtggcatgtgctgtagt

SEQ ID NO: 46699 - DNA, 507 bp, Homo sapiens
ggatcctcctgcctcagcctcctgagtagctaaaaaaatatattttttttggtagagacagggtctcactgtgtttccaggctggtctcaaactcctgagctgaagaaatcctcctgccttggcttcccaagtgctgggattacaggcctgagccaccgcgcccggtcacaagggacgctttcaatgtgaaaaagcatccagggacccagcaattccactcccagacacgcacccggaggaaatgacccatgcgccaggttctcccggggtttcctcttaaagcagaacgcggaggtgccgttctgtggattttcactctgaccgtgtgtcacacttacaatcgcacggacagagaaagcgacggggaaatgaaaaataggaaagaactttcctttggtccgtcaataagcaatttcctggtgtctcccgtggcctcagagcctgtctgtcttggcagaagataggctgtcactcagagacctgtgcctgagggtttccaaaaatgc

SEQ ID NO: 46700 - DNA, 346 bp, Homo sapiens
gattatacatcagccagtgctgtgctctttacatataaaaggaaacagctcccaatgcttctgacaccagatgtgttgggttttcccccatactaaccattttccgactgtgcagataccaacttgtctataatttaattatgacattaaccacttggagttagcttaagaccccacaggtccctaaagactgctccccactcagacaccagtcacaagtacaggtctcctgtatgtctgacagactagctataagcttggggttcccacaatgcctcctgaggttcagtaatttgctatagtggctcatagaactcaggggagcacatttactggttgagcataa

SEQ ID NO: 46701 - DNA, 512 bp, Homo sapiens
ctttggatgccttagacgaacttaatacgactcactatagggaatttggccctcgaggccaagaattcggcacgagccaatgtgatcatttcaaaagtggagcctttgagaattagttagggttacattagttcatgagggcggggcccccatgatgggattaatgcccttataaaaagaggaagaaacaggagatctctctgctctctgccatatggcaacttggaagaatggcctcaccagacaccagatctatccacaacttaatcttggacttcccaccatccagatcataataagtaaatgtttgttatttaagccatgcagtctatgataatttattatagcagcccaaactaagacacccaaataaaatagaaatattaaaataagggcaaagttgatactgtagaaagtaaaaatgcagcagacatgatcaacaaatccagaagctggatcgctgagactaataagttgacaaacattaacaagtgttgataaggatatagaga

SEQ ID NO: 46702 - DNA, 2261 bp, Homo sapiens
tttttgactttgaaagttcagttcagtttattacagtgtcaagtagatttacaactattgcacttatcattctggtgacagaaggccaaaactgaagattgagattttcctctaataaagataggttttcagaatcttcaatataagatgttaaaattataaaggcaaagatatatacctcatgttccattccatatccttcctgctgttgtacagtttgctgcaaatgataatttaatttgggataatgcttttaaatcattggatttctcatggaaattacttttgagggtggaaatttgacaagaattttctttatactctcttctttaccaaaacgtattagaagtccccatagtccaaaataaaatgtaaccatagaatggggagataactttagtcaaagaccaagtaaatattaccttctttgcagaactccaggttgtagtcacgtaaaagtgtggccacttgttgcttaactttttggacaatgggaaaaaaaaaccataaaagctaaaatgtggtccagcattgaaactcttctcaaaaccagaagaaagtcatgaccattgttgggaaagtgttttacatttccaatgaaattctattccattgatctgtttggatgattgtcttcaacctatttggctctagcccataaattgtaattgattcagtcatgtaaagaaccacttttatcttaagcttagaatttataacaatggaaagcaggaaagtggtttttcattcactctaataattgtgcagggataagctagagaaaaaataaaacaaaaaagtaccagtcttctgtcctcttaaattatttttcattctgattatattacaaagaaatgagctgtggaggtttggcactgttttccatcttaacagttgttctgtattgtaagattttatatgtgattcataatgtactactataacaagacacagtttttatatattactggaataatgcaaagaaaatgaattttcctttgggtccagtaattgtcaaaggaatgattgcagattcagaaaatgtgctttgtaataaccctgttaacataaagtatacactgaggaaaaaaataagtatggcacatatatggaaggattagttgtattagcaaggcatttcagggatggttttggttctttagactaagtaagatacatccaatttagacccccttcaaatccttagacaaatgggaatcacttggtaacataaagattattttggtgggcaggggctgatttcaccatgtgcttacaaatgctccaactagtcagtaaactatcccatctgaaggaaggatttgctctggtaataaggctgatatgctcaagctgtaagaattaatttgaatatcaaaaatgaaattgagattgctaaccatgtcctgatagttacagcatgtagaatattaaatgtcctcttttttaactaaagtaaaaaaatgaagaagcatggttaattcacttgtgctgattaaaacagatgtccacgtgcaacttctgtgtgtgagcctccccatgctgccatgccaccagatgctttcccttcaccttgctaatcccactagatgttttcctcggtagaatcctagctcatgggtttccatgtgcatgtttctattgtaatgaaaattaactacaaaatctgaacgttttctgctttcagaaaattctagtgtaccatgtacagcttagatatttctttttcagttaaaaaaaatagtgcaaaaacatatctgatagtcaaggtgatagttcaagtgagttcttgtgccaaggaacacagacaagcttctcctctagctgatctgtagaaactgtatgtagtttttgggaaatattccagattttcccataagttctccactcatccagtcatcatctacagattccagctctgttattatatctccagccttgaaggaaagttcatcttcattctcccctcggaaatcatataaggctttggccttcctgcccttcggtactatggccaacatactttttgcctcagctgggcagggcctcacaaacactgctgggaagatcccctccctgtcctgcagtctgcccctgcaccagtcagaatccagacgttccagaatctggatccggtctcccctcttgaatgataagtcatcactggtctctgctgtaaaactgtgaagagcttcacaccattctgccggaagactgttaacctgagagtttgagccagaatcttcttttttggttttcag

SEQ ID NO: 46703 - DNA, 763 bp, Homo sapiens
tttttttttaattttaaaacatttttattataaaatacaaataaaaacattgagaaaagacaaagtcatccattttctgcctcctatcccactataaccagttagtaatttgatttactttgttatctttttatcatatgcttggtctgttatttcagccatgattacacccacttatacacttttccgtcttgcaatttttacttaaggtaatattttcatgtttttaataatattcattactaatttttaataagtacattatgtatcatttgtatatatctgtttattgactatttcctagacccagggatgacaaactatggcaccacatttgtaaacaaagttttactggaacaaagccacgcccgtattgtttatgtattgtctatggctgcttttgtgcttcatacagcagtgttgacaagttatgacagagacagtaggtttaaaaacctaaaatagttactttctggccctttatagaaaaagtttgccaatctttaccccaaactttaaagtggtttataatttgggctactaaaagtaatgtcacttggaacatctttgtgcatataattttttatactttgtacaatttgagagacattaacaaaagtggaataactgggtctaattaatgaagacatttttacggttgattctctcccacactgttgtaatattcaagctatgatatgtgataagaatgaaaaggatagcccagaactcttgtaggtaacatgtctctggtccctgttac

SEQ ID NO: 46704 - DNA, 833 bp, Homo sapiens
tttgttcataaaaatgaatttttaatttcatgagcataaaaaaaaaacccaaacctgtcccatacccctcccactcatgcaaacagctctcaaatgagattcttcaaattttacgttttttccattctggctcattctttgcttcctcatcatcagattcaacttgggcaaacatggttttgggctgagtcttggaatatgctggagaaacccaatatgggctgtcttctgctgctttggcatgacgcaaaatggcttcccgaggattactgtcatcggtcttgtccaaagcaatgttcttcacaatataggaagagagagtgcccccgtgggttccaactcggccaccacgacctgggcctgctacaggaggttcaggtttatgcgacttcaggggatccagtctgtccttctccagctgtttccttgtactccgttggcggggctcacggaacataggcaaggccatgaaggggtgatgatgtagtcctgagttagagtctcagcttgttttgccttccgctggggttttaaccacacataattttggctcccctctgactcttgttggggtcgtaatagactttagccaatccatttccagttccaaccatgatctggttcagctttggatgccacaggcagcgaacaacactcgcatctgtgatgtctatttcatacaccctttggaaagtcctacgctcaaagaaaacaagtttgccgctgccacatcctctttgaatagatgtaccagtgactatgagcttatcatctggactgaaacagcagtcagtcattgggaacatggtgggaagacccgaggctaaaaaaac

SEQ ID NO: 46705 - DNA, 1051 bp, Homo sapiens
tttttttttttttaagggcttattaaactagttttactttagcaccattcttagtggagcaggattcttgatcatggggtggaattttgtgtatctgggcttcatgggatgcataaaattttccagttggtaagtagcaggtgccgagggtctggatcagaaaaaaaaggcaggcagccgggttcccactcgccttccatgagctctccgcagctcaccggccatcacttgaagcaaacactcctgagggagctggttgaggaagggcagacatccggcttcttgccctggtacaactggcagacaagggtaaggagctgggtctgatcttcccaagggtttcccattgacggtgacccagggcacatactcgtgcggtggctggagagcatctgtccgctgggcgttggcgtgcatgagctgcatgccgcggtcccccattgcacactccatgatagtgtctggcgacagccctggggcgtagagctgcaggcatagtggcagacttctctccatgtcctcaaactcttccatgcagacaatggtcaggaaggctagctccatgtcaagttcatccaacacgcaggcctccaccttgttgaatttgcactcctcttctccatgctggcacttgaactcccacctgccactgacattttgttcctgtgcgtttccgtagggcaccagcgtgacattgaggatctccatgaccaacagccatgttgggaagagctcccggatcaggaaggctcggcagccaccgcacagtgcttcatagtagagggtcacattgacaagcggtgcattggacttcttcaggggcccccgcaggtatagattgcctgtcttgtagttaactggtggcccattcccaaagaagtctaacgcttgcagaggggacgcctgcaccgccgccgtggggacgtccagcagcagcagcagcggtggcaggaacagcagaagtggcgacagggtcatcgcagcaggggcaaaggtgtggcgactatccatgtggaatgctggacaataaagcgagtgctgcccaccctcc

SEQ ID NO: 46706 - DNA, 788 bp, Homo sapiens
gggagcggggcgaggaggagggtgggtatgaggcggttgcggaccgcggagtcgagacctacccgaacgacgcgggcgagcggggctttggacgccggtggagacgcaggcgacgcaggaagaagatgagccttaggtctgaacgccgaggaattcatgtggatcctgtgcaagaaaggatgtggttactgtggcaaccctacctggcagggtttctgctccaagtgctggagggaagagtagcacaaagccaggcagaagcagattcaggagtactgggagctggtggaacgactccagcgggaggaagaagaggcctttgccagcaagtcagagcagccaaggggcccaatccctcacattctccaagtttgaaggaaaagaaaaccaacaagaagacccgcaaggttaccacagtgaagaaatcttcagtacgtcttccagggtcggatcaaagaaggaaattcaggaagcaaaagctcccagtccttccataaaccggcaaaccagcattgaaacggatagagtgtctaaggagttcatagaatttctcaagaccttccacaagacaggccaagaaatctataaacagaccaagctgtttttggaaggaatgcattacaaaagggatctaagcattgaagaacagtcagagtgtgctcaggatttctaccacaatgtggccgaaaggatgcaaactcgtgggaaagtgcctccagaaagagtcgagaagataatggatcagattgaaaagtacatcatgactcgctctataaatatgtattctg

SEQ ID NO: 46707 - DNA, 3264 bp, Homo sapiens
aattgcatagcctggacccacgacggcaggaattattggaggccaggtttactggagtaggtgttagtaagggaccacttaatagtgagtcttccaaccagagcttgtgcagcgtcggatccttgagtgataaagaagtagagactcccgagaaaaagcagaatgaccagcgaaatcggaaaagaaaagctgaaccatatgaaactagccaagggaaaggcactcctaggggacataaaattagtgattactttgagcgacgagtagaacagcccctctatggtttagatggcagtgctgcaaaggaggcaacggaggagcagtctgctctgccaaccctcatgtcagtgatgctagcaaaacctcggcttgacacagagcagctggcgcaaaggggagctggcctctgcttcacttttgtttcagctcagcaaaacagtccctcatctacgggatctggcaacacagagcattcctgcagctcccaaaaacagatctccatccagcacagacagacccagtccgacctcacaatagaaaaaatatctgcactagaaaacagtaagaattctgacttagagaagaaggagggacgtatagatgatttgctcagggctaactgtgatctcagacggcaaatagatgaacaacaaaaattacttgaaaaatacaaagaacgattaaataagtgcatatcaatgagcaagaaacttcttattgaaaagagtacacaagaaaagctgtcaagcagagagaagagtatgcaagatcgattacgcctcgggcactttacaacagttagacatggcgcttcatttactgaacaatggacagatggttatgcatttcagaatcttgtgaagcaacaagaatgggtgaatcagcaaagggaagatattgaaagacaacggaaaatgttagcaaagcggaaacctcctgccatgggtcaggcccctcctgcaaccaatgagcagaaacagcggaaaagcaagaccaatggagctgaaaatgaaacgttaacgttagcagaataccatgaacaagaagaaatcttcaaactcagattaggtcatcttaaaaaggaggaagcagagatccaggcagagctggagagactagaaagggttagaaatctacatatcagggaactaaaaaggatacataatgaagataattcacaatttaaagatcatccaacgctaaatgacagatatttgttgttacatcttttgggtagaggaggtttcagtgaagtttacaaggcatttgatctaacagagcaaagatacgtagctgtgaaaattcaccagttaaataaaaactggagagatgagaaaaaggagaattaccacaagcatgcatgtagggaataccggattcataaagagctggatcatcccagaatagttaagctgtatgattacttttcactggatactgactcgttttgtacagtattagaatactgtgagggaaatgatctggacttctacctgaaacagcacaaattaatgtcggagaaagaggcccggtccattatcatgcagattgtgaatgctttaaagtacttaaatgaaataaaacctcccatcatacactatgacctcaaaccaggtaatattcttttagtaaatggtacagcgtgtggagagataaaaattacagattttggtctttcgaagatcatggatgatgatagctacaattcagtggatggcatggagctaacatcacaaggtgctggtacttattggtatttaccaccggagtgttttgtggttgggaaagaaccaccaaagatctcaaataaagttgatgtgtggtcggtgggtgtgatcttctatcagtgtctttatggaaggaagccttttggccataaccagtctcagcaagacatcctacaagagaatacgattcttaaagctactgaagtgcagttcccgccaaagccagtagtaacacctgaagcaaaggcgtttattcgacgatggcttggcctaccgaaaggaggaccgcattgatgtccagcagctggcctgtgatccctacttggttgccctcacatccgaaagtcagtctctacaagtaggccctgctggagctgctattgcatcaacctctggggcgtccaataacagttcttctaattgagactgactccaaggccacaaactgttcaacacacacaaagtggacaaatggcgttcagcagcgggtttggaacatagcgaatccgaatggatctgatgaaacctgtaccaggtgcttttattttcttgcttttttcccatccatagagcatgacagcatcgattctcattgaggagaaaccttgggcagctccggccaggccttgtaggaaaaggccccgcccgaggttccagcgtcaacggccactgtgtgtggctgctctgagtgaggaaaaaattaaaaagaaaaactggttccatgtactgtgaacttgaaaacttgcagactcaggggggtccctgatgcagtgcttcagatgaagaatgtggacttgaaaatacagactgggctagtccagtgtctatatttaaacttgttcttttcttttaataaagtttaggtaacatctcctgaaaagcttgtagcacaaaggctcagctggggatggtgtttgacttcggaggaaaaaagttgctattgcccgttaaaggcactagagttagtgttttatccctaaataatttcaatttttaaaaacatgcagcttccctctccccttttttatttttgaaagaatacatttggtcataaagtgaaacccgtattagcaagtacgtggcaatgttcattccaatcagatgcagctttctcctccgtctggtctcctgtttgcaattgcttccctcatctcagtagggaaaaaattgagtgggagtactgagatgtgtgggtttttgccattggacaaagaatgaggttagaagactgcagcttggagtctctctaggttttcaactatttcttcacaatttgaacacttgacggttgtcccttttaatttatttgaagtgctatttttttaaataaaggttcatctgtccatgcagtcctcttggattctctgaatgtagtaactatgaagctatgccaaaggtaggcagaaaatgggcttgggagccagacactccagggatcagtagttcctacccatagtctttgtgtgcttgctaaatggtgtacatttcttgttaaccacgttattaaaacttgatcagcacataaaaaaaaaaaaaa

SEQ ID NO: 46708 - DNA, 658 bp, Homo sapiens
caggaatctaaagactccttcaaacagttagcaaagttggtcacatctggtgctgaaagtggaaatctaaatacctctccatcatctaaccaaacaagaaattctgagaaatttgaaaagccagagaatgaaattgaagcccagttgatatgtgaacccccaatcaatggatcctcaactccaaatccaaagatagcatcttctgtcactgctggagttgccagttcactctcagaaaaaatagccgacagcattggaaataaccggcaaaatgcaccattgacttccattcaaattcgttttattcagaacatgatacaggaaacgttggatgactttagagaagcatgccatagggacattgtgaatttgcaagtggagatgattaaacagtttcatatgcaactgaatgaaatgcattctttgctggaaagatactcagtgaatgaaggtttagtggctgaaattgaaagactacgagaagaaaacaaaagattacgggcccacttttgaaatttcagtgaataccttaatgttctgtaatttgggaagtttctggcaacacagaactacatagaatcagtattgttttcatggcctccagggaaaaaatgtttttcaagtaagagtaaaagggtgatgggattttataccaaaa

SEQ ID NO: 46709 - DNA, 527 bp, Homo sapiens
  misc_feature (1)...(527): n = a,t,c or g
gctatgacatgattattagatttactacgactcactatagggaatttggccctcgaggccaagaattcggcacgagactagagctgcaggtaccagccactcggccccagggggttatggccacagagggataggcacagtctccaccaccctggagccaagggtctttcacatcacctatccctacatacataccaaatggaaaagtggccatccttttccccccaaacacacccccttaacctatctcttgggacttagcccgaccctccctctcatttcccattaagtctgagaggcaagagctaggttaggcaaggaggtggttggccagagatggggaacagccaggtgccccagtcctctgatttttcctccatcctgcttaccaccttcctgggtacttacagccttctcttgggaacagccgggccaggactgggtcacctatgagctgaatcagcatctcctcctgagtcccanggcccctgcagttcccagctctttgncctgnagccttgcttttt

SEQ ID NO: 46710 - DNA, 339 bp, Homo sapiens
ggtcttattcctatgtaaaacagacattaacataattatttaatctattagacctacaagaatcttcaaaattatgattcaactcttcatttgactgaaaaactgacacaggttcttagaagtgaagtgaaattttctcaaatcacatgcttgatgacaggggtgggttttttttgtttgttttttgtgtgtgttttttgttttttgttttttgagacggagtcttgctctgttgcccaggctggagtgcagggacgcgatctcggttcacgccattctcccgcctcagcctcccgagtagctggcactacaggcgtctgctaccacacccagctaatt

SEQ ID NO: 46711 - DNA, 458 bp, Homo sapiens
  misc_feature (1)...(458): n = a,t,c or g
ggagagagctagcaccatgagcataccctgtaagagcatctgtgtaatgcaggctcagtgtttgccaagttaatatttacttctattagaagcttctaaatgccaaaatgaacttattaaaatgtcaccagtgactgtgtgcaggattacaggcaggttttcttctttccaccttttggaaattttccagattaaaaaagaaaaaaaaaaaccctagaaacaaaaaaacctgacacgcaccacttacttttatgatacaaaacaaaagtgaactattaaaaaacattttttagccaggcgcagtgactcatgtctgtaatcccagcactctgggaggccaaagtaggtggactgcttgaacccaggagtttgagaccagtctgggccacgtggtgaaaccctgcctntacaaaaaatacaaaaatttgccacgtgtggnggctaatgcctgtggccca

SEQ ID NO: 46712 - DNA, 787 bp, Homo sapiens
gagggcctgcccctctagtcctggatcgcggccctgcctatggggtctcaggccaggtctctgctggcatcaggcggtataaaagaccctgtaccccgtctcccagggcacaagctccctagcctctttggatccattgcccctgagctcccagagtcacccctccacctccgcagccagtgaagtgtgttgtgcctgctgaagtgatcaccccccgcccccagccctgcatcaggccacaggtcttggctttctccttatcaccatttgctgttatcacggcacacagcagggaatcccaggcccccccgccaagtggttacccaagtcaccactcctgacccaaaaatcaggcatggcattaaaacgttgcaaattcctttactgttatcccccccaccaccaggaccatgtagggtgcagtctttactccctaacccgtttcccgaaaaaggtgctacctcctttccagacagatgagagagggcaggacttcaggctggatccaccactgggctctccctcccccagcctggagcacgggaggggaggtgacggctggtgactgatggatgggtagtgggctgagaagaggggactaggaagggctattccaggctcagccctgctcctgcagctttgccgctgagtgtaggaaaaacaggcatgacagaccagggtgagggttgtgcccagctgggccacggccatgcgtggggtggcccaataaacaccgtggactcccagcaaggctgctgcctggtgtttcgaggctgctgtggtcgca

SEQ ID NO: 46713 - DNA, 2014 bp, Homo sapiens
tttttttttttttttcaaaagggaagatgacaacttttattgttattacaaaagcaaatttaatttgtcatttgaataattgcaagagcagactaagggcttaatcctcacacaggcaccaagtcaggcacagtaggtagctacaaatcgtaagaaaaagctttctttcctacctagagcactcttccatgctttggaattaggctaaaaaactcaacaaacctgatcagttccctttaatcctgttttttttttttttttttttaaatgagatctaggtattaacctgctgtctagcgaaaactagtcactaagtcctggcctgagagatacccacatttcctttagaacaaacagaactaatacctgtgtacatttctgagagcctgatgtgtgagtccttaaaatgtagaccttgcaggaggcttagacctcagtttcacctaatgcatgtggaggaaatggaggtgagaatagtcacctgaagagtgcaagcgctccagctccagcacacacactcttcccctgggcagcaggaaaaggaggtaacaaggacttgggctgacatctgaagcactaagctaatgtgcctggtagaggggagcctcaggaagcacaagatgtcattccacctgtgctgtccacaaacctgaggtttccacatcgttttaaagggcacagtggcaaatgtgacaaggcagaaaacaataaccatttcaaggatcacttaaggaatcctggtgttttctgcctaatcagaagtagtaccaacctgcttttcccttatattggagaacataaaggttttaattaatctccactcccacaccttcaggcccttataataatccttagtaaacaactcagctagcattattgtttcaaggaagcataggattagaggtatgtgagaagtgtatttattgaagggaagactcagtaagttctaggatattaaagtcaagaatatcctagagccaaaaaccaccaaaagttgaaccaaatctacctgaactgaactgatagtaaactgggtcaaatggaatccacggaattactactggaaaataaaaacacttcctattctttctattcctattcatttactatgaaacctaatctaaccaactgactgctaaatgtaaagctagttaagtcttttgtgcatgtgcaattacacttacttaacaagatgctgccatggcgagatctctcacgaaagaaacaagatcaaggatgtactagatggcatctgctagaatcactgaaaaagttagctgcaagaaataaaagcctattatttggagatagataattgtcccctgaatccactggttgttctcttccttacctatgtctgtgaaaggattaatggcacagtttgataaggtaggccaacaatgaatataacatttaaccatcctaaaatcagagctatagtgctataaccacatttttcacaaagggttttaaagttgaaagttgcctgatgttaagacctgtaataaaactgcgtattttccccttgactaccttaaatccctacccaaagcaatgaagctatcatccatgaagtagcagtccatgaggaagtccatgccagtaagaaaaggtgctagagtgctgttatgtgtaatagtcatcaaagatcacggagtaattccagtcattactagtgttcctgcagatcgccaagggagcttaggctgatttttttcccaggttcatcttgggagcagtttttgatcataggttcaacttttttcttgggttgcaaaactgcatctggctgcaagtctaacccaaaatattcgcagcgtatcagctgagaggatgccggcaactgttgaactacatcacagttcaaagtcccatattgtgagagcagtacttgtagtttatgtaaccagcaaatatgagttacctcgttacagtgaacaacctgcactgttagagtttaggaacttttgacattcggttatcacatatttcaaagattttcaactcacaaaaa

SEQ ID NO: 46714 - DNA, 1190 bp, Homo sapiens
tttttttttttttttacctttccagatgctttagacattttctcttatctttactctctttatggatctgtcatcctctctaaagtattagctatgcgtcccagctaaggcattgctaaggattgggaacggctaaagctgtctgctccaaagcatcttaaaatagatgcatctcctgccttgagatattcattcgaacccggatttcaccaaaggagggtccttatgtacttgcttacacgaagcaaatttataggaaaacaggggaaacgtcttgattaaaaataaacacaaaacactggtaaccgctccgcctttcctgggtggcgctggtgtgcggctctctccacacgcgtctctctgtacagcacatacatgtttacaccacacacctgcgtggacgagcaccagatcacgcaccccagctccacgacagggacaccagccgactacccacaggctgcacattccggcaggggccctcctgggtgcccacggggaggggctcggggtcatctccagcactgccaccaggccgccagcccagaattcttgggaaacaccgtgctcggaaaaccgaaggtcagggctgtccttcccagaggccgtgtgcttccagggtgcggagggcccggcggctgacacaggccccagggtggaaggtccctggcaggcccagcttccaagcatgccccgaacgcaagcctaaggggagcccggctctgtggccatcttcaactcctgagcctcaggagccccatctgaaagccaaagccgggaggtgaccagctgaggagcgtgcctgaaggtgcccggggtgccctgggtccccaggaagcagccactgggaagggggttgcctgcggggaagccgcttcatccagccgggccaaggcggggacaggcacaggtggctaatgagctgatgttagtgctatctttagaaaattaaagattgtcccaccaaaataataataattacaaaaaatcaccttaattgaacctggattggtaatactactacaggtctggttaaatagaaattctacctctctactcagtgatgagccgcactccccacacatcaccttttcaaaccaacagcactgtacaactacaaggccgatgagaaagggacgggaaggctgcgggaagtgcccgggacacgtagagcggtgggtaaggctgct

SEQ ID NO: 46715 - DNA, 1675 bp, Homo sapiens
ggccatcgtgttcacctatgggcacctcaaggttgctgacatggtgaaaacaggagtcataatgaacataattggagtcttctgtgtgtttttggctgtcaacacctggggacgggccatatttgacttggatcatttccctgactgggctaatgtgacacatattgagacttaggaagagccacaagaccacacacacagcccttaccctcctcaggactaccgaaccttctggcacaccttgtacagagttttggggttcacaccccaaaatgacccaacgatgtccacacaccaccaaaacccagccaatgggccacctcttcctccaagcccagatgcagagatggacatgggcagctggagggtaggctcagaaatgaagggaacccctcagtgggctgctggacccatctttcccaagccttgccattatctctgtgagggaggccaggtagccgagggatcaggatgcaggctgctgtacccgctctgcctcaagcatcccccacacagggctctggttttcactcgcttcgtcctagatagtttaaatgggaatcagatcccctggttgagagctaagacaaccacctaccagtgcccatgtcccttccagctcaccttgagcagcctcagatcatctctgtcactctggaagggacaccccagccagggacggaatgcctggtcttgagcaacctcccactgctgggagtgcgagtgggaatcagagcctcctgaagcctctgggaactcctcctgtggccaccaccaaaggatgaggaatctgagttgccaacttcaggacgacacctggcttgccacccacagtgcaccacaggccaacctacgcccttcatcacttggttctgttttaatcgactggcctcctgtcccacctctccagtgagcctccttcaactccttggtcccctgttgtctgggtcaacatttgccgagacgccttggctgggcaccctctggggttcccccttttcttcccagggcaggtcatcttttctgggagatgcttcccctgccatccccaaatagctaggatcacactccaagtatggggcagtgatggcgctctggggaccacagtgggctatctaggtcctccctcacctgaggcccagagtggacacagctgttaatttccactggctatgccacttcagagtctttcatgccagcgtttgagctcctctgggtaaaaatcttccctttgttgactggccttcacagccatggctggtgacaacagaggatcgttgagattgagcagcgcttggtgatctctcagcaaacaacccctgcccgtgggccaatctacttgaagttactcggacaaagaccccaaagtggggcaacaactccagagaggctgtgggaatcttcagaacccccctgtaagagacagacatgagagacaagcatcttctttcccccgcaagtccattttatttccttcttgtgctgctctggaagagaggcagtagcaaagagatgagctcctggatggcattttccagggcaggagaaagtatgagagcctcaggaaaccccatcaaggaccgagtatgtgtctggttccttgggtgggacgattcctgaccacactgtccagctcttgctctcattaaatgctctgtctcccgcggaaagctcc

SEQ ID NO: 46716 - DNA, 1950 bp, Homo sapiens
ttttttttttttcatttctctgaggaagccgagaaactttaattaggtgacggggttccgagcacttaagcagatggggtgcggtgaaggcccagggaggaggagggcagggaggtgcacgtcctctgtgccccacacactttcaaccactgcaacaaacaagcacccaagagaggctgtgcggcagagccctgcacccacaggcctttgacagcacagtgaggggcctccgcacgtggcctcgggacgctcactcgacgcacacccggtgcatcacactggcacctaaagacaggccgtgcagctaaaaggagcacgtgtggccaaggagagcaatcagctgtcccgcgtttctaaaggcagggaccgaggctgtggaggggcgagcagggcaggccggcggaggctacttgagcagcttggccacgttcaggctgggcaccacaatgtccttgaagaggggcacgtagctggggctggcctgtgctgggccctgctccagggtctccatgatggtctgcttcatgtcacggctggcgtccccacgcacagccagcagcgcaccgatgtggtcatccctgatgtctggatacttgctgaccagagtggagacctccaggtcagagcagagaagggtctgtcagcttgatcacttcggccacagccacgatggtgtcgcagtatccgtccacgtcttccccgaaaccggacgccagcttccggaacaggaagcgcagctgctctgcctccctaaccatcttctcggcaccctccttgcgctcctccgggctccggaaggaaatgcgcttctgcatgaccgcccgcaggtactccaccaccacgcgccggtgcgcctcggccgtcatcctcttcttatacggctttttaattttggcaaaatcgttgaaatagtcttccacggtgacacagataatgtctacagcgtttgaccctaatagccacttcttcgtcatcaattcattcagatgttgctccaggtccaggaagacctcctccagcaaaccgctgcagccctccttcgcgatggcgtctaaaatcccgtcccatgctgggctggctcggagacacaccctcttccacttcattctttaaatactttctttttaaactgactatggattccttgaaggtctggcagttgttgatgatggcgatcatgtactgaacgtagcagtgagggtgctgccgattcctcaggtgctcttctttatacacgtgcgcttcatctttatatctgcttaggaaagaattcatctgctgaagacataaaactagtacctttgttttcaaatcttcacttatctgagcagcaacttgaagattctgttcaaacatctggaagacaatggcagggagtgtggtctggtagtacccgtcctggtcggcttctggctctgtctctttgacccagtctttcttgtctgtctccagcgctttccgcagccaggcgatgatgtttgaagtgagcgtggacatgtacgtgtcaagcagctcagagaccacgtgtggagaaagcaatggctccagggtgccgacatccacttccggggccagctccacgttcctcatcatctcagtacttgtgtaggtgtttaagacccacgtcaagaggctcacgatctcattggcttccaggtcttccgatgcgaggtcctgcatccgcgtgctcagggcttggtggtacatgttcaggaggttcttaaagatctcatagtggggaggaaagcactgaaccatcaggtttttggcgacaatgaggtcatccaggacgtacttccttataatttccaggtggcggacaagccacatcttgtcagactctctggtatctgcctgtgtgccctcaattctggtggtcacagtcctctccaagatggtgaacattttctccttccaattcttgggcctcccaggaggaacaaagcccct

SEQ ID NO: 46717 - DNA, 1542 bp, Homo sapiens
ttttttttttttttttacaaaataacacaatttattactattttgaaacaaatcacaaaataacattcagaaactcaacatttctaaataacttaattcacaataagtttagtcataaagtcatgctacaaaactcctgtgtataaaagattattaccaaggtattcatagatgttaaaatgttcttcagaatggagttggttctagaagccaaagattctggaatgatgcttgtaatcatggactgccagcctgggagaggagctgggctatgcggcatgtgctcttaggcttccaactcaccagtcttttgatggggagtgatccctccaggcagttagcacctcagagggcagggtaccctactggattcacagagggcaaagagcctcccacccatataatgttagacaactctacattcatttaaaatctagaggtgggaatgataattcgcaaagcttctattctgagtaggagaactacttgacacatcccccagagggatgatcttggatgtaacagacatggaagacggactcaagtagggaaaaagggaaatcctgactctgattatgtcaaaagacagtaactactcatgtgggtttagaacgagcaagggtgaggtttgattctctaacatccaagtgcaggctagatatttacccatctgccctatggaagtcctttccaccaacatccagttcctaagtttaaagtgcaaatctactgaaaaatagtttactatccctcttcccctatgttaaatttgctagatcataatttggttggctgggtctccctcctaaactgccccaatatggggaattaactagaatcccagttaatgacttcctcccaaatatcaagtcaaaaagttttatcagtttatccttaggtcagagaaaggtaagactcagtctagttcttcctttcagttttcttcctttacagatttataaaatgcaggaatagagatacagatatggtatttctaaaagttccatgattttaaaacatgacccttgatttttgaaagttcacccattttatggtttacaaaaagaaaacaatatgacacatgttagagcacagataaagaaatatggtcaagttagcctggtcaagaaggaagcccccaaactccggcctaaaactgaaacctggcttttaatatttccatgatttacagacacattaaacagcccccaaataaataaaatctgtgcccaaaggaatgaatttcctagtaaagggtaacatgcaatttagcagttttcttcctttaccaacacttacagagtataaggtcttagtgaattgatgggtctgactgtagtcagagagacataatctattcatgactgatgctttgacacttcctcctaatgcttttaagtgaatgattaactccaacctttctgggccctgtgcttttccatttagccctgagaaaaacccaggtagaagattccaactctctttacacatcaccaattctcagaataagtcaacagtcaagattcatttcttattcttcct

SEQ ID NO: 46718 - DNA, 1208 bp, Homo sapiens
  misc_feature (1)...(1208): n = a,t,c or g
aaacaaggtcagttgaacataccgatggtcagagtgtcctaacagactcactatggcggcgatatagtgaatttgagttgttgagaagctaccttttagtttactatccacatattgttgtgccacctctgccagaaaaacgggcagaatttgtttggcataaactctctgctgacaacatggatccagattttgtggagaggcgacggattggtttagaaaactttctcttgaggattgcttcacatcccatcctttgtagagacaaaatcttctatctgtttttaacacaggaaggtaactggaaggagactgtgaatgaaactgggtttcagctgaaggcagactccaggttaaaagcgcttaatgcaacattcagagtgaaaaacccagacaagagatttactgaccttaagcactatagtgatgaactgcagtctgtcatctcacatcttcttcgagtcagagctagagtagcagatcgactctatggtgtatataaagtacatgggaattatggtcgagttttcagtgaatggagtgccatagaaaaagaaatgggtgatggactgcagagtgctggtcatcatatggatgtgtatgcatcttctattgatgatattttggaagatgaagaacattatgcagatcagttaaaagagtatcttttttatgcagaagcattgcggggctgtgtgcaggaaacatgaacttatgcagtatgacttggagatggctgctcaggacttagcatccaagaagcagcagtgtgaggaactggtaactgggactgtgagaacattctctttgaagggaatgactaccaagctctttggtcaagaaactccagagcagagagaagccagaataaaggtgctagaagaacaaataaatgaaggagaacaacagcttaaagtcttaaaaatctggaaggcagaggatttgtggaaaaacgcatggggctgatattgaacgcttcaaagaacaaaagaaccgagacttaaaggaggccctcataagctatgcagtcatgcagatcagtatgtgcaaaaagggaattcaagtttggaccaatgctaaggaatgctttanaagatgtaatcctgtgaattgaatttctcttcaatcaaagtgccccaaaacagaagcacaagtaaataaaaganatttaagtcactacctngtatacataaacatatacaataagt

SEQ ID NO: 46719 - DNA, 525 bp, Homo sapiens
  misc_feature (1)...(525): n = a,t,c or g
gccagctgcagctttccgccgcttgggnccttgtccggagctgcggccttaggttcgcttcctacggggcgcacgcaantntcccagatgcctacgggaaggagctgtttgacaaggccaacagctccttcccttaggttcgcttcctacggggcgcacggcgcccaattcccagatgcctacgggaaggagctgtttgacaaggccaacaaacaccacttcttacacagcctggccctgttaggggtgccccattgcagaaagccactctgggctgggttattgctagcttccggaacgaccttattctgcaccagcttttactaccaggctctgagtggagaccccagcatccagactttggcccctgcgggagggaccctgctactcttgggctggcttgccttggctctttgagctcccttttgcttaattactgggttttctgggcagttttttttttttaaagagttggagtaagaagaggattaaaaaggaaaggcaaataaaaaaaaaaaaaaaaaa

SEQ ID NO: 46720 - DNA, 1590 bp, Homo sapiens
  misc_feature (1)...(1590): n = a,t,c or g
ggtgtcatggccggctcctaccctgaaggtgcacctgcagtcctcgccgataagaggcagcagttcggaagccggttcctgagagatccggcgcgcgtcttccaccacaatgcctggtaatcactctgccccttcgcccggcctgtcgctgaccctctgtcccgccgcctcggagcactccgaaaagcccctgaccgccggccacgagtcaagctgccctacccggccacgagtcaagctgccctacccgaggcactctccaaggggagagaaactcctaggccagcgactcaccctgcccgcagccaggacgtgaggcccctaagctgcccgtttgattttctcagggacaatgtggagtggtcggaagagcaagccgcggcggcggacgaagaaaagtccaggagaacagtatccagcgggtgtgccaggagaaacaagttgattatgagatcaatgcccacaaatactggaatgacttctacaaaatccacgaaaatgggtttttcaaggatagacattggctttttaccgaattccctgagctggcacctagccaaaatcaaaatcatttgaaggactggttcttggagaacaagagtgaagtacctgaatgtagaaacaatgaggatggacctggtttaataatggaagaacagcacaagtgttcttcgaagagccttgaacataaaacacagacacctcctgtggaggagaatgtaactcagaaaattagtgacctggaaatttgtgctgatgagtttcctggatcctcagccacctaccgaatactggaggttggctgtggtgtgggaaacacagtctttccaattttacaaacgaacaatgacccaggactctttgtttattgctgtgatttttcttccacagctatagaactggtccagacaaattcagaatatgatccttctcggtgttttgcctttgttcacgacctgtgtgatgaagagaagagttacccagtgcccaagggcagtcttggatattatcattctcatatttgttctttcagcaattgttccagacaagatgcagaaggctatcaacaggctgagcaggcttctgaaacctggggggatggtacttctgcgagattacggccgctatgacatggctcagcttcggtttaaaaaaggtcagtgtctatctggaaatttctacgtgagaggtgatggaaccagagtttacttcttcacacaagaggaactggacacgcttttcaccactgctggactggaaaaagttcagaacctggtggatcgccgactgcaggtgaaccgagggaagcaactgacaatgtaccgggtttggattcagtgcaaatactgcaagccccttctgtccagcaccagctgagaggcacctgctgccaacacgatgcaagcccattgtgtttccgagcttttttaaaaaaaaaattgtagcactgggcnnnnnnnnnnnnnnnnnnnnnnnnnnnnnnnnnnnnnnnnnnggggaggatccattgagcccagcagtccaacctgggcaaaatagtgagagaccctgtatctgaaagtaatgataaaataaaaagaatataaatga

SEQ ID NO: 46721 - DNA, 936 bp, Homo sapiens
gttcctatcccaaaatcagcagacaaagtgacagacaaaacaaaagtgccctctaggagcccagagaactctctggaccccaagatgtccctgacaggggcaagggagctcctaccccatgcccaggaggaggctgaggctgaggctgagttgcctccttccagtgaggtcttggcctcagtttttccagcccaggacaagccaggtgagctgcaggccacactggaccacacggggcacacctcctccaagtccctgcccaatttccccaatacctctgccaccgctaatgccacgggtgggcgtgccctggctctgcagtcgtccttgccaggtgcagagggccctgacaagcctagcgtcgtgtcagggctgaactcgggccctggtcatgtgtggggccctctcctgggactactgctcctgcctcctctggtgttggctggaatcttctgaaggggataccactcaaagggtgaagaggtcagctgtcctcctgtcatcttccccaccctgtccccagcccctaaacaagatacttcttggttaaggccctccggaagggaaaggctacggggcatgtgcctcatcacaccatccatcctggaggcacaaggcctggctggctgcgagctcaggaggccgcctgaggactgcacaccgggcccacacctctcctgcccctccctcctgagtcctgggggtgggaggatttgagggagctcactgcctacctggcctggggctgtctgcccacacagcatgtgcgctctccctgagtgcctgtgtagctggggatggggattcctaggggcagatgaaggacaagccccactggagtggggttctttgagtgggggaggcagggacgagggaaggaaagtaactcctgactctccaataaaaacctgtccaacctgtggcaaaaaaaaaaaa

SEQ ID NO: 46722 - DNA, 678 bp, Homo sapiens
  misc_feature (1)...(678): n = a,t,c or g
gcggcgcactcagtaagtncataatttgctggcatgattgcaggtaggcatgagtgtgtatgtcctaacatgtaggctggtgtgtgtaggcatgtgtgaataagcatgtataaatgagcttaagtgtgctgtgtgcacatgtgtacacacagctaatttatctgcagacctatatgtgagcatgtaagagtgaacatatgtgtgtgtgtgtagtatgtaagaatgaggaactcggtatgtgcatgtgtagacaggtacccagcagtgtgtgtatatgcgcatgagtgaggatgtataggcagaagatgtgtgtgtctatgagtgagtttgagtgtgcaggcttgtattaggtgtatgtgaggaagcccttgtgtgtgcaggggtgcacatgtttggccacaggcatgggaggtgtatgttaggagcatgtgtgtttgtaggcagactcatgagcaggtgtgtgcaaatacatatccagctgcactgtgggtgtccacccacaccttgtgttcctcatggcctaccccagcctttcttctccactgggtcccactgttccctggagacagagggctagcatgctgtcatttatctgaaggttgtggctgacccattctcctgggatttcccaggccacctctcctttccctttccctcacttaacccagacttgctaac

SEQ ID NO: 46723 - DNA, 330 bp, Homo sapiens; identical to SEQ ID NO: 1202

SEQ ID NO: 46724 - DNA, 2283 bp, Homo sapiens
gcgcggagagccccggcgcggagcaggcgggggacggtattcagaattcgagcgcaggagctccgcttctccacctgctcccggggagctattgggcctcctcttccagcagcctctatctttattctacaggatccagagaatcacccgctgatggtttttgcccaggcctgaaacaaccagagagctacgggaaaggaagggcttggcttgccagaggaattttccaagtgctcaaacgccaggcttacggcgcctgtgatccgtccaggaggacaaagtgggatttgaagatccactccacctctgctcatggcgggccagggcctgcccctgcacgtggccacactgctgactgggctgctggaatgcctgggctttgctggcgtcctctttggctggccttcactagtgtttgtcttcaagaatgaagattactttaaggatctgtgtggaccagatgctgggccgattggcaatgccacagggcaggctgactgcaaagcccaggatgagaggttctcactcatcttcaccctggggtccttcatgaacaacttcatgacattccccactggctacatctttgaccggttcaagaccaccgtggcacgcctcatagccatatttttctacaccaccgccacactcatcatagccttcacctctgcaggctcagccgtgctgctcttcctggccatgccaatgctcaccattgggggaatcctgtttctcatcaccaacctgcagattgggaacctatttggccaacaccgttcgaccatcatcactctgtacaatggagcatttgactcttcctcggcagtcttccttattattaagcttctttatgaaaaaggcatcagcctcagggcctccttcatcttcatctctgtctgcagtacctggcatgtagcacgcactttcctcctgatgccccgggggcacatcccatacccactgccccccaactacagcataggcctgtgccctgggaatggcaccacaaaggaagagaaggaaacagctgagcatgaaaacagggagctacagtcaaaggagttcctttcagcgaaggaagagacccaggggcagggcagaagcaggaactccgctccttctggagctacgctttctctcggcgctttgcctggcacctggtgtggctgtctgtgatacagttgtggcactacctcttcattggcactctcaactccttgctgccaacatggccggtgggacatggcacgagtcagcacctacacaaatgcctttgccttcactcagttcggagtgctgtgtgccccctggaatggcctgctcatggaccggcttaaacagaagtaccagaaggaagcaagaaagacagggtcttttaacatccgaggaccacattctttatactttccaaatcatcacctgccccatgcaacttacagggataaagccaagatgaaactccccctacttctggctcttctatttggggcagtttctgcctcttcatctaaggtctgagacttccacctttgagacccctttgggtgctaagacgctgcctgaggatgaggagacaccagagcaggagatgggaggagaccccttgcaggggagctgggaggaagaggaggagtgggggctctgggaagtgaagatgcctcccaagaaagatgggggctgtttgagtctattcttcagtgcccagatatgggtgggacaaaaacctttacgtgtcctgagggaaggagggacacagtaaaagtggtggggcatccctgggtgccagacctgccgctacctcctggtgagaagtcttcagacgtttagtcaagcttggtttacttgccggaggtgctaacaggggcaacctggtttccatccacaacttcaatattaattatcgaatcccagtgttctgtcagcgcgctcaaccagggtcaagtctggattggaggcaggatcacaggctcgggtcgctgcagacgctttcagtgggttgacggcagccgctggaactttgcgtactgggctgctcaccagccctggtcccgcggtggtcactgcgtggccctgtgtacccgaggaggctactggcgtcgagcccactgcctcagaagacttcctttcatctgttcctactgagctggtcccagccagcagttcagagctgccctctcctgggcagctgcctcccctcctctgcttgccatccctccctccacctccctgcaataaaatgggttttactgaaatggatttattttctcctctgatcgcggatcc

SEQ ID NO: 46725 - DNA, 1151 bp, Homo sapiens
gaagaagaaatagcgttagaaagaccagagaaagaaatcaggaatgagggatcccagcctgcttacagaacaaaccaacaggacagttgatatcgaagcgttggccaggtgtttgggaaaatgtcctgggtttgcacttctctagacacaaagaccatcaccacccatggctgaaggacatgtccccaggacccaccaattttcaacagtgtgatggccaggaccaagatgaaacgcatgagggaatcagccatgcagaagctggggacagaagtatttgaaagaggtctataattacctcaagagagcaaggcatcagaatgctagcgacaggagatccgcgagtgtttggaaaaagtggtgcctcaagccagcgactgttttgaagtggaccagctcctgtactttgaagagcagttgctgatcacgatgggaaaagaacctactctccagaaccatctctaggcaactatcaaaaagaagcagaagttcaagtggacaaatttatgtgaaaattcatttaacatataagctgaactctattatggggaatggatacaaaagcagagctcccatcttgactttcaattcctcatcagaagtactggcttctttagagagtagtaagcatggctgcctatgcttggagtcataagtgttatttggactataccctgagataagcttatagatcaagtttgggctcccttgaaaagcatttctctcatgtgcgcccctcagggcttccagcaggattgagtcaccctgacgatgaccggggagaagccgtgtgctcttcattattttcagctggaggacagagctcagtgcctgactgcctagggtctcatggactgtaggcagcctgccagtgaaggtcactggactctagcctacaacatgctgagctacagcccagaagccagacatgcctgtcttagctgacctgtttttggtccacttttgcccttccatgactaataaggaagatatgtgtgtatttcatacacacacaaggacctggattaaaaatccaaaaagtgattctcttctatgatttatttcaaactcatccatagataattcaagatttgtattcaaaataaacatagttttcacagttacaaaataaatcacctattttatctttt

SEQ ID NO: 46726 - DNA, 1831 bp, Homo sapiens
cgtcgacttttttttttttttttttgaggtttaaaagtttattttacaaccatgtaattgtacaaatgatataaacagaagtcagataaaattattagtacatatatagtactaaagcataaactattacagaaaatttgatacaaagttgtacataagtacttgtaaaggcaattaagcttccccagtctatgggaatacaaaagttgccagcaattaatttacattacaaaaaaggaaaaccattatttatgctatcacaaaagcaataccccttaaaagtaaaaacaatctccacttgatattagtaatttgaaaaacttagcatatctacaactactgcttaatcaacacttttcattgattcaacattatcacttaaatgcagatgcaaaataaccttgcatggcaaacatgtttactctgtgctaatgaaactatgaaacagttcctgcaagttcacagacaagtcaatcaatgattgactacagaacagactggtgagtgttacaaaaaaaaaaagacctgcccaggggaccactaggggtggaggaagaacacctgggtctcactcactgggcacttgatgctttcatttttatctgtaagccaggggacaattatattaatattgtatgaatacactgctactgggaaaagcattcattcaacagatgcccactacatactctgtaccaggtagtgtgttaagtgctgaaacagggaaggacaaggcacatcctacgggggctcgcagtgtgggcaggtgcctgagctaacgcacacacacaagggctgggtacctgccagatctgtatcactccggagcaacgacctgtctctctgaatgatctctggcatggtaaaagagttaacgtgtatttcaaaaggtgaaaacaaaactttttttgctttgttatgcatgtttcaaattgatcagtggttcaggccctggagtatgcatcagaattatctgtgaagcttagtgaaagtgctgatgccagagcccacccaaagcttactgcttcagaaccactggggacctggcagttctgatgtgcacgactagtcaagaatcctttaaaggctgataaagcaatcttgaaatcactgtcaatgcaaaagtggatgttcctcattaataagaactcaaaaaataaagtacagctagtataagacttgttttttgtgcctataaaacccaagtgttagctactttctaactataaaattctatccaaaaagacttgcagtcaaaacaccgagccaaaaaacaaaaaaggcaccaaagccagtgcccgacttcaatgtgcaaaggcccttttacgtgctgatattgtaagcaatctgtgtgccatgtgtacatatgcatctgttttcagggaaagaaaagctgttaaagccaattaaggttatgaattcttgctactactttaatattaaacctttaagtgaaaatttattgaacactattacaaatgtggcaaactgacatagctggtttactgcacaaactttaatgtcaaagggattagatcagagctccagtctcacttactgggcctataacattgtgcagggcacttatctcacctcaggaaaatggaagtaactgcttcattttacagaggtattaaatgaaagaaatgagaaaactataaaccaacattgaagcctgaattattgcttagtatttaaagtctagtacaattgcaatgtttttaataaaaaaactcattgataggtgtatttttacagtgtatctaaaagcagcatttaacattaaaaacttagtatttaaaagagtacacaaccaggcagggtgtggtgg

SEQ ID NO: 46727 - DNA, 2061 bp, Homo sapiens
ctgcctcaggaagcttggcttcccctcccatggggaagtgctggaatccactcttgcctgaccctcccataagaaacaagggaaattcctttacgtgagccgccttgctcagaacaaagcttggcgtgtttcttattcctcatcaatctgacaaaatgggtatttatttgtgcctctcaagcgtgtggcttggacatgatgttccgcatcgtggaagtggccgtgcaccaagtggaatatctgttactatagtaacagttcctttttattgataccagaataaacaggaatgcaaaggctgtctcacttgttgggcacatttcagcagcctccgttcccagaggtttaagaaccgccctctaggagggcagccctccttgctagtctgggacttcccggtggagtgaggaacccagcaacacgctcctgacttcccttcccaaggactcgacctgagaaccgccatgtactcggagatccagagggagcgggcagacattgggggcctgatggcccggccagaatacagagagtggaatccggagctcatcaagcccaagaagctgctgaaccccgtgaaggcctctcggagtcaccaggagctccaccgggagctgctcatgaaccacagaaggggccttggtgtggacagcaagccagagctgcagcgttgtcctagagcaccgccggcgggaaccagctcatcaagaagaagaaggaggagctggaatccaagcggcttgcagtgcccctttgagcaggagcttgctgagacggcagcagaggctgaaccagctggaaaaaccaccagagaaggaagaggatcacgcccccgagtttatttaaagttcaggggaaaacttgcggagaattgccacactgaccagcgaagagagagagctgttagggccagctggccgggctcaggccacttgccccacccttggccttggacagcctccttcagcccttctgtacctggcagcccctgggccccaggccctgggacgtctgtgatgttcccacctgcttctgtagaaatgtgtcaccccagagggcctggctctccctgggaggctggggcccctaagctcctaggttttccttccaagcacccagccctcctgctccaagagggataacctgcacccctccctgcaaggggttcagagcccagcacaggagctttctctggcagaattgaggaggaagaggtggccctctgacttgacaagccttctgttctgcccaggccttcccaccaggaatctccgaggctccccagggccccgcttctccgtacaccccagctcctaggtctcagagaactccccaacctgtggttttacctgcagccagcagagcttagcttcaaggacacctgccttcaaagccactgaggggaggaagggcagggcagactgcagatggccttgttgctggcatcccggccaggtgggcggggactaacaaagacagctgtttagggtcttctcccctcacccatgctttcatcatcccctccccacagcctccccgtccaggccttctaaccacacctaccccaggggtgccgcattcctgcactcagaagtctgcagcggtgcctcacaaacttgattgtgcataaaaatcactggggatcttgttaatacagcttctaactcaatagatctgggagatcctgcatttctaacaagctccccaggtaaaggcggaaggctgctggtgtgaggaccatgctgtgagcagcagggcgagagtgcccagggctgatatatattggaaatatcacccctgaagccatcgctggcccccacctcctgtggactgatgccccagggattcccaccccacttctgcaaccccaggtatccttcattatccaccccatcccagactcccaccccagggattgcccgtgaagactttggcctagcaaattgtgttggttatgtgagtgttgttttaatcagagatgtacatgattgccaatctgcatttcttaccagtgtgaccacactgttacgatgcaattctagccaaaaaaaaaaaaaaaaa

SEQ ID NO: 46728 - DNA, 997 bp, Homo sapiens
ttttttttagcaaaataaatgtcactatatcaagataaagaataacattaggtgtgaactagcataggtgattcatgggaaacgaaatggcaaattcgaaaggaattctgggaaccatcgtactaggttacattgcctttttgcctgtagagaacccatgaggagaggggttctcagccttcccagtggaacccttctcttagttgcactggcattgggggatctcattgctgggcctaggtccagggcagggcagctcctggggcccaagggcggggctcactcaccagctgtcttccagtgtctgtgtgctgctcctgccctcctgcctcttctccagctccactgctgtctgttccaacagaggcagacacagcgtccgtgctggcaggccctgaggcaggggccatgactcccactggcttgagctccctgctctgtttcttcaagtatttgtagctgagaaggttgtaccagcgagtcgacctctccccagaccggcagacctccgccaggctgatctgggcgcctcccaggcactcttccagatggctcctgtcggtggtacagacatcgactcttaaggtcttctggtgaagggctggataggacatggatacccagaacacctcattgaacactagagtgtctgaggcgtccagaggccgggtccggaacaggcaggttgtgctttcagagcaaggaaggacagccacgcggatattcctagagggagacagaaccgcaggaaatcttgggtcagcccatgtctggggctaaaatgttggactaaacagctgctgaaatccctaagcaaacaacagtggatgagagtttgtagaagtgaggaatctggggaatcaggcccctatacactggaaggaactttgacaaatcgaacaaaattccagatgcatttgtcctttggtccagacccttcacttctaggcattatcccacagatgcccctgcatgagtaccagtgagctatggaggc

SEQ ID NO: 46729 - DNA, 351 bp, Homo sapiens
  misc_feature (1)...(351): n = a,t,c or g
gcacttactataagaacatgaaacgaaaagaatggaatatcatagagatactgaatcttgaaaaaaacaaaagactaaaataacagttttgttggaagcagcagtctgttgctctgtaaatgttcccactattcaagcttacagattcacttgagtatatgatgtgtataaggtacatggaaggaacataaaataatctgccctaaggtgctctcacattattctattgtaagataaaaatgtgcatttcaaatattacagagtggtgctggcagccgtgagataaaccatatcatccaactaacagcacaaggcagatggatgaggaactagaattctattgnattttat

SEQ ID NO: 46730 - DNA, 1601 bp, Homo sapiens
  misc_feature (1)...(1601): n = a,t,c or g
tcttctcttaatcggaatcgtgatggtgttggattatttcaatggtggggttaatatagcatgttatcctgtctatcttttaaagatttctgtataagactgttgagcagtttttaaaatagtgtaggataatataaaangcagatagatggcgctatgtttgattcctacaacgaaattatcaccagctttttttcattcttaactctttaaaggattcaaacgcaactcaaatctgtgctggactttaaaaaaacaattcaggaccaaattttttctcagtgtgtgtgtttattccttataggtgtaaatgagaagacgtgtttttttccttcaccgatgctccatcctcgtatttctttttccttgtaaatgtaatcagatgccattttatatgtggacgtatttatactggccaaacatattttttcttttgtccctttttttctttcctttctttttacttcctttatttctttattccttccttttcctttttttcttttttttttcttttttttttggtagttgttgttacccacgccattttacgtctccttcactgaagggctagagttttaacttttaattttttatatttaaatgtagacttttgacacttttaaaaaacaaaaaaagacaagagagatgaaaacgtttgattattttctcagtgtatttttgtaaaaaatatataaagggggtgttaatcggtgtaaatcgctgtttggatttcctgattttataacagggcggctggttaatatctcacacagtttaaaaaatcagcccctaatttctccatgtttacacttcaatctgcaggcttcttaaagtgacagtatcccttaacctgccaccagtgtccaccctccggcccccgtcttgtaaaaaggggaggagaattagccaaacactgtaagcttttaagaaaaacaaagttttaaacgaaatactgctctgtccagaggctttaaaactggtgcaattacagcaaaaagggattctgtagctttaacttgtaaaccacatcttttttgcactttttttataagcaaaaacgtgccgtttaaaccactggatctatctaaatgccgatttgagttcgcgacactatgtactgcgtttttcattcttgtatttgactatttaatcctttctacttgtcgctaaatataattgttttagtcttatggcatgatgatagcatatgtgttcaggtttatagctgttgtgtttaaaaattgaaaaaagtggaaaacatctttgtacatttaagtctgtattataataagcaaaaagattgtgtgtatgtatgtttaatataacatgacaggcactaggacgtctgcctttttaaggcagttccgttaagggtttttgtttttaaacttttttttgccatccatcctgtgcaatatgccgtgtagaatatttgtcttaaaattcaaggccacaaaaacaatgtttgggggaaaaaaaagaaaaaatcatgccagctaatcatgtcaagttcactgcctgtcagattgttgatatataccttctgtaaataactttttttgagaaggaaataaaatcagctggaactgaaccctaaa

SEQ ID NO: 46731 - DNA, 1572 bp, Homo sapiens
cttttgtgtgcttcctgctggggaatgtgtacgaggcatttaagcattggaagcggctcctgtgcctcctgtgccggtcagaagcagccatgatgaagcaccacaccctctacatcaacctcatctccatcctgtaccaccagcttggtgagatccccgctgacttcttcgtagacattgtctcccaagacaacttcctcaccagcaccttacaggttttcttttcctctgcctgcagcattgccgtggatgccaccctgagaaagaaagctgaaaagttccaagctcacctgaccaagaagttccggtgggactttgctgcggaacctgaggactgtgccccggtggtggtggagctccctgagggcatcgagatgggctaactcggggagcgctctcagctgcgaggggccccttcccacagggctgcagtcctggcctctccatttacttcttcccatcctgggacctgccagggcagcaatctctccaggtcctgcaaagatggagccagaattccctttttcactgataaatatatttcttcattgccaaagaggctgtacccatcctgaaggcacatttgtgggttccccatcagccaggccttggtgctaacctggctgaatttcacacaggctcttacacacacacgctcctaggagacatctgcctacacggcaaccatatttcctctgaatgagaaggaattgaaccaaaagtccaagaaagaactgattgcttgttccataggagcttaggaaacaagaaaccctggattgcccagggggtctgagaagttggttggtgactttttttgcggttaaatgaagggtgatggggagatcagcccgaattgccgcctgcctcttgctaaataggagcagaggacttggcctgcagctccttgggagcccttgattgggaagagagtttcaagggaggcagctggattcaatctagcaggtggtcagcttcagctttctccatcgaaatcccattctcctgtccagaggcccagtgggtcatctcccaagggtgggtgtggaccctgggcctcagaggcccttgctggtgctgtcacctcccacctgttccattccgaggcctcacccagaagtgggaccctccccttcctcaccagagccaccgtgactgtttctgatgacctggagagtcaacaacaaccagaaaggtttctgcccagagcaggcttcttaaggcctttacgaagttttgtgccttccaagtgctgaagaagacctggtcagcctaaatcttcccagtcccgctgtggagctgtcagtcaccggagtaatgagctcctggttcctcgggagtccttcgtgctgtgtggcagggttcctctctagacaagtacacaggccctgccaccctgacatcaaactgttgtactatgatcacagtccctgtgccatccttttccaagactggggctcacaccatgtttttgaatgagaatccctgctggttgagacttttgcttccacttgtttccttggagatgtttttccaagagcataatgtacattaaagtcttcgagttgagac

SEQ ID NO: 46732 - DNA, 785 bp, Homo sapiens
catgtttgaggggtaaagctgactttctctttcttttttagccatgagttcaagttcctctttggcattactcagttctttttccagccctgcaactgtgtccaagtctcctaatgtggatctgggtatgctgacatcctctttggcagtcaatgaagtgctatcatctctggaaggtatctgcattgaaccttgatcagtctgttttccaagacggccagtgggggtaacttcagcttgttggttagagatgggtgcttgggacatcagggagtctctccctcctaaatattggtgcagggcctgtaattctgaatttctttccattaaggcttgcaccaacttctctgcagcagcttggctttcctgctccctggtgctcacagactgaagcaggccttgaatctccatttcatgttccagcacttgtttatttcgatcacttagaaggtcctgcagcatcctttcctttcgctgtagacgctggcacagctcctctgctatctcactctgccctggtccaagtttgcagagcagtgttgcactaagatcctccacttctttgttcctatcatgaagagacgtctgtaactgctgaatgatactctcttgttccttctgccaacggctaaatttggtttccatttcttctttcagccactggaggttttgacaggtagtagataactgttccacttccaggcctttggccctcaggagactctccatactttgcatagtagcttcattggaggagaggacatcgcgcagtctctctaagtcat

SEQ ID NO: 46733 - DNA, 1086 bp, Homo sapiens
gattccggtcaccacctccgggaaaagcgtgcggcctgtccgtgacaaaaagactgagggcgggggcgctgcggcacagctggtttgagcaactgaactggaaacaagatgcaggaccccaacgcagacactgaatggaatgacatcttacgcaaaaagggtatcttaccccccaaggaaagtctgaaagaattggaagaggaggcagaagaggagcagcgcatcctccagcagtcagtggtgaaaacatatgaagatatgactttggaagagctggaggatcatgaagacgagtttaatgaggaggatgaacgtgctattgaaatgtacagacggcggagactggctgagtggaaagcaactaaactgaagaataaattcggagaagttttggagatctcagggaaggattatgttcaagaagttaccaaagctggcgagggcttgtgggtcatcttgcacctttacaaacaaggaattcccctctgtgccctgataaatcagcacctcagtggacttgccaggaagtttcctgatgtcaaatttatcaaagccatttcaacaacctgcatacccaattatcctgataggaatctgcccacgatatttgtttacctggaaggagatatcaaggctcagtttattggtcctctggtgtttggcggcatgaacctgacaagagatgagttggaatggaaactgtctgaatctggagcaattatgacagacctggaggaaaaccctaagaagccgattgaagacgtgttgctgtcctcagtgcggcgctctgtcctcatgaagagggacagcgattccgagggtgactgaggctacagcttctatcacatgccgaactttcttgtgacaaattgtctggattttttaaaaaaggaaaaagcaagaatgaatccttgtggtttttagttttgtataaattatgtttcaaatctttacattttggaaataatcattgctggagattctgttaaatattttggaactcttttttttttaaattatagtatttcctctaaaaaaaattaaaaccagccatttgtatggcaaaaaaaaaaaaaaaaaaaaaaa

SEQ ID NO: 46734 - DNA, 719 bp, Homo sapiens
  misc_feature (1)...(719): n = a,t,c or g
cttaactactttgttggcattgatcctagtgtctttaaatacttcatgagcattcataattaaaatttatcttaagttctatgaagagtattaatgtaactagcataagtggttttcttcaggaaaataaatatcacagtattatctgtgttaaaatggtttttgcctaaaatataatttttaatttggcttttcttatttaaaattccattatcttatgaataagcacttgaatcagtttttaaaatatttagtctaagatgattcaaagtagttttattttaatacaggacttttaaatggcagtatttcatttcttgtcaattatgttggtactttccacaaatctataaagaaggataaattgtaccatcattttattataatcctcaagagaaaatgtgtaattcaaaagattaatgtgtattaaaacacattatgtatcttagttacatttctatcagtacttttattaatatttgtgaaagaagacagcttaatagtagttagcttaagtagtttctccaagtacttttgtgctatcaatgagttcttctcaaaaaataattagttaggccagggcacaatggctcacacctgtaatgccagccctttggggagggccgaatggggcagatncacttggagggtccagggagtttgaggaccagcctcgccaacatgggtgaggaccctgtctcttacttaaaacgattaaa

SEQ ID NO: 46735 - DNA, 1707 bp, Homo sapiens
  misc_feature (1)...(1707): n = a,t,c or g
atggatcctggggacgactggctggtggaatccttgcgcttgtaccaggatttctatgcattcgacctgtcaggagccactcgagtccttgaatggattgatgacaaaggagtctttgttgctggctatgaaagcctgaaaaagaatgaaattcttcatctgaaattacctctcagactttctgtaaaggaaaacaagggcttattcccagaaagagatttcaaagtgcgccatggaggattttcagacaggtctatctttgatctaaagcatgtgccacataccagattgctggttaccagtggccttccaggttgttatctgcaggtgtggcaggttgcagaggacagtgatgtcattaaagctgtcagcaccattgctgtgcatgagaaagaggagagtctctggcctagggtggccgtcttctccacattggcacccggagtcctccatggggcgaggctccgaagtctgcaggtcgttgatctggagtcccggaagaccacgtacacctcagatgtcagtgacagtgaggagctgagtagcctgcaggtcctagatgcagacacctttgccttctgctgtgcttcgggccggctggggcttgttgacacccggcagaagtgggcaccgttggagaatcgcagccctggccctgggtctggtggagagagatggtgtgctgaagttgggagctggggccagggccctngggcagcatttgccagccttggctcagatgggcgtctttgtcttcttgacccccgggatctctgccatcctgtgagctcagtccagtgcccagtatccgtacctagccctgacccagagctgctgcgagtgacttgggccccaggcctgaagaattgcttggccatctcaggttttgatggtacagtccaggtctatgatgccacatcttgggatggaacacggagccaagatggaacacggagccaagtagaacctctcttcactcacagaggtcacatcttcctagatggaaatgggatggaccctgctcctttggtcaccacccacacctggcatccctgcagaccaaggactttgttatcagcaacaaatgatgcctctctgcatgtgtgggactgggtggacctttgtgccccccgctgacaccagcatctttccatctaggcctctagaaaggggaggagctgctgtagtagcaagggtgctgatgtaggactcaagtgactaccagtccctgttaccagctgtgtggccttgggcaagtctgccagcgtcacttagcctcagtttccttatctgtaaaatgaggatagtaagaactacctcgtagtgatattgcgaaggttagaagaaacgcatggcataattacttggtagctattgttagatctgggagtgtgaaatggtagcgttttgtccctgtcttcacactatcatagggagaatcaaaagagctaacaaatataaacatgctttgtgaatttttttaaagaaaaaaatgtagaggggccaataaacatgaaaaaatcccagccctagtagcaattaaggaaatagcaaaacaggatttctgctcctcttgagtgggtctcatgggaacacaggtgcactttcccacacttgtccccccaggtgactaggttcaagagacatttgcttttggtggccccacaaacatttccttttgagggcccatagtgaatattaaagtgt

SEQ ID NO: 46736 - DNA, 424 bp, Homo sapiens
gtgggatctgtagtgagccttatatgaaatatgtatggaatggtgaacttctggatataattaaaagtactgtgcatcgtgactggcttttgtatattattcatgggttctgtgggcagtcaagtatcctttctgaagaaaaagtaagatacatattactaaacttatgatgtatcaatttgtagacagctacatatgaattatatgattataataccactctgtgcaccccaacaggaaaacctgcccatgatactatgtagcagaaatacaaagaagaatgcagactatttgaacaggcctgttatatacacataaagatgaataaataacaaggaagaaaatgcaatgtgatataggtaataagtgtcatgcttatctgggagaaggaggagaattactgatagttggagaggatgggaca

SEQ ID NO: 46737 - DNA, 4649 bp, Homo sapiens
tatgagttattaagcctacgctcagatcaaggtagcagctagactggtgtgacaacctgtttttaatcagtgactcaaagctgtgatcaccctgatgtcaccgaatggccacagcttgtaaaagatcaggagaacctcagtctgacgacattgaagctagccgaatgaagcgagcagctgcaaagcatctaatagaacgctactaccaccagttaactgagggctgtggaaatgaagcctgcacgaatgagttttgtgcttcctgtccaacttttcttcgtatggataataatgcagcagctattaaagccctcgagctttataagattaatgcaaaactctgtgatcctcatccctccaagaaaggagcaagctcagcttaccttgagaactcgaaagggtgcccccaacaactcctgctctgagataaaaatgaacaagaaaggcgctagaattgattttaaagatgtgacttacttaacagaagagaaggtatatgaaattcttgaattatgtagagaaagagaggattattcccctttaatccgtgttattggaagagttttttctagtgctgaggcattggtacagagcttccggaaagttaaacaacacaccaaggaagaactgaaatctcttcaagcaaaagatgaagacaaagatgaagatgaaaaggaaaaagctgcatgttctgctgctgctatggaagaagactcagaagcatcttcctcaaggataggtgatagctcacagggagacaacaatttgcaaaaattaggccctgatgatgtgtctgtggatattgatgccattagaagggtctacaccagattgctctctaatgaaaaaattgaaactgcctttctcaatgcacttgtatatttgtcacctaacgtggaatgtgacttgacgtatcacaatgtatactctcgagatcctaattatctgaatttgttcattatcgtaatggagaatagaaatctccacagtcctgaatatctggaaatggctttgccattattttgcaaagcgatgagcaagctaccccttgcagcccaaggaaaactgatcagactgtggtctaaatacaatgcagaccagattcggagaatgatggagacatttcagcaacttattacttataaagtcataagcaatgaatttaacagtcgaaatctagtgaatgatgatgatgccattgttgctgcttcgaagtgcttgaaaatggtttactatgcaaatgtagtgggaggggaagtggacacaaatcacaatgaagaagatgatgaagagcccatccctgagtccagcgagctgacacttcaggaacttttgggagaagaaagaagaaacaagaaaggtcctcgagtggaccccctggaaactgaacttggtgttaaaaccctggattgtcgaaaaccacttatcccttttgaagagtttattaatgaaccactgaatgaggttctagaaatggataaagattatacttttttcaaagtagaaacagagaacaaattctcttttatgacatgtccctttatattgaatgctgtcacaaagaatttgggattatattatgacaatagaattcgcatgtacagtgaacgaagaatcactgttctctacagcttagttcaaggacagcagttgaatccatatttgagactcaaagttagacgtgaccatatcatagatgatgcacttgtccggctagagatgatcgctatggaaaatcctgcagacttgaagaagcagttgtatgtggaatttgaaggagaacaaggagttgatgagggaggtgtttccaaagaattttttcagctggttgtggaggaaatcttcaatccagatattggtatgttcacatacgatgaatctacaaaattgttttggtttaatccatcttcttttgaaactgagggtcagtttactctgattggcatagtactgggtctggctatttacaataactgtatactggatgtacattttcccatgggttgtctacaggaagctaatggggaaaaaaggaacttttcgtgacttgggagactctcacccagttctatatcagagtttaaaagatttattggagtatgaagggaatgtggaagatgacatgatgatcactttccagatatcacagacagatctttttggtaacccaatgatgtatgatctaaaggaaaatggtgataaaattccaattacaaatgaaaacaggaaggaatttgtcaatctttattctgactacattctcaataaatcagtagaaaaacagttcaaggcttttcggagaggttttcatatggtgaccaatgaatctcccttaaagtacttattcagaccagaagaaattgaattgcttatatgtggaagccggaatctagatttccaagcactagaagaaactacagaatatgacggtggctataccagggactctgttctgattagggagttctgggaaatcgttcattcatttacagatgaacagaaaagactcttcttgcagtttacaacgggcacagacagagcacctgtgggaggactaggaaaattaaagatgattatagccaaaaatggcccagacacagaaaggttacctacatctcatacttgctttaatgtgcttttacttccggaatactcaagcaaagaaaaacttaaagagagattgttgaaggccatcacgtatgccaaaggatttggcatgctgtaaaacaaaacaaaacaaaataaaacaaaaaaaaggaaggaaaaaaaaagaaaaaatttaaaaaattttaaaaatataacgagggataaatttttggtggtgatagtgtcccagtacaaaaaggctgtaagatagtcaaccacagtagtcacctatgtctgtgcctcccttctttattggggacatgtgggctggaacagcagatttcagctacatatatgaacaaatcctttattattattataattatttttttgcgtgaaagtgttacatattctttcacttgtatgtacagagaggtttttctgaatatttattttaagggttaaatcacttttgcttgtgtttattactgcttgaggttgagccttttgagtatttaaaaaatatataccaacagaactactctcccaaggaaaatattgccaccatttgtagaccacgtaaccttcaagtatgtgctacttttttgtccctgtatctaactcaaatcaggaactgtattttttttaatgatttgcttttgaaacttgaagtcttgaaaacagtgtgatgcaattactgctgttctagcccccaaagagttttctgtgcaaaatcttgagaatcaatcaataaagaaagatggaaggaagggagaaattggaatgttttaactgcagccctcagaactttagtaacagcacaacaaattaaaaacaaaaacaactcatgccacagtatgtcgtcttcatgtgtcttgcaatgaactgtttcagtagccaatcctctttcttagtatatgaaaggacagggatttttgttcttgttgttctcgttgttgttttaagtttactggggaaagtgcatttggccaaatgaaatggtagtcaagcctattgcaacaaagttaggaagtttgttgtttgtttattataaacaaaaagcatgtgaaaagtgcacttaagatagagtttttattaattacttacttattacctagattttaaatagacaatccaaagtctccccttcgtgttgccatcatcttgttgaatcagccattttatcgaggcacgtgatcagtgttgcaacataatgaaaaagatggctactgtgccttgtgttacttaatcatacagtaagctgacctggaaatgaatgaaactattactcctaagaattacattgtatagccccacagattaaatttaattaattaattcaaaacatgttaaacgttactttcatgtactatggaaaagtacaagtaggtttacattactgatttccagaagtaagtagtttcccctttcctagtcttctgtgtatgtgatgttgttaatttcttttattgcattataaaataaaaggattatgtatttttaactaaggtgagacattgatatatccttttgctacaagctatagctaatgtgctgagcttgtgccttggtgattgattgattgattgactgattgttttaactgattactgtagatcaacctgatgatttgtttgtttgaaattggcaggaaaaatgcagctttcaaatcattggggggagaaaaaggatgtctttcaggattattttaattaatttttttcataattgagacagaactgtttgttatgtaccataatgctaaataaaactgtggcacttttcaccataatttaatttagtggaaaaagaagacaatgctttccatattgtgataaggtaacatggggtttttctgggccagcctttagaacactgttagggtacatacgctaccttgatgaaagggaccttcgtgcaactgtagtcatcttaaaggcttctcatccactgtgcttcttaatgtgtaattaaagtgaggagaaattaaatactctgagggcgttttatataataaattcgtgaagaaatgtgtgctcttcaaaaaaaaaaaaaaaaaaaaa

SEQ ID NO: 46738 - DNA, 390 bp, Homo sapiens
  misc_feature (1)...(390): n = a,t,c or g
cgcaaaggtggaaataagaacaataaacagaagtagcctaagggagagagggcttagatttttttggcaaatgatagagaaatatagaaagatctcaaaggaggaataaatggaagacaggatggatccagatgaagggatgcaagaaaatgctgtcaagaccaaagtagagaacccatgtgcagctgtgcgtgcgtgcctgtgcgtgcgtgtgtgtgcgtgtgtgtgtgtgtgtgtgtctgttgctgttttttctagtaatttgcacagccttcatctctgaccatttcttggttccatgctaaccatttcttggttccatgctaatcacagaggacactcacatttgattctcttcatttctgtgaacagttattaataanatatttt

SEQ ID NO: 46739 - DNA, 717 bp, Homo sapiens
tttttttttttaaaagtagttaacgtttttattctttacttcaaggtatatctccatgaataacctaaatgatcccccaaattgggaatatccggcctaattccagggcggatggtggtgatggaagcaggtggaattatgccctgttggttccaatgctgggattggctgcttttcgttggatttggtctagggagtcccagaaagaagtagaaaaagagagagaagcctaccgtcggagaactgctgcttttcaacaggatctggaagccaagttaccacggccatgattcttaagaaaatcggcgtgctgtcgctcagttgtccttggaactcgaaaaggaacaaaacagaactgctagttaccgagaagcccttatctctcagggacgcaagttggtagaagaaaagaagcttctggaacaggaacgggcccaggtgatgcaagaaaaaagacaggtgcagcctttgagaagtgcgtatttgagctgcctgcaaagggaagaaaactggcaaaggagagccaggcttttgctgaaagaatttgaagctgttctcacagaaagacagaatatctactgcagtctgtttcttcctcgcagcaagcggctggagatagagaagagcttactggtgcgagcgtccgttcgaccccgtcgcccgctggacctaggagatgggcagccggttttcaccgacatattttcagcctggtta

SEQ ID NO: 46740 - DNA, 503 bp, Homo sapiens; identical to SEQ ID NO: 1263

SEQ ID NO: 46741 - DNA, 374 bp, Homo sapiens
cccttcccagtcactatccccctattgatttatttttaaacacagtgaaactatacatagggatgatgactcttggttcataagtgagtggctcatgttatctcaggtgagtcttctggaaagagccccagattaggagccagaaaaccgtggttacatcgtggcccggttgctttttagctgtatgaccttagacaaggtaaacttaacttttctggacttcattcctctttggtaaagtgaaaataataatgccctcaccttaaacagctgttgtaaggttcatctgacattattggtaaacaggaaataccttgtaaatgggaaacactttgttagttgtaaagagccatacacaaataatagtcattttt

SEQ ID NO: 46742 - DNA, 3758 bp, Homo sapiens
gaattcttaagtctaagggacttgctcctgatcttcctgaagatctctaccatttaattaagaaagcagttgctgttcgaaagcatcttgagaggaacggacacgtggcaacagcggtacgagcccgggcggcggcagcaacagcggcggcggcatcggcccgagccgcggcccgctcccaccctcccgccccgcggcagccctagctccctccacttggctcccctggtcccgctcgctcggccgggagctgctctgtgcttttctctctgattctccagcgacaggacccggcgccgggcacgtgagcaccgccaccatggggaagggggttggacgtgataagtatgagcctgcagctgtttcagaacaaggtgataaaaagggcaaaaagggcaaaaaagacagggacatggatgaactgaagaaagaagtttctatggatgatcataaacttagccttgatgaacttcatcgtaaatatggaacagacttgagccggggattaacatctgctcgtgcagctgagatcctggcgcgagatggtcccaacgccctcactccccctcccactactcctgaatggatcaagttttgtcggcagctctttggggggttctcaatgttactgtggattggagcgattctttgtttcttggcttatagcatccaagctgctacagaagaggaacctcaaaacgataatctgtacctgggtgtggtgctatcagccgttgtaatcataactggttgcttctcctactatcaagaagctaaaagttcaaagatcatggaatccttcaaaaacatggtccctcagcaagcccttgtgattcgaaatggtgagaaaatgagcataaatgcggaggaagttgtggttggggatctggtggaagtaaaaggaggagaccgaattcctgctgacctcagaatcatatctgcaaatggctgcaaggtggataactcctcgctcactggtgaatcagaaccccagactaggtctccagatttcacaaatgaaaaccccctgggagacgaggaacattgccttcttttcaaccaattgtgttgaaggcaccgcacgtggtattgttgtctacactggggatcgcactgtgatgggaagaattgccacacttgcttctgggctggaaggaggccagacccccattgctgcagaaattgaacattttatccacatcatcacgggtgtggctgtgttcctgggtgtgtctttcttcatcctttctctcatccttgagtacacctggcttgaggctgtcatcttcctcatcggtatcatcgtagccaatgtgccggaaggtttgctggccactgtcacggtctgtctgacacttactgccaaacgcatggcaaggaaaaactgcttagtgaagaacttagaagctgtggagaccttggggtccacgtccaccatctgctctgataaaactggaactctgactcagaaccggatgacagtggcccacatgtggtttgacaatcaaatccatgaagctgatacgacagagaatcagagtggtgtctcttttgacaagacttcagctacctggcttgctctgtccagaattgcaggtctttgtaacagggcagtgtttcaggctaaccaggaaaacctacctattcttaagcgggcagttgcaggagatgcctctgagtcagcactcttaaagtgcatagagctgtgctgtggttccgtgaaggagatgagagaaagatacgccaaaatcgtcgagatacccttcaactccaccaacaagtaccagttgtctattcataagaaccccaacacatcggagccccaacacctgttggtgatgaagggcgccccagaaaggatcctagaccgttgcagctctatcctcctccacggcaaggagcagcccctgggatgaggagctgaaagacgcctttcagaacgcctatttggagctggggggcctcggagaacgagtcctaggtttctgccacctctttctgccagatgaacagtttcctgaagggttccagtttgacactgacgatgtgaatttccctatcgataatctgtgctttgttgggctcatctccatgattgaccctccacgggcggccgttcctgatgccgtgggcaaatgtcgaagtgctggaattaaggtcatcatggtcacaggagaccatccaatcacagctaaagctattgccaaaggtgtgggcatcatctcagaaggcaatgagaccgtggaagacattgctgcccgcctcaacatcccagtcagccagggtgaaccccagggatgccaaggcctgcgtagtacacggcagtgattctaaaggacatgacctccgagcagctggatgacattttgaagtaccacactgagatagtgtttgccaggacctcccctcagcagaagctcatcattgtggaaggctgccaaagacagggtgctatcgtggctgtgactggtgacggtgtgaatgactctccagctttgaagaaagcagacattggggttgctatggggattgctggctcagatgtgtccaagcaagctgctgacatgattcttctggatgacaactttgcctcaattgtgactggagtagaggaaggtcgtctgatctttgataacttgaagaaatccattgcttataccttaaccagtaacattcccgagatcaccccgttcctgatatttattattgcaaacattccactaccactggggactgtcaccatgcctctgcattgacttgggcactgacatggttcctgccatctccctggcttatgagcaggctgagagtgacatcatgaagagacagcccagaaatcccaaaacagacaaacttgtgaatgagcggctgatcagcatggcctatgggcagattggaatgatccaggccctggggaggcttctttacttactttgtgattctggctgagaacggcttcctcccaattcacctgttgggcctccgagtggactgggatgaccgctggatcaacgatgtggaagacagctacgggcagcagtggacctatgagcagaggaaaatcgtggagttcacctgccacacagccttcttcgtcagtatcgtggtggtgcagtgggccgacttggtcatctgtaagaccaggaggaattcggtcttccagcaggggatgaagaacaagatcttgatatttggcctctttgaagagacagccctggctgctttcctttcctactgccctggaatgggtgttgctcttaggatgtatccccctcaaacctacctggtggttctgtgccttcccctactctcttctcatcttcgtatatgacgaagtcagaaaactcatcatcaggcgacgccctggcggctgggtggagaaggaaacctactattagccccccgtcctgcacgccgtggagcatcaggccacacactctgcatccgacacccaccccctctttgtgtacttcagtcttggagtttggaactctaccctggtaggaaagcaccgcagcatgtggggaagcaagacgtcctggaatgaagcatgtagctctatggggggaggggggagggctgcctgaaaaccatccatctgtggaaatgacagcggggaaggtttttatgtgcctttttgtttttgtaaaaaaggaacacccggaaagactgaaagaatacattttatatctggatttttacaaataaagatggctattataatggaaaaaaaaaaaaaaaaaaaaactggagactag

SEQ ID NO: 46743 - DNA, 987 bp, Homo sapiens
  misc_feature (1)...(987): n = a,t,c or g
gtgagagtccgtaagagacagcttccaggatcctgagatccggagcagccggggtcggagcggctcctcaagagttactgatctatgaaatggcagagaatggaaaaaattgtgaccagagacgtgtagcaatgaacaaggaacatcataatggaaatttcacagacccctcttcagtgaatgaaaagaagaggagggagcgggaagaaaggcagaatattgtcctgtggagacagccgctcattaccttgcagtatttttctctggaaatccttgtaatcttgaaggaatggacctcaaaattatggcatcgtcaaagcattgtggtgtcttttttactgctgcttgctgtgcttatagctacgtattatgttgaaggagtgcatcaacagtatgtgcaacgtatagagaaacagtttcttttgtatgcctactggataggcttaggaattttgtcttctgttgggcttggaacagggctgcacacctttctgctttatctgggtccacatatagcctcagttacattagctgcttatgaatgcaattcagttaattttcccgaaccaccctatcctgatcagattatttgtccagatgaagagggcactgaaggaaccatttctttgtggagtatcatctcaaaagttaggattgaagcctgcatgtggggtatcggtacagcaatcggagagctgcctccatatttcatgggccagagcagctcgcctctcaggtgctgaaccagatgatgaagagtatcaggaatttgaagagatgctggaacatggcagagtctgcacaagactttgcctcccgggccaaactggcagtttcaaaaactagtacagaaagttgggatttttttgggaattttgggcctgtggctttcaatttccaaatcctttattttgatctggctgggattaacgtgtgggacacttttctgggttaccntttttggggaccctcntttggggggcaacc

SEQ ID NO: 46744 - DNA, 422 bp, Homo sapiens
tatgacatgattacgaatttaatacgactcactatagggaatttggccctcgaggccaagaattcggcacgagccggttaaagaaaacgatgagatcgaggctggcatacacgggctggtcagtatgacatttaaagtggaaaagccagaatattgagttatttcttaacaagtttcgagagagaagggagcaagacaagagcaagcaacggctattaaatgtcacaatcctttaattagaaaccatttattggccggacgcggtggctcacgcctgtaatcgcagcactttgggaggccgaggcgggcggctcacgacgtcaggagatccagaccatcttggctaacagggtgaaaccccgtctctactaaaaatacaaaaaattagccgggcgtggtggcgggcgcctgtagtcccagct

SEQ ID NO: 46745 - DNA, 2430 bp, Homo sapiens
  misc_feature (1)...(2430): n = a,t,c or g
acccactttccttttttacagttacagaccctgttgagaaaaagaagcacccagatgggtgaatggtgatagggcttgtggtggacacagggttgtgggtaagattcctcaagtgcttcggcgagcacctaagactattaccctggaactgactgctttctagagcttgattcatgcctctaagcnnnnnnnnnnnnnnnnnnnnnnnnnnnnnnnnnnnnnnnnnnnnnnnnnnnnnnnnnnnnnnnntgcagattctcagccccctcccagacatggtgaagtcagaagctctcagggagggactcagcaaatgattctaaagcgcatcaagtttgagaaccaccctaagccaatgagtctcccttttacttcccattagtcctccctcaccagatgattcctaggactcatggtgcaacatacaggagccaggctttagggaggggaggaaaggagcctggcggcaggggtctctgcaatggcaagaaagtgagtgaatccagcgctgccacctggttatccccttctcgttgaaaataggcagcgcggcgtgcaaattcctaaacacaggctgcctgcactcggtgttacctcgggctgaggcagtgataatattttattttttaaagctgtgaggaaatgaaagtgaggctttggttggggcgaggcagttgtgaaagaaattaaaataaaagaccctttgtaaatgcagacttagaagaaatactgaatttgtgtcagaagttctcccagtgtttgtgttaatcgtgtggtgataatcctgtccctccttttaaagcgaattctctactgaaaggtctgctctgcttaaggagctacaaactgctctcaaaagaattgaaatacttgagttccaattcagtgaggcacagtgttgggactatgggcacatttagtttgggagttcggggggaggtccagggaatatgatcagataatggattttataccttagagcaaaatctattagtctctctcagtttatcaatttaaatggctttaggcttatagggggtgtaaactttaagaatataattctcccattcaagtttacagcaaacatctagccaccttcaaaaccaagaagatacagaccatcatttagcaatactaatacatgattttccttggggatggcaggtttgagaatcctttagcaacaggacatacttcccctaaattacagtgaattatttataacgagataaagctttcaggtacaagctgaaggtggggtgtctaacaactaaaaactatcactaaatctcaaagagaaagttcttgcaaaatatgtaaagttcacaaggtgcagacattttccttctttaggcttttatctaaggaagggctatgaaactgggcccatctgtatacaggctcaaatttacgtttttaaaggaagaatctatgcagctgaggcttattgcaggaaatacttcatttgtatgtaaatattattgtaaataaataggaggctgtatatttttgaagttgttgatccgcactgaaatagaagtctctaggatctgcatataaacaataaatgtttcctagaaattagtggttttgtttggggaattaggaaaaatttacattctctcccgggtaacatagttctctcaatagtaaacttgggaacctggaaaccctacttaatttaggggaaaggaatgttctggggaattagttcccttgatttcttatgctggcattaagatcaattatttaacagatagtcctctgagatacaagtaaggaatatttagacacaaatccttgtcctatagaaacagatatacccaaatgacaaattgtttcttcataatgatcttccatttttaacactgataccactacacagtacatatgaaaacagaagctggggagaagaatgtttttttcacaattgaattgctgcatttctcaaactttgggatctatgaaagcggggagagggaacctgaatattaattatgagcacaaatttgaaggaaagaaaacaaagaaccattatctaatccaagctttgaaagtcctgcatgtttgccttttattttagtgttgacgccaacatagactgtctaaggtatttttttcccccaaacacttgaatcttggtcgttggtatgtaatccactctctagagtccagtgtactttagacttcatctgagtccaatacatgtaccacactactgttttattaatgtaaaaaccttgtaaatgaatttcagatgggtgatttaagtgagtcacaagtcacaaaactttgctattcatagttaatcaaatagaactgggttttttttttcagagtgtggtgtaaataaagaaatataagaagttctgttctataactgctctgttaacatagtttttaaacattaaaaaatgtgaactaaaagta

SEQ ID NO: 46746 - DNA, 1286 bp, Homo sapiens
  misc_feature (1)...(1286): n = a,t,c or g
tatttgtggagggaattgtatttaagtttgtacagatcttggttgtggaatctttaattctggttgttttgtgcaaatgcatggaaagcaaaagaatcatcgttataaataaattgaagcttgaggatgacttcgtaaaagaactaatatttgcaaagaaaggggacgaggacattttctaataagcattagccaggagcagccacccccaagtacattttattcccaggtatatttattttgggactaatagcaatcaaaacagagtaagcggaaggtcttttttgtaagggtaagatgactgtgttcctgcagcctggacactgactgctgcaatgaaattggatctgttgagcatgtcttccaaggacagatttggatagtaagccaggtagaaggccagagctcccacaaagctgtcaccagcacccgtggtatccacagccttgactttctctgtgggaatgtgctttggctcaggttctgtctgtgacagcaccacacatccttcagcccctaaggtaatgattaccacctggcagccccttttcaagagcactaatgcagcctccccagcatctgcagcgctgcccaccgtgaggccagttaaaatctcagcctcactttcattgcagcagaacacatctgagagggtgtagaactggggatccaggtcagcaatggcaggggctggattgaacaaggttttcactccactcctgcgggccattgttagggcttccaaagaagttgctggagttatttcgagctggcagaccatgactttggntctgctaatgacattgctgctgccctcagatcctccgtattcaaaagtaaatttgctccagccactatgacaatgatattctggccttcattattgacaattatagaagcagttcctgagcagcatctttagtctgatatgtaaattctgtagaaatatcaattctggttttaagttttctatataatcattgccaaaagaatctttgccaaccttacacaccatggacgtcattgctccaagccgagcagcttggacacactggttggcacctttccctccaaagccaataaaaaacttatgtccatggatggtttctccagtttttggcaaacgagaagtaagactgaccaggtcggtcatgcaggagcccaccactaccaccgccgccacctcctcttgccactgcctctggggttccccagacngccgccatcgctcaaaggtgctgctgtccaacctggacggtgaccccacgcgtccgcccacgcgtccg

SEQ ID NO: 46747 - DNA, 1592 bp, Homo sapiens
tatgactgattacgaatttaatacgactcactatagggaatttggccctcgaggccaagaattcggcacgagcggcacgagctgcattgtggggggacaggctcaagcaattctgtccccatcaaggggtcagctggagagacccaagaccctatctgttcaccaggggacccaaaatccaaggggatgcttccctctgccctctttcctgcccctccccatcatacctgcacccaccccagccagggctccctgtccagaattcggttctcctcaggacgccaactcccagagctaaggaccaaggagaagaacagcctctccacccccaagccaggcggttgaggaacatattgagaaaggttcagattgcagaaacccagccctgcccctgcctcctgcatccagcccccaacatggtgccaaagcttccagaagccaaaaagcttctgatttttaaggtagtgggcatctctctcctaatgacgaagctgctcagcaactccacctgcccgccgcaggaagggagcagtcccctgctatccctgcagccactcccagcacacccgcacacagccaggcaccaccgcccccaccgttgcacttctcctctctggggccttggcttgggaccaggtacgaaggatccccaagcccttcaggcctgagatcagagccagatcagccttaagtcacctcccatccaagaacttggcctaaaaatactcccctatttctaaccctcaggacggatctgatattaaatgccttccctgggaggaagggtgctttccccctccctagaggtgcccattccataccctgggagactgaggagagcattggctgaagcccagttcctttcccatccatccccaactccaataatcccccactcctcgcaggtctcagtgtcatgctgtcttggggcagggtgaaagggtagtggcagcagggcgcccactctggagatcctcaaaaaaggccctcctctgtggctggcagcctctgacctttccctgggcttcaaaggaaggctatggagtttgctgtgggccctgcaaccttcccagccactcctgctgcactaaggacttaggatccttttatcacaaatcgggattctctcccccaccccgaattctgtctgcttaaactggaatacacaggagcccttcctggcctggatggtgtctccccagcttccccgcccagcttgcccaccccatagttggtgagatgccaagtttggtctgagttgtgaccccttcagagtagatgcccggcaggctggggttggcccctggagggtcaggggaccatcttcttattccctcttttctcattcctccaacttcctcccctccttcaattatttttttgtaaagttgatgccttactttttggataaatatttttgaagctggtatttctatttcttttggattttttttaatgtaaggttgttttgggggatggagttagaaccttaatgataatttctttcgtttggtgtaggttttagagatttgttttgtggagaggtttttttcttttgatgtaataaaatttaaaatggaaatgaaaaaaaa

SEQ ID NO: 46748 - DNA, 1369 bp, Homo sapiens
  misc_feature (1)...(1369): n = a,t,c or g
caggctctgtgttggttggagcgagcatgtgggtctgcagtaccctgtggcgggtgcgaacccccgnccggcagtggcgggggcntgctcccagcttctggctgtcacggacctgccgcctcctcctactccgcatccgccgagcctgcccgggtccgcggcgcttgtctatgggcaccacggggatccagccaaggtcgtcgaactcaagaacctggagctagctgctgtgagaggatcagatgtccgtgtgaagatgctggcggcccctatcaatccatctgacataaatatgatccaaggaaactacggattccttcctgaactgcctgctgttggagggaacgaaggtgttgcacaggtggtagcggtgggcagcaatgtgaccgggctgaagccaggagactgggtgattccagcaaatgctggtttagactcaggaacctggcggaccgaggctgtgttcagcgaggaagcactgatccaagttccgagtgacatccctcttcagagcgctgccaccctgggtgtcaatccctgcacagcctacaggatgttgatggacttcgagcaactgcagccaggggattctgtcatccagaatgcatccaacagcggagtggggcaagcggtcatccagatcgccgcagccctgggcctaagaaccatcaatgtggtccgagacagacctgatatccagaagctgagtgacagactgaagagtctggggggctgagcatgtcatcacagaagaggagctaagaaggcccgaaatgaaaaacttctttaaggacatgccccagccacggcttgctctcaactgtgttggtgggaaaagctccacagagctgctgcggcagttagcgcctggaggaaccatggtaacctatggggggatggccaagcagcccgtcgtagcctctgtgagcctgctcatttttaaggatctcaaacttcgaggcttttggttgtcccagtggaagaaggatcacagtccagaccagttcaaggagctgatcctcacactgtgcgatctcatccgccgaggccagctcacagcccctgcctggctcccaggtcccgctgcaggactaccagtctgccttggaagcctccatgaagcccttcatatcttcaaagcagattctcaccatgtgatcatcccaaaagagctggagtgacatgggaggggaggcggatctgaggggctgggtgcaggcccctcagttggggctcccaccttccccagactactgttctcctcactgcctcttcctattaggaggatggtgaagccagccacggttttccccagggccagccttaaggtatctaataaagtctgaactctcccttccaaaaaaaaaaa

SEQ ID NO: 46749 - DNA, 1434 bp, Homo sapiens
ttttttttcggttaacgagtctcaaatttttattttgatggcaaaaatcacacagggaagaacaaaaattatccatgacaaactaggagtggaaatgggctgggagacacagaaaatgggtgcccacagttcctgggatccctcctggaatcctgggtttccctcctaggaccctgcaaggtaccctacgtgcctcctggaacccccccaccccggaggtcccaaggaacccagtttgagaaccaaggctttaggccaaggacttccttgcacaagaaggtgcagatgtacagggatggttcagacagtggcctcaacctcaatggcttcatcctcctcctccagcaggctgtaggaagcatggctctggcaaggccgcttgcagggggtgggccaacagtttcgccatgcagttgtgcaactccagggctggcccagccagtgccacctcatacttgtagctggtacccttggtatccaggctgcccatgaaggcaaacatatccttccaactcatctcctcctccttctcctcagtgccattgtggatgtaaacaacgtcaaagaagaaatatgggcactggaacattttccttccatgggctcccgtcaaggaaaaactggggctggcaaaggtgggaacggctgtaaaacaaaggatggtgcgggacccacataatggcgggggaatcgtctgccacgttcctctgtgaccggaagctcagttttctgctggatgaggctgaaaagtccttcccagattgaaggtggaacaggaggccgtctccagatcatagaggcagctacagagctcgcgggggtcggaggtcaggccagacagccaggccgtgtcatcgttcaccaccaccagtgcaaactcgtggcttttgtcgatcttgtgttttgtccgcacgaacatctcaatcatcttctgggagacattgagggcgttggttttggagccgttgaacgactccagctttggcagtgacatttcctctgacaggtccaggcagataatcaactttcttctggacaagttgacccttggtgtccggaaatttggacctcaggggctggcgggggcacctgccaagaacttagggccggctccttgaagtgttgaggctcccatcatcagcacttggcggcctcaccctcacccttcgctgcggctgcccacgctggcctgtgcccctactgcccggtcctcagccccttcaggattggagcgagtgcggggccgaggctctgccgagtgctcctcttcctcctcctcctcttcagtggggctgctgggctctgccacttccatggctcctgtgtggctagatggaacacggacaggggaagccagaatcctccccttcggctcaccgtagcctgaacctccttctaaatcagccgccgactcactaggaagccgccatcttt

SEQ ID NO: 46750 - DNA, 3087 bp, Homo sapiens
tgacgactcctgagttgcgcccatgctcttgtcagcttcgttttaggcgtagcatggccaggcagaagaaaatggggcaaagcgtgctccgggcggtcttctttttagtcctggggcttttgggtcattctcacggaggattccccaacaccatcagcataggtggacttttcatgagaaacacagtgcaggagcacagcgctttccgctttgccgtgcagttatacaacaccaaccagaacaccaccgagaagcccttccatttgaattaccacgtagatcacttggattcctccaatagtttttccgtgacaaatgctttctgctcccagttctcgagaggggtgtatgccatctttggattctatgaccagatgtcaatgaacaccctgacctccttctgtggggccctgcacacatcctttgttacgcctagcttccccactgacgcagatgtgcagtttgtcatccagatgcgcccagccttgaagggcgctattctgagtcttctgggtcattacaagtgggagaagtttgtgtacctctatgacacagaacgaggattttccatcctccaagcgattatggaagcagcagtgcaaaacaactggcaagtaacagcaaggtctgtgggaaacataaaggacgtccaagaattcaggcgcatcattgaagaaatggacaggaggcaggaaaagcgatacttgattgactgcgaagtcgaaaggattaacacaattttggaacaggttgtgatcctagggaaacactcaagaggttatcactacatgctcgctaacctgggttttactgatattttactggaaagagtcatgcatgggggagccaacattacaggtttccagattgtcaacaatgaaaaccctatggttcagcagttcatacagcgctgggtgaggctggatgaaagggaattccctgaagccaagaatgcaccactaaagtatacatctgcattgacacacgacgcaatactggtcatagcagaagctttccgctacctgaggaggcagcgagtagatgtgtcccggagaggaagtgctggagactgcttagcaaatcctgctgtgccctggagtcaaggaattgatattgagagagctctgaaaatggtgcaagtacaaggaatgactggaaatattcaatttgacacttatggacgtaggacaaattataccatcgatgtgtatgaaatgaaagtcagtggctctcgaaaagctggctactggaacgagtatgaaaggtttgtgcctttctcagatcagcaaatcagcaatgacagtgcatcctcagagaatcggaccatagtagtgactaccattctggaatcaccatatgtaatgtacaagaagaaccatgagcaactggaaggaaatgaacgatatgaaggctattgtgtagacctagcctatgaaatagccaaacatgtaaggatcaaatacaaattgtccatcgttggtgacgggaaatatggtgcaagggatccagagactaaaatatggaacggcatggttggggaacttgtctatgggagagctgatatagctgttgctccactcactataacattggtccgtgaagaagtcatagatttttcaaagccattaatgagcctgggcatctccatcatgataaagaagcctcagaaatcaaaaccaggcgtattctcatttctggatcccctggcttatgaaatctggatgtgcattgtctttgcttacattggagtcagcgtagttcttttcctagtcagcaggttcagtccttatgaatggcacttggaagacaacaatgaagaacctcgtgacccacaaagtcctcctgatcctccaaatgaatttggaatatttaacagtctttggttttccttgggtgcctttatgcagcaaggatgtgatatttctccaagatcactctccgggcgcattgttggaggggtttggtggttcttcaccctgatcataatttcttcctatactgccaatctcgctgctttcctgactgtggagaggatggtttctcccatagagagtgctgaagacttagctaaacagactgaaattgcatatgggaccctggactccggttcaacaaaagaatttttcagaagatccaaaattgctgtgtacgagaaaatgtggtcttacatgaaatcagcggagccatctgtgtttaccaaaacaacagcagacggagtggcccgagtgcgaaagtccaagggaaagttcgccttcctgctggagtcaaccatgaatgagtacattgagcagagaaaaccatgtgatacgatgaaagttggtggaaatctggattccaaaggctatggtgtggcaacccctaaaggctcagcattaggaaatgctgttaacctggcagtattaaaactgaatgagcaaggcctcttggacaaattgaaaaacaaatggtggtacgacaaaggagagtgcggcagcgggggcggtgactccaaggacaagaccagcgctctgagcctgagcaatgtggcaggcgttttctatatacttgtcggaggtctggggctggccatgatggtggctttgatagaattctgttacaaatcacgggcagagtccaaacgcatgaaactcacaaagaacacccaaaactttaagcctgctcctgccaccaacactcagaattatgctacatacagagaaggctacaacgtgtatggaacagagagtgttaagatctagggatcccttcccactggaggcatgtgatgagaggaaatcaccgaaaacggcgtgcatggcatgcacgttcagacagctgcattgtaagagttctgtcatgcagtctgaaaagggaagaaacaggatggctttctgtagccacacctgtgaggcgtgatgattgttgtattattagattactgatttttcttttctgaaaatacatttgagttttaatcacatctgtggaagctgtaacttttaaggtagtcaatttcatgtcttgttcaacgatgtaagcagaaactgaattgccctaattttgccaactggccattattgggattattgtttaaatttttggtaaagg

SEQ ID NO: 46751 - DNA, 2772 bp, Homo sapiens
cgcaaccggaactagccttctgggggccggcttggtttatctctggcggccttgtagtcgtctccgagactccccacccctccttccctcttgaccccctaggtttgattgccctttccccgaaacaactatcatgagcgcgaggctgccggtgttgtctccacctcggtggccgcggctgttgctgctgtcgctgctcctgctgggggcggttcctggcccgcgccggagcggcgctttctacctgcccggcctggcgcccgtcaacttctgcgacgaagaaaaaaagagcgacgagtgcaaggccgaaatagaactatttgtgaacagacttgattcagtggaatcagttcttccttatgaatacacagcgtttgatttttgccaagcatcagaaggaaagcgcccatctgaaaatcttggtcaggtactattcggggaaagaattgaaccttcaccatataagtttacgtttaataagaaggagacctgtaagcttgtttgtacaaaaacataccatacagagaaagctgaagacaaacaaaagttagaattcttgaaaaaaagcatgttattgaattatcaacatcactggattgtggataatatgcctgtaacgtggtgttacgatgttgaagatggtcagaggttctgtaatcctggatttcctattggctgttacattacagataaaggccatgcaaaagatgcctgtgttattagttcagatttccatgaaagagatacattttacatcttcaaccatgttgacatcaaaatatactatcatgttgttgaaactgggtccatgggagcaagattagtggctgctaaacttgaaccgaaaagcttcaaacatacccatatagataaaccagactgctcagggccccccatggacataagtaacaaggcttctggggagataaaaattgcctatacttactctgttagcttcgaggaagatgataagatcagatgggcgtctagatgggactatattctggagtctatgcctcatacccacattcagtggtttagcattatgaattccctggtcattgttctcttcttatctggaatggtagctatgattatgttacggacactgcacaaagatattgctagatataatcagatggactctacggaagatgcccaggaagaatttggctggaaacttgttcatggtgatatattccgtcctccaagaaaagggatgctgctatcagtctttctaggatccgggacacagattttaattatgacctttgtgactctatttttcgcttgcctgggatttttgtcacctgccaaccgaggagcgctgatgacgtgtgctgtggtcctgtgggtgctgctgggcacccctgcaggctatgttgctgccagattctataagtcctttggaggtgagaagtggaaaacaaatgttttattaacatcatttctttgtcctgggattgtatttgctgacttctttataatgaatctgatcctctggggagaaggatcttcagcagctattccttttgggacactggttgccatattggccctttggttctgcatatctgtgcctctgacgtttattggtgcatactttggttttaagaagaatgccattgaacacccagttcgaaccaatcagattccacgtcagattcctgaacagtcgttctacacgaagcccttgcctggtattatcatgggagggattttgccctttggctgcatctttatacaacttttcttcattctgaatagtatttggtcacaccagatgtattacatgtttggcttcctatttctggtgtttatcattttggttattacctgttctggaaggcaactatacttctttgctatttccacctatgtgcagaggattatcattggcaatggcgttcattccttacgagtggctttactgcagtttatttcttaatctatgcagtacactacttcttttcaaaactgcagatcacgggaacagcaagcacaattctgtactttggttataccatgataatggttttgatcttctttctttttacaggaacaattggcttctttgcatgcttttggtttgttaccaaaatatacagtgtggtgaaggttgactgaagaagtccagtgtgtccagttaaaacagaaataaattaaactcttcatcaacaaagacctgtttttgtgactgccttgagttttatcagaattattggcctagtaatccttcagaaacaccgtaattctaaataaacctcttcccatacacctttcccccataagatgtgtcttcaacactataaagccattggtattgtgatttgattaagtatatatttggttgttctcaatgaagagcaaatttaaatattatgtgcatttgtaaaatacagtagctataaaattttccatacttctaatggcagaatagaggaggccatattaaataatactgatgaaaggcaggacactgcattgtaaataggattttctaggctcggtaggcagaaagaattatttttctttgaaggaaataactttttatcatggtaattttgaaggatgattcctatgatgtgttcaccaggggaatgtggcttttaaagaaaatcttctattggttgtaactgttcatatcttcttacttttctgtgttgacttcattattcccatggtattggccttttaaactatgtgcctctgagtctttcaatttataaatttgttatcttaataaatattataaaaatgtcaaaaaaaaaa

SEQ ID NO: 46752 - DNA, 1283 bp, Homo sapiens; identical to SEQ ID NO: 1297

SEQ ID NO: 46753 - DNA, 1767 bp, Homo sapiens
tcgggcttaaaatagctaaataaatctttaatatttctaattgcaaatgtacagaaattgcacagcccacacagagtcttagaacaccaacagcttcctctgtacattattacatagttaaaagtcgcagctggagggaggagctccagcccaaactccaacgtttgcattttttccttttcacatacttacaaaagaggggagctgggacgcggtgtgggagctggggggctttgtggctgagtgtgtagaaaagagagaggctgtttccctggacagtctggctccccgcagtcgtgcggggcgcagggggaggtgtacctggggcagatgctctgggggaccggggcgtgtggagctgtagcctcggtcctccacccccactttctgggcagtcggaaagagtcctcactgacaggaggtttggcagtttccatcacccagaacatggaagttaagcaaaaaagtcagtcaggcctctgtgctagcagggagggcgtggctttctccagcagaggctgagtctcggtgaccaggggggccccggggctgttcttccccagcagggactgtccttccctcccaggcctctggcaaccccagccctggctgcaggcagggcccagctcccgggaactcaggttctctgtggcctgggcaggagccccccgttgactggcccagtgaaggcaccccagtggccactactcagacagcagctgcaaagccaacacacaaatgccacaggcagggaagacaccccccgcagacaccaagccttttccctcctgcccaaatactgttctctagattcagaaataaaataaaacccttggggagagcagcagtcccggccagccctcggcagcacccaggaccaaaggatatgtacaaccattaggtgagatagttacattacagtcaaacacccaagaacattttacaaaatcggcagacttgccaattaagataaaaatctgtgaagagtctgtacacttttacagtttttgcactaggtaaataaggctctcggcctgagagctcacccaccctgcaagggcagctggcaccggccacagcgggtagcctccgagccccgcctgtccaggccccgggagcctccctgtattgcctaggggggctctgtccgaggtcactctacgaggcagcggtgggagggggctggggagagaagagcagggctcactgggcaatgggaggatgagactggaggccaggccctgcctgtgtggccaccctggtctcaggcacgaaggcgcatgggtggggacaagacagaagagtgagacaggaaggggtgggggcagggcctctgcttccaacctcccatcttcctgtggtctgtgaatcccctggtggcccagcccttcctccaccagcatctgtctctagcctaactgaattgtaggttacatctaaaagccccttcccagagcagccactgtcacctgtccccgagctcagggtggacgcagtatggctctgggccacccctccagcacattcacccttcaggtggggcctctgtggcacattccagctgcaggggcagaggggtgattcctgcagctcgccctgccctggctctgctggcaaaggccccactcccacccttcttacccagggcctttgctcagaatctgcaggggctgggaacagacaggggccgagagagacccaagctcctgctcatctgtcttgaaagtgggggaggggcagataagctacagaacagcctagagctga

SEQ ID NO: 46754 - DNA, 590 bp, Homo sapiens
ggcggccgcggctgtggtggttcccgcagagtggataaagaactgggagaaatcagggagaggcgaatttttgcatttatgtcggatcctcagtgaaaataaaagccatgatagttcaacatacagagatttccagcaagctctctatgagttgtcatatcatgtaattaaaggaaatctaaagcatgaacaggcatctaatgttcttagtgacattagtgtaagaatttcgtgaggatatgccctccattcttgctgatgtattctgcatattagacattgagacaaattgtttagaagaaaaaagcaagagagactattttacacagttggtattagcatgtttgtatttagtttcagacacagttctaaaggaacgcctggatccagaaacactggaatcattagggcttatcaaacaatcacagcaattcaatcaaaagtcagttaaaatcaagacaaaactcttttataagcagcaaaaattcaatttgttaagagaggagaatgaaggttatgccaagctgaatgctgaattggggcagatttatctggaagtattactagtgatttaatcttagaaatatcaa

SEQ ID NO: 46755 - DNA, 3520 bp, Homo sapiens
tcacaaagtctccccaatgctctacaagcaactgcgtcaggcctgtgaagaccacgtccaggcacagatccttccgtttagagaagactcactagatagtgttttatttttaaagaagattaacacgtgctggcaggaccactgcagacaaatgatcatgatcagaagcatcttcctgttcttggaccgcacctatgtgctgcagaactccacgctgccctccatctgggataatgggattaagaacttgtttagaacccatattattaagtgataaaaatgggttcagaagtaaaaccattgatgggaatcctactgctgatcgagccgcgagaaggagcggccgaggccgtggaaccggagccttgtttggcggagcctcctgggcatgctgtctgacctgcaggtgtataaagattcatttgaactgaaatttttggaagagactaattgcttatatgctgccgaaggccaaaggttaatgcaggaaagagaggttccagaatatcttaaccatgtaagtaaacgcttagaggaagagggagacagagtaatcacttacttggaccacagcacacagaaaccactgattgcttgtgtggagaaacagctattaggagaacatttaacagcaattctgcagaaagggctcgaccacttactggatgagaacagagtgccggacctcgcacagatgtaccagctgttcagccgggtgaggggcgggcagcaggcgctgctgcagcactggagcgagtacatcaagacttttggaacagcgatcgtaatcaatcctgagaaagacaaagacatggtccaagacctgttggacttcaaggacaaggtggaccacgtgatcgaggtctgcttccagaagaatgagcggttcgtcaacctgatgaaggagtcctttgagacgttcatcaacaagagacccaacaagcctgcagaactgatcgcaaagcatgtggattcaaagttaagagcaggcaacaaagaagccacagacgaggagctggagcggacgttggacaagatcatgatcctgttcaggtttatccacggtaaagatgtctttgaagcattttataaaaaagatttggcaaaaagactccttgttgggaaaagtgcctcagtcgatgctgaaaagtctatgttgtcaaagctcaagcatgagtgcggtgcagccttcaccagcaagctggaaggcatgttcaaggacatggagctttcgaaggacatcatggttcatttcaagcagcatatgcagaatcagagtgactcaggccctatagacctcacagtgaacatactcacaatgggctactggccaacatacacgcccatggaagtgcacttaaccccagaaatgattaaacttcaggaagtatttaaggcattttatcttggaaagcacagtggtcgaaaacttcagtggcaaactactttgggacatgctgttttaaaagcggagtttaaagaagggaagaaggaattccagggtgtccctcttccagacactggtgctcctcatgttcaacgagggagatgggcttcagctttgaggagataaaaatggccacggggatagaggatagtgaattgcgcagaacgctgcagtccctggcctgtggcaaagcacgtgtgctgattaaaagtcccaaaggaaaggaagtggaagatggagacaagttcatttttaatggagagttcaagcacaagttgtttagaataaagatcaatcaaattcagatgaaggaaactgttgaggaacaggttagcaccactgagagagtgtttcaggatagacaatatcagattgatgctgctatcgtcagaataatgaagatgagaaagactcttggtcataatcttctagtttctgaattatataatcagctgaaatttccagtaaagcctggagatttgaaaaagagaattgaatctctgatagacagagactatatggagagagacaaagacaatccgaatcagtaccactacgtggcctgacgcatctgcagacggttccccttcatgaaacactagaatgtaccctcagagcaggaagcacacctgtgccatttctgggactctgattgatccagctgtggacattggaaggcgaaggaagggaggtggctcctgggtcatctttcacaaggctcaagacttcaacctgcagatgtatctttttccctccagtttttcctctagttcttttaggcatttaaattgtttctgttactctgtgcaaaataactttgagattggacaagaagatgttactaaagagaagttcctttaaaaggtcttgttcttgtgtcaaaaagctgcaagtttggtttgttctcgtgtgtgatcatgagtgcacaatgaagaagaccctagatgctgcattttttagctctgaagattccttaggtatccctgaagacagctcgctcagatgatcagcatttagagtgaaaacaagggcccttcatgggtgaacattagaaagagccagggttcaaagctggcgaatggatgacgcaccctagccactggcccctctctgtttcatgtatttccaaaagttgtaaactttgatggctgatttttcgtaagtcaggtttctaagtgagctccctgaggtgccaaggccatggtgtccgccctgctgcgtctgttcgtcagctgagttccttgtgaatctctgttttaggggtttggggctagtgtgtttgtgtttccattctaagattgagtctggcagtccctgtttttttgcattggggtaactgctctttgattttttttaattgcagtatttgtgtgattgcaataataaagtttggtttggtttttacagtcatgcgcagggacgatccttgttctctgctgtaaactgtaaaaagtttatggagacttaaagtcttgatgttgtgaagcagaggttattttgtggaaagattaaaaggattttgttggtacctggttttgtgttgtgtatatatacatgaggttgaacagtgaaaggaaagttcagtagtgatgttagaagggtaactatgacaaagatacttttgagataacatttaaaagtactttatattttacataatagcatgtttcattttgattaaaagctaccaaaggaattttgatcatggcataagtgtttaaagcaatattttctggaatataccaagtttatataatttgattttgtgctaaattattaagagtctctttttgaaacatgcgggtttgaaatatgacaccttgtgggtttccatattaaaatcctcactctttaattgtcatttctatctttgaaaattttcatttatgagttccatgatatgtggtctaagaaagaccaaacagatttctatttttttttcttataagttcgttgtgtctagagattgttaatattgtaatttaatgtagacttactttgaataaaattagtttaattggccttaaaattacattaataaaactttgtgatatgcaaaaaaaaaagtcgacg

SEQ ID NO: 46756 - DNA, 2226 bp, Homo sapiens
aaacattttttcagaggttaaaaattaaatttcaaaagaatacctggagtggaaaagagttctcagcagagacaaagaccccgaacacctccaacatgaagcttcttcatgttttcctgttatttctgtgcttccacttaaggttttgcaaggtcacttatacatctcaagaggatctggtggagaaaaagtgcttagcaaaaaaatatactcacctctcctgcgataaagtcttctgccagccatggcagagatgcattgagggcacctgtgtttgtaaactaccgtatcagtgcccaaagaatgggcactgcagtgtgtgcaactaacaggagaagcttcccaacatactgtcaacaaaagagtttgggaatgtctttcatccagggacaaagtttttaaataacggaacatggcacagccgaaggaaagtttagtgtttccttgaagcatggaaatacagattcagagggaatagttgaagtaaaacttgtggaccaagataagacaatgttcatatgcaaaagcagctggagcatgagggaagccaacgtggcctgccttgaccttgggtttcaacaaggtgctgatactcaaagaaggtttaagttgtctgatctctctataaattccactgaatgtctacatgtgcattgccgaggattagagaccagtttggctgaatgtacttttactaagagaagaactatgggttaccaggatttcgctgatgtggtttgttatacacagaaagcagattctccaatggatgacttctttcagtgtgtgaatgggaaatacatttctcagatgaaagcctgtgatggtatcaatgattgtggagaccaaagtgatgaactgtgttgtaaagcatgccaaggcaaaggcttccattgcaaatcgggtgtttgcattccaagccagtatcaatgcaatggtgaggtggactgcattacaggggaagatgaagttggctgtgcaggctttgcatctgtggctcaagaagaaacagaaattttgactgctgacatggatgcagaaagaagacggataaaatcattattacctaaactatcttgtggagttaaaaacagaatgcacattcgaaggaaacgaattgtgggaggaaagcgagcacaactgggagacctcccatggcaggtggcaattaaggatgccagtggaatcacctgtgggggaatttatattggtggctgttggattctgactgctgcacattgtctcagagccagtaaaactcatcgttaccaaatatggacaacagtagtagactggatacaccccgaccttaaacgtatagtaattgaatacgtggatagaattattttccatgaaaactacaatgcaggcacttaccaaaatgacatcgctttgattgaaatgaaaaaagacgggaaacaaaaaagattgtgagcttgcctcgttccatccctgcctgtgtcccctggtctccttacctatttccaaccttaatggatacatgcatcgtttcttggctggggacgagaaaaagataacgaaagagtcttttcacttcagtggggtgaagttaaactaataagcaactgctctaagttttacggaaatcgtttctatgaaaaaagaaatggaatgtgcaggtacatatgatggttccatcgatgcctgtaaaggggactctggaggccccttagtctgtatggatgccaacaatgtgacttatgtctggggtgttgtgagttggggggaaaactgtggaaaaccagagttcccaggtgtttacaccaaagtggccaattattttgactggattagctaccatgtaggaaggccttttatttctcagtacaatgtataaaattgtgatctctctcttcattctattctttttctctcaagagttccatttaatggaaataaaacggtataattaataattctctaggggggaaaaatgaagcaaatctcattggatatttttaaaggtctccacagagaattattaattatacccgttttatttccattaaatggaactcttgagagaaaaagaatagaatgaagagagagatcacaattttatggaaataaaacggtataattaataattctctaggggggaaaaatgaagcaaatctcattggatatttttaaaggtctccacagagtttatgccatattggaattttgttgtataattctcaaataaatattttggtgaagcct

SEQ ID NO: 46757 - DNA, 514 bp, Homo sapiens; identical to SEQ ID NO: 18011
  misc_feature (1)...(514): n = a,t,c or g

SEQ ID NO: 46758 - DNA, 2206 bp, Homo sapiens
tttcacctcaagaatgccatcatgtttgggaagaagcggcacacggatgtgcagttctacacagaagtgggagagataaccacggacttggggaaacatcagcatatgcatgaccgagatgacctctatgctgagcagatggaacgagaaatgaggcacaaactgaaaacagcctttaaaaatttcattgagaaagtagaggctctaactaaggaggaactggaatttgaagtgccttttagggacttgggatttaacggagctccctataggagtacctgcctccttcagcccactagtagtgcgctggtaaatgctacggaatggccaccttttgtggtgacattggatgaggtagagctgatccactttgagcgggtccagtttcacctgaagaactttgatatggtaatcgtctacaaggactacagcaagaaagtgaccatgatcaacgccattcctgtagcctctcttgaccccatcaaggaatggttgaattcctgcgacctgaaatacacagaaggagtacagtccctcaactggactaaaatcatgaagaccattgttgatgaccctgagggcttcttcgaacaaggtggctggtctttcctggagcctgagggtgaggggagtgatgctgaagaaggggattcagagtctgaaattgaagatgagacttttaatccttcagaagatgactatgaagaggaagaggaggacagtgatgaagattattcatcagaagcagaagagtcagactattctaaggagtcattgggtagtgaagaagagagtggaaaggattgggatgaactggaggaagaagcccgaaaagcggaccgagaaagtcgttacgaggaagaagaagaacaaagtcgaagtatgagccggaagaggaaggcatctgtgcacagttcggggccgtggctctaaccgtggttccagacacagctctgcaccccccaagaaaaagaggaagtaacttctgaactttggccctgagctccatttcttcctccagccaacccctgaaaattttacatgacatagaaactgtatttttcctttcgttttcatttgaagttttgccatttgtgtttatgggtttagggggccatttgtgtggaccaatctactcggggaattccagggcccaccagggacacgtgccaatggccccattcagatgggcaagggaggaggtgttcttgaagacaggagggaggctcccgctgttaattaaatattgttttcattctttcttctcttcctgttcaccttctggccaaggacattgatgggcttcttgacatcttatttggtgtctcaaagctgtatttttccaaggacagtgggtacaagggtgacccttaattacccgtatcatggttcttgaccagcacattcaatcctccaacctaccctactgccatgaccttccgcacatctctaagttttatctttgcaatactcaaggttctcggaaatttgctaatggttgtgataaaccatacagcttgagccagtgaggcagattgggctggtgccttcgtctgagttttcctgctttcctgcctcgtgcagattctgaggtatatctgctgccttggaagacataagaagcagtgatactccctggctcggttattttctccatacaatgcacacatggtacaatgatagaaggcaaaattgccactgtcttcttttttttctcatatatctaagggaagatatatcaggttgtgcctcatgtaccgcttctagtgaaatgtagaggaaggctcaaaggagtcaacatttagatctggaagggacaagtcatgccttgggcctagaataccctgatgagaaaagagaagaggaagggaggccatatctacaacacacgctctcgggcactgctgctccttattttaactttgtcttgcattgtcctgtatttatcacagtttctgttgaacagcttttcaagtatttggggagtttatcttgccatcctccccttctggttctctgcacccacctgtcccactgcagttccttccgtgctctgtgactttaagagaagaaggggggaggggtcccggattttatgtttgtttgttttttctccttagcagtaggacttgatattttcaattttggaagaactaaaagatgaataaactgggttttttttgttgtttgtttttgtaaaaaaaaa

SEQ ID NO: 46759 - DNA, 1226 bp, Homo sapiens
gtgggcttttgtcatgttttatacatatgctaatacagtttataattttttttctgtcaataaacactttaatgagaaccgaggtctataatatatatagcagtaaccaccctggcctatgccttctgctctagcccaagtctggggcccaaccagttacatttaacccacatttggaaagcaggccattttcagtgtcatccattagtatccatcttcatagaagataccaatctggggctagagtctcaatgttaacactttctctcagggaaaagttaacatggtaacacaaacatagaaataactttgaaccaccccactgttcttccatcaggaggcccttaggagaccaacggcttggtaaacacttacaacattgtcaaaatacattagaacacgggaaaagggcaaaggagtagaaaggctggcagggctgggctcacatataattcagttcttagatttgaagcctctttagctgctcgtatgtaataaaaaaaatgatgttccagggtccaagccgaagccagtttggccaaaatcctttatagagtgcaaaaaagccctcatgtttccacatctttaaaataccatcaacagtgcccttatagagatccacatgtcccacgattgccctctggttcatcatgcgagttcgaaccacatcaaccgggttggaggccagagccccagccaaaccacatgtaaagctggaaacgaagtgagttaaaattgtatcgcccatcattcctgacaatattaaatgcttcttagtaatatcatagactggtagctctactcctacaacggatggcagcacggctgagccagttggaaccacaccccatccacaagaccccctggtgccttcttgttggtatatatcgataaagcttccaatcatgctcccttggaacaagcttccttgagcctgcattcgaatcttctaaacgttctacgaataagcgcttcaagctttggtaaatcccaattttaatggtgccatatgatgcttgtcttagcaacgcaggagcaattcctgaatagagagccaatacaccttcctctttacagatgcgaaacagcgcatggaacatccctctatattttatctctttgaaacgggcatcaatgctttggccttgaacctgaagtcgtgttttggtaaggtccacagggaaagtcccaaactcagccacgatagaggcaaggccgccatatac

SEQ ID NO: 46760 - DNA, 1108 bp, Homo sapiens; identical to SEQ ID NO: 1312

SEQ ID NO: 46761 - DNA, 4418 bp, Homo sapiens
  misc_feature (1)...(4418): n = a,t,c or g
ctacaaaattccgcggccgcgtcgacttttttttcatttttaacttttttacaaagtcgacagcttactaaccactagtgagcatgccctcttgctaaaaggctttcttgtcgtctgttccactttaacgaaattctatttataatcctttcacctgctcgtatgaactgttgagatcgtaagtctgccaaggcagcagagtaaaccttaattgaatttaacaatgttcttgatttaataaaaagacccccacaatgtctgtccggactgtattcagtgcatccactttgcaaaggggctgcagacagtagtggctgacgaggtgagacaagtttattaaaaagcccccaggcagctggaggaggagaacccgaggaagggccgacaatgcacacaatgaagggaagagcgctatttattaggttgtgagtttctctgttttgccttaacagatgcacaaaaggtcattgaaagtataactgaaggaaataggtcagacgagcctaaacacaagacttgctagctgcagggctggtgcacgggaccccaggaaggcagccgagccactcgtgcccactaggggacagcccagagaccttgagccaggggacccccgatccactaacctcttctcccccattgcgctgacagttgccttgcactgtgggttaccataaaataactctcattggcatccaagctttataaaaacatcttcattttgctcaaaaagggcagtcaatagatacagagaagccaaactgaacagcctcaataaaataaaattaacaccagcagcgaatcctcttgctgaagacttcggctagagggcacgtgcaccaaagttctaggctgttaaggggccacccacacaccgtcctcgccttgaacacaccagcttggaaatcagttatggattttaatggccttttcaaggtaagtgtagcgactcctctttggggctttgttgaagtggtcgagccctagccaaggccgaggatgagacatattaccgggctgtggctcaaagtctttcaaatttacttcatactcgtcttcatttatgtactggtgtcggcccatcattacaattgcaaatttaaacttctcaaactccttctcctggatgtccagcaggctctggattcgcttcatcacttctcgaaaatgctcgccctggtgtatcctcagcaaaaacgggattccgaacgttccgaagacctctttgtggaaatgcgccactgtgacaagcatctcattctctttgtctatgtccacctggtccaaagggatttcctctattcgaaacgtccggctcgttgcaggagataaacattctaatagttcatcttcttgatgaacaccaatgattttgtagcttacaatttctagcagcctaagtttccctgatgctttctccccaagctccacggcctttttacattcttctaacaggtcccggacacacccatgcttgtctggatatagtgttatttcctcttccctaaattggctgtttaaccatatacatttaaaacttcgcctgttctcaaagtctgtgattttcatcttaagctgctgatagtaaagtttcttaggttgtctaggcttgaagaactgtagaagatctcttaaagtaccttcataattatgtctaagaggattacctgggccatccctataaccttgagacttgaaaaactgcagcaacattggatctgtgttgagcctctgtgcaactgtctttgcaacctgaaaataattcattctatttgataacgtaaccacaaatccaggatcattagggattgttttatcacagaaaatgacatcaacgcggtggtagagatctcggaaatactcctttgcggtgggtaattcactgttatcattttcagggtcatccttctgaaatactatgatgtcaccatccattagttcatcaagggctttatcaagagacacgtcatagtcctgaattctctctgttaaattcggtttaacttcctcatagaggataaggctagtatcttgaataaatcctgctctgtcacacataactgggagcaagtcacgtattttacaggatattggtgtgtagatatgcccacagtaattcaagctccgcgttttgggatcatacatcttcaaaaataacattacatcatgatctttatcaaacttgggtaaggtcgctccactagcagccagctcgggatcaactgtttccaggaatattgtccaagggttttcattatcactgagctcaatcattgttttattgccgtcggcttcattatctaacattgctggtcgttttgttccattactccttgcttgcatgggccacaatcgaatttgatcttgtggaaatcccatggtctgagagaggctctgaacaaactcagcaagcgaggagttcttcaatactttgaacacagtgtatttcactttttcttcatcgtacatgtcattcccttggtggccacaaaactggtcctctgcgactatctgcacttgcatatagagatgggcttcctgccgctccttccgcttctgagcctcgatccttttctcttcttgtaatcgctccaccaactgctgaggaatatcatggtcggtgaccgcctgtaaaacttcactcagttttgattccctgatgtagactaacatgtaagcattagtgcagtgtcgaacagacaggtcgtcatcgtgacccccataattgtgctcaattgcttcctctttagtacaccttgacaccacgtcgtcatcaaatttacaccatttgccatcccctttggggtttagataaaccacataatgtccaccatgattatctccactatgaaccaggactgcatgaagaatataatttgcagggtccttaggatctgttttttgcaaaaattcatcaagtggtaactgctctgggaattcaaacctatcattgatcttgatattttggtccgtctgaggggtcatacataaatctcatcagttgtagatgtaacactggtggcaatgttaggaatttcacacctttctctgcttcctgtaagccatgttccccagcgtcgtatttattgtccccatcgagctgttctactgccacataatccacaaatgattcaaatatatttttctttcctttgatacttagctggatatcataataatcttctcttctatcagaccgatagtctacttctttacactggatataggacaccattttgccgcggaataatttgggtatggtgccctctacacaggtgcctttaatcttattttccacattatcgagcaacactcgacaaagctcctgaacatcatgttgcatgaagctatctaaagtttcccacccaaatgactttgttaacttttttgttcctacaggtttatcactatgctgtaattcatagaacacttctttgtaatgctaaagggacggcttttagacggaatcatccccctcggttggcatcatgtacacagcctttcgtagctgattcgtgaaaaataacgtctgtagcaggctgttcatgtaacaagtcgctccctgattctttaagccgacgtagcctgtgtgcttctttgaatcccacgcaactccatggggagcatccgcctgtacaaagacttcaaaggtaactttgtcatcatctataaatcctttctcaggatcggtcacttcactccaggccataaaattggaaaatccccaatcattttctttatggaagaacaaatgactaatacgacgactgaacgacttttcatcatctctgtaatttattatcttcagcactgcttgtgcatggcaagaccatgacgtggaatcagattcagcattgcactggagaaagaatcctacgcttttttggtgtggtctgtctggataaaagcgtggcatcaccataatcttccatggcagatttcgcacaaaacacggagggctaaggaccgactcactcagtctgctgaagcgctccacagtgaactgaaaggttgcctcggagcgccaactggtgtcatcctccatgtcctcctccgcggtgttgtgtccatcactcagggccacattcccattgatcacagggttctgagtaattcttggtgggtcatctgtatctcccgcttccatctccatgtcctcgggctcgctcaactgctgctcgcccgctttctgctgctgctgctgctgctggtggttcatgtcggccgcggcctgggcctcgcctgcggccgggggccggggctgcgagcccggcgggcgggcggcggcgagccgnnnnnnnnnnnnnnnnnnnnnnnnnnnggcggcctcctcctcctcctcccgcgcgtcgtcggcgacggcggccccggggcggcccgcggcgggcggcggcggcggcagggagacgcgcacgtac

SEQ ID NO: 46762 - DNA, 1696 bp, Homo sapiens
tttttttttttttgtagatacatccaaatagcactgatggcttttattgcagattcgtgtcattacaaggataatctgggaatatatttttaaaaaaaccctcccttttatatacacaaaacatgctacatggtacactttgtgagaaatgctgaggtaataggcacacacccagacatgggacagtaccaaacatccaacatctcacacagcctggcccacgtgcccaccgggaagggtctcaccttcttgactcatcccttgccccttcttgggcaatagtcccgggagtgctgaggctgacacttggtggccaacaggactcagaaagccaccatgctgcagtggcatcaaccaaggggtccggtgacccctgattattcaactcctgagaagtggcctgttttcatttttgtggcacttgttctccagggaagtgtagtttggagatgagatgcggactctagtcagcctgagagcgtggaatctctggtctgtagccatctgggggctctgatgatctgatgacttctgttctgagataattctcctggccagataggttattatttgtgtgaagactcaaatgacctgtaggttaaagtatgaatggaagatacaaaactgcgagtacattatctatacggccggtggagcttttggcctggccttcccttcccaaccagaaacctggagcccggagtgtttcctactcagaagctgaggaatctcgcctggaaagaaggggctgtgcgacagaaaaggcaaggagtaggtaggcgaggagtacagcagagcggaaagggggccttgaactgcagtgagtggccagggactgacacacagaaggcacttaatgaatggtgtcaaatgaagggataagtgggtgatggatggtgaaaagtcctgagaatggggaaaagtatgaaaatgtggggggagggattttgaaatttgattaggtgccaaaaggggttcttaagaagctgggaacctctatgtgagagattagcattgtagacattctggaagaatccaggcacacagatgcccaagggtgatcctttcagttgagaccacacagtctgtgatcctacccttagactcaagtaatacaacactaatgaaatgcttttctcctaagagcaaagctgctggtgacagcttcaacatctgagaactgaatatatgtgtatttaggtatctaaggcaaacctatatatggatctagatatatcacatgtgatgtatatctaaatgcatatatatgtggtatacacatacgtgcacaagggaggctcatacacatgtatattatgaaggtactttgcagttgtgtttttattgtagagacttaatttatttaaagaaagagttgtctgtagtcctgtcctgtcctggagacatgaggggctgtctggtgtgaaggaaagtaggagggacagaaaacaccgtatcgattcagttccatcatccgctgcagtgacttcggaaaacagaatccagcatcccggtcctcccagcctcaggatgaactggtgaggagttgttctttgtgctgtggccagcgtgaccagggtgggctcctggcaatggccacgagaggtcaggagggggagctggcttagtggaaggtgttggggttcggtcggatcatcatcaccactttcttgagtgagtaagagcctcctcggaa

SEQ ID NO: 46763 - DNA, 1429 bp, Homo sapiens
cgccgcagaaaccggcagtggcaagactctcagctacctcctgccgctgcttcaacggctcttgggccagccaagcctggactcccttcctatccccgcgccccgaggcctggtccttgttccttcccgagaattggcccaacaggtgcgggctgtggccaaacccttgggccgctccttgggcctgctggtgcgggacctgggagggaggccacggcatgcgtaggatcaggctgcagctgtccagacagccttcagcagatgtgcttgtgggccactccagggggctctgtgggaaggccctgaaaagtcgactgatcagtctggagcaactctccttcttggtgttggatgaggcagacacactgctggatgaaagcttcctgggaactggtggaattacatctttagagaagagccacattagcagaaggcccagctgacttggaagaccccctcaatcccaaagctcagttagtgctggtaggagccacatttcccgaaggtgtaggccagttgctgaataaagtcgccagcccagatgctgtcaccaccatcaccagctccaagctccactgtatcatgcctcatgtgaaacagacatttctgagactgaagggagcagataaggtggccgagctggtgcacatcctcaagcatcgtgacagagcagaaagggactggtccctcaggaactgttctggtgttctgtaatagctccagcactgtgaactggctgggatatattctggatgaccacaaaatccaacacctaaggttgcaggggcaaatgccagccttgatgagggtaggaatcttccagtccttccagaagagctcccgagacatacttctctgcacagacatagcctctcggggcctgggacagcactggtgtggagctggttgtcaattatgatttccccccaacgctgcaagattacatccacagagcagggagagtgggccgtgtggggagcgaggtgccaggcaccgtcatcagttttgtgacccatccctggggatgtgagcctggttcaaaaaagattgagcctggcggctcgcccaaaggagaagtcttccgaggactagccatccctcggtgaaaaaagcctttgccccccaagcaacctgattttgaacaaatctgaattaaaatgtgatgcctagaacagggatctttccccagtatcttgagtgggtgacccacacttgtcagtgggaggctctgggctgccctgtcggctccttgagggcgggatgaactgctttgtgacttggaaaggtacgctgctggccagcattggagaagaagctgctgagcatggctttctgtagtctttagcaagacacaagtggattttgactttgtatcatgtcatgatttctaacaataaatgatgtttttatgtgcaaaaaaaaaaaaaaa

SEQ ID NO: 46764 - DNA, 951 bp, Homo sapiens
ggggctcgcaccgcagcacgctggagtcccgcttaggtaccagttagcgtcaggggagctgggtcaggcggtcgccgggacaccccgtgtgtggcaggcggcgaagcgctctggagaatcccggacagccctgctccctgcagccaggtgtagtttcgggagccactggggccaaagtgagagtccagcggtcttccagcgcttgggccacggcggcggccctgggagcagaggtggagcgaccccattacgctaaagatgaaaggctggggttggctggccctgcttctgggggccctgctgggaaccgcctgggctcggaggagccaggatctccactgtggagcatgcagggctctggtggatgaactagaatgggaaattgcccaggtggaccccaagaagaccattcagatgggatctttccggatcaatccagatggcagccagtcagtggtggaggtgccttatgcccgctcagaggcccacctcacagagctgctggaggagatatgtgaccggatgaaggagtatggggaacagattgatccttccacccatcgcaagaactacgtacgtgtagtgggccggaatggagaatccagtgaactggacctacaaggcatccgaatcgactcagatattagcggcaccctcaagtttgcgtgtgagagcattgtggaggaatacgaggatgaactcattgaattcttttcccgagaggctgacaatgttaaagacaaactttgcagtaagcgaacagatctttgtgaccatgccctgcacatatcgcatgatgagctatgaaccactggagcagcccacactggcttgatggatcacccccaggaggggaaaatggtggcaatgccttttatatattatgtttttactgaaattaactgaaaaaatatgaaaccaaaagtacaaaaaaaaaaaaaaaaagtcgac

SEQ ID NO: 46765 - DNA, 1631 bp, Homo sapiens
acagacttaatactgttgccagccccaaagactgtcaggagcttgccagtatttctgttgggtctggctcaaggcccagctcagacctacaagcaagactgggagaaccagcaggtgaatctgtggaaaatcaagaagtccaatcaaaaaagcccattccctcaaaaccacagctcaaacagctgcaggtattagatgatcaaggaccagagagagaagacgttaggaaaaactattgcagtcttcgtgatgaaacacctgaacgtaaatcaggccaagagaaatcacattcagtaaatactgaagaaaaaattggcattgacatcgatcacacgcagagttaccgaaaacaaatggaacagagtcgtaggaaacagcagatggaaatggaaatagccaagtctgagaagtttggcagtcctaaaaaagatgtagatgaatatgaaagacgtagcctcgttcacgaggtaggcaaaccccctcaagatgtcactgatgactctcctcctagcaaaaagaaaaggatggatcatgtcgattttgatatctgcaccaagcgagaacggaattacagaagttcacgccaaatcagcgaagattctgaaaggactggtggttctcccagtgtccgacatggttccttccatgaagatgaggatcccataggctcccctaggctactgtcagtaaaagggtctcctaaagtagatgaaaaagtcctcccctattctaacataacagtcagggaagagtctttaaaatttaatccttatgattctagcaggagagaacagatggcagatatggccaaaataaaactatctgtcttgaattctgaagatgaactaaatcgttgggactctcagatgaaacaggatgctggcagatttgatgtgagtttcccaaacagcataattaagagagatagccttcgaaaaaggtctgtacgagatctggaacctggtgaggtgccttctgattctgacgaagatggtgaacacaaatcccactcacccagagcctctgcattatatgaaagttctcgattgtcttttttattgagggacagagaagacaagctacgtgagcgagatgaaagactctctagttctttagaaaggaacaaattttactcttttgcattggataagacaatcacaccagacactaaagctttgcttgaaagagctaaatccctctcttcatctcgtgaagaaaattggtcttttcttgattgggactcccgatttgcaaattttcgaaacaacaaagataaagaaaaggttgactctgctccaagacctattccatcctggtacatgaaaaagaagaaaattaggactgattcagaagggaaaatggatgataagaaagaggaccataaagaagaagagcaagagaggcaggaattgtttgcttctcgttttttacacagctcaatctttgaacaagattccaagcgattgcagcatctagagagaaaagaggaagattctgacttcatttctggtaggatctatgggaagcagacatctgagggagcaaacagcacaactgattccattcaagaaccagtagttctgttccatagcagatttatggagctcacacggatgcaacagaaaaaaaaa

SEQ ID NO: 46766 - DNA, 1490 bp, Homo sapiens
  misc_feature (1)...(1490): n = a,t,c or g
tttggtagtattaaacagttttgtattattcaactgagtctccagtctttattgtcccatctgttcccctcactgcagcaggaaccagccccatctccactcccttccgcctagacctgccagagcaggaacctcctcaccccaccctggggccctgcctgagtcattctccgtcccccttcccccaccccagcactggggtccgggagacagtcccagccgggctgagggagggaggcagccacagcctcccagtccctccactctgccgtccagactcagtcttccagggccagaagggaagcagggaggctggaggacagggtaaaacatttgcccaggatagtgttaaacagctggaaattgctgctagaggaggaggcttggctgaatgactgaattaatagtacatgtacagggcttacgaaagcactcaaatgtcaaaattttggcttgggagactctacccccatcctctccttttctaaggatctggatccatcaaccatttgtttccactaaaagaaaaccctggctcagaaagtctgcaagtgcagaggaatggaggatgagtaagtcacaccagcaggctggctcagatggggagaaccctgaggttgggtgaatgagtggaaacggaatgactccagtagctggctctactgcgcctttttctgcttgtggggaggctttgcattccagtagaagagcagctgggcggcgatgaggccgttgcagagagaggagaccacaaaggtcccagccatcaggggatctccggtttcctgaatggaagtgaagattcgggccagggagcccccaaacagcaggaagactgtgatggctgagagctggcctgtgtgcccgttgtggtagttggtggctgcctggagaagcctccccaccaccacagcaggcacattggaggcctggagcagggtgactacagtcaagggcgtcagaggtgagagaagcaccagcaggaccaggccgtagcaagcgaggaaagcgacacctttcacagtctgtcctctgtagtgcatgaccaggaagcagatggtgatcgtctggagcatcaggaataaggcttcaccccaagagctgaatgggaagttgttagtgatgctgtagaccatggtcccagtcaatgccactagctccagcattacagactggagactcaacccttcagcactcttggctcccaggattttaaacacctggggcagctttactagaagtgagccagccacaatgcccagccccaggcctttgctgaggagaatcttgaggcaggggacgtgaagcaagtcccactgaacgaaaagttggtcgtagcatttctcaggtaaaagaatcggcacgagcagccgtttaagcggtccgtccgccctcgtgccgaattcttggcctcgagggccaaattccctatagtgagtcgtattaaattcgtggtcagtcataagggtntcnggaagggnttnnggatt

SEQ ID NO: 46767 - DNA, 979 bp, Homo sapiens
cctcatattttctttaaaatttatcagtatagcatttcatttctatgcatgtatatgtatagtaattcataaaactaaatagcaaactgatattctacaccagttcatttatctcaatatatattttggaatataacggcaatattaaaaatatcaattccctctaagctgataatactataagattttacacaaagttaaagtttttgttttttctttttgaaaaagtttcattgtttaaagtccacatatttgacaccttgataaggaaaatgtaaatgtgtcatataacatttattccatcaatttaaactgaagtgtctcatggagctaaacactaaaagaatttaaataaaaaagcagtaacctgtatgtacacaaaatgatcattccataaatatttacatgacaagggaaaaaatggagaatcactaaaactggaaattgctacaggtgtgataatcctttctcatgacactttagttaggaatcatgtaagcttttaaaatgaaaatacttgtagaagcgttaactaaaatattccattttagttttcagttactatttaaaggagccagtaggtcataaacagtccaagatttcaggaaccaactattcagtttagttttcagtatcaaatcttttccttcatccctcatgatgaaaccaaacttacttacagaaaaaataaagagtacgctaaaaggtataaataaaaattccagttcatcctcctttataaagactggtaagccgctctaattctttacagttgtccatgctcaaggcatctgccttccttcggagtcgatcatcacggtatacttttgctgcatactgcatatctgttttttgttgtctttctttccagcagttatttcgaatattagtcacataatcttcctccacactcttttctaccttttgtaataacattcctttatattcatttttgaagtccttgttgacataataaacg

SEQ ID NO: 46768 - DNA, 1721 bp, Homo sapiens
gcagtttattgaaaaaaaattcaaagatgactcaaatcatacaataggagtggaatttggttcaaagataataaatgttggtggtaaatatgtaaagttacaaatatgggatacagcaggacaagaacgattcaggtccgtgacgagaagttattaccgaggcgcggccggggctctcctcgtctatgatatcaccagccgagaaacctacaatgcgcttactaattggttaacagatgcccgaatgctagcgagccagaacattgtgatcatcctttgtggaaacaagaaggacctggatgcagatcgtgaagttaccttcttagaagcctccagatttgctcaagaaaatgagctgatgtttttggaaacaagtgcgctcacaggggagaatgtagaagaggcttttgtacagtgtgcaagaaaaatacttaacaaaatcgaatcaggtgagctggacccagaaagaatgggctcaggtattcagtacggagatgctgccttgagacagctgaggtcaccgcggcgcgcacaggccccgaacgctcaggagtgtggttgttaggagagcacacaggtgttcatacagtggcatttgggacacattcgttggaacctgaagaatctgaagttttttttaccaccatctttttctactctgtatggaagtagatctttatggggaaaagagaatttggggtgttctgcaagccagtcaaagtggcacagcaaatcatataaatcgaattaaatggacaacaccgttagatgtgtatgtaaaaattttctgtttcatatttttcctttcactttcggtttaaaacatgctatatgtactgtatgtcctgtagcccagtgcggctccacagcatggaatctgatgtatgatatgatagaatgtggcactaaatgcagtttcagattttattttttttaatcatatgaactaaaattgtcaattgtgaggtgtgcttttctcatcatgttggttatattgcacaattggttatatttatgacctgatattcaaagactctggcattgatagccagtgtgttttcttatttaactccgtttactacattctacatggtgtttacgtgatccacacttgaaatactagatcagtagacattcactaatataccaaaataaaatgaaaaattgagtttttccgtgaactttatactgtccagctctgttgattttaaagcttcttcatccaggtcagttcaggaagtatatctggagtacctgctctgtttttggctgtgagactagcactaaggattctggtacctttacccaaacctactgggctactaatacttctctcagcagttgatcaaatacaatagaccatgtaagctggggccgctcatccacttccagtttgctggtctccctgctagaaaacacattgtactgtgctttttctggaattcagtataatggcatcactgcctgtttttcacatcttttgtttcctgttcattttaaggaaacctactaaatccagttaatattaaatggacaccactcattaagaaatttctttatggcttctgctgaatacttaaatgccttactacagttatccagttgacatgtttttaattcatataaggtatattgggtatattgaagtatatattgtattacaaagacttgttcttgtattttaaaatgtcagtgcaaaaaatatatggtggaacctttct

SEQ ID NO: 46769 - DNA, 1555 bp, Homo sapiens
ctgcatgtgactagcatcactgtggaaattaatgctctgttcttcactagaatgtagtaagtggttaaactgagctatcccccacctgatgactattggcatccatttgcaagggccaatggccctggattaagggttaggattatttgtagctagaaggtaattttatttctgtgaaactaattggctcatatttgaggttaggtgtggccttgaccttaccagtacatttatacccactaccagttgactagcccagataattgttaaatggtgcttcttttctgcttctcagtagacttccatgccattacaaaggaaatttgaattaccctagtgtttgtatattcccatggataactatgtataacttctgttacaccagcttatgtattgttaacatttaagtgtaaaccatgccacagctaacactttaaaaaggaaaactaattagttcttgccttagggaaaatcccaggtatgaagtatggcatatacttgacactgtcctgtgtaaccctttactttgctcaggctttcaagattgagtcttttttcccccaaattaggttaacatgcatttgaccccaacctgtggggtttgagtaagctggaaatctgtgacggtaggctttctagtgtcacgaggtggtggtgactgaaggaaaagctgggatcacaggttccttctgatggagaggaaggtttatttctatgcccctcccaccaccctccacctagagctcacccaagtctgctccagtcccaggggcaggccattctgcaaaagcaggacctcacagaaacaagggctgggttgaggtcacccccttcagagttggttcctggccagatgggtaagaggcatttgtaattttaaaaattgttgaactttgggtttgggtgttttccttcttaggtggcctaaataagcaagccaggctgttgatattttagccagagaaatcggcaagccaagattaacccgaatctgaagtttagaatcttgagtttgcatctgcatcatatcatgctgttttgatgaggaaacatttgccactgaggagttggaggaagggcaagacgacagtgttaagtcagatcatttaatggttcccctaagccctggaaaaatatttgaaagaatggcagcaaaaaggttaagaaagcaagccagatttactgcacaatatgcagtacccagtactactttaaatccccaagagaacagtgtgatgtctaatatatacaggtctatgaaaatactgtggaataagcccaggaaggttagatgtgtttgcaaataagttgcccaaagggtccccctctaagtaaaacaaatattcagaccacaggctttaatgtaaactgtcaaaaagtgggatgtggaggatttttgttaagtcaagtgtcaatcgaagttaaaaagcaagggtttttggccaggcgtggtggctcacgcctgtaatcccagcactttgggaggccgaggccggcaaatcacctaaggtcaggagttcgagaccagcctggccaacatggtgaaaccccgtct

SEQ ID NO: 46770 - DNA, 934 bp, Homo sapiens
gccttctgcgtggagttctcgcggtctgggtttcgctgtctgctcttggcccggggtcattttgtcggcgtcgggtgccctctcttgcccagctggggcacagcgaggcggccccttctcccgacgacgttcgatggagtagggtcccagaccgttgtcccgaagagcgagatcgagcttggccccctcccccccctccttccctccctccttccttccgccgcaacatggctaacaacagccccgcgctgacaggcaactcgcagccgcagcaccaggcggctgcagctgcggctcagcaacagcagcagtgcggcggcggcggcgctaccaagccggcggtctccggcaagcagggcaatgtgctccgctctggggcaacgagaagaccatgaacctcaaccccatgatcctgaccaacatcctgtcgtcgccttacttcaaagtacagctctacgagctcaagacctaccacgaggtggtggacgagatctactttaaggtcacgcacgttgaaccatgggagaaaggaagcaggaaaacagcgggccagacagggatgtgcggaggggttcgaggtgttggaacaggaggaattgtttctacagcattttgcctgttatacaaattatttaccctgaagttaactcgaaagcaagtgatgggtcttataacacacacagactctccatatattagagcgcttggatttatgtatataagatatacacagccccctacagatctgtgggactggtttgaatccttccttgatgatgaagaggtatgtcaacaagggtaataatttgttttcttctgattactctcatatttttattatcttttatttattggtggtttaatgtcttcaagaacttcctgtacttaaatttatttcagtgaagatacttttggaaattaaatgtccttttaa

SEQ ID NO: 46771 - DNA, 1952 bp, Homo sapiens
tttttttttaacagttgataaaaagaactttaatggaaggcactgttgtccaaaatcacataaagggtaagagcccacacggtaccaccctgctctcctacttctcaaacccacatccaccacccagacaggagggtgcagaccccacaggaaattacctcccggagcactgactgatatttttccttaaaacaaaaaaatggctgtctcagactaataacagaacatcttaagagaaaaaaaaaaaaactataccagctattacagcctggtaatagaagcagctttctaagaattcccaagtttataagaggcccaagaaatgcatttattctgttgtctattaagcctccatgacaaggagaaagttatgagtaaatccttggttcatcaggagttaagagctgtgtgcctcatgaggagttaagagctgtgtgcataagcaggttcaagaaacaaactcctgtttgtttgcctcttgatggttcagaaacattcagctgctttcacctctaggacaaatgcttaagaatttactctcatcaacattggaactttacgaaaacaggattcctggttcatcagaagcctgtattaatgaaaaatgcattttgttctttagtgcttaaaaaaaaaagaaactcatctacttttttgcggaactttttttgggatagccattcctcctatggatagtcatcagcaagacacctaaaagacatgttttccctagttcttatcaaaaattcatctcacagaaaaagtcattcaagaaagcaaaactttgctttaagtagataaagtactgtttatatgcattaaaccaagcaatccactcagggttttaacggtgtaaaaactaaatcacagtacagctgaacagtgaatggatgggatggttctgatgaggtattattttgacattttggtctcagaaggtgtttccccagtatccaatgtcttcaacaaccggaaaagaccagcagcttctcgtatcctactgaattcaatacagaatgcctgcacttctataaacaaatcctgtacattaataattttgttacggatcaaggattggagaaacacacacacaagacgcaccaaccgattctgcatatatttatccttaatctgttcacaagtagagatgcaatttgatatataaaggtgaataaattcaggaggtagatcaacagctgtagttagtcgatttacaacttccattgaatgtaaagacatgtccatattgaccaggacagagaaatactcagtgatctggcttgactgcattaatttcagcaacatttctatagcgactaaagggttgttttccacaaggtcaggaagtttggctggggtgaggccaatatggtagacaagtttggggtctttttccaactcaccaagtagctgtgtttgttggggagaggataaggggcttttgaaggctttggcccattattcgtttgatctccacaccagtgctattcttaacacacatcgatttatcccactggatcgcgtggtcaggctccgtggggtttagccaagcaagttcatcctcacaaatgtggagtggaggcggtggacgaataaactctggtcgaaaatggctttcaataggtggctttggtccgctgactaaagcttctgtgatctgagaggcaactgagctgtcaaatccagaattagaagaatccgggtctgggtcactgagaatactggggaagcatcgctttgctttgcgttggcaattcagattggcgttcggccaaggctaactgaagcccactaatgtccacagactggcccatgtttccaacgtccatcagtgcaatctggcgaggcgtctttttgaagagttcccgtgggggtgccagcatcagctgggaaagaaaaaacttttctggtggagttataggaggtaaaaatcctgagagcggagggcggtc

SEQ ID NO: 46772 - DNA, 1090 bp, Homo sapiens
ttttccgggaggcgcgtggggcttgaggcgagaacggcctctgctgccaccaacatggagactttgtaccgtgtcccgttcttagtgctcgaatgtcccaacctgaagctgaagaagccgccctggttgcacatgccgtcggccatgactgtgtatgctctggtggtggtgtcttacttcctcatcaccggaggaataatttatgatgttattgttgaacctccaagtgtcggttctatgactgatgaacatgggcatcagaggccagtagctttcttggcctacagagtaaaatggacaatatattatgggaaggacttgcatccagcttcctatttacaatgggagggtttagggtttcataatcctggaccgatcgaatgcaccaaatatcccaaaacttcaataggattccttcttctgttccattgggatttcgtctgtggtcctattggagttttttccatgggctagaagtaattccatgaggaatggaaactgccgggctatctgatgggttagagtgcctttgagaagaaatcagtggatactggatttgctcctgtcaatgaagttttaaaggctgtaccaatcctctaatatgaaatgtggaaaagaatgaagagcagcagtaaaagaaatatctagtgaaaaaacaggaagcgtattgaagcttggactagaatttcttcttggtattaaagagacaagtttatcacagaattttttttcctgctggcctattgctataccaatgatgttgagtggcattttctttttagtttttcattaaaatatattccatatctacaactataatatcaaataaagtgattattttttacaaccctcttaacattttttggagatgacatttctgattttcagaaattaacataaaatccagaagcaagattccgtaagctgagaactctggacagttgatcagctttacctatggtgctttgcctttaactagagtgtgtgatggtagattatttcagatatgtatgtaaaactgtttcctgaacaataagatgtatgaacggagcagaaataaatactttttctaattaaaaaaaaaaaaaca

SEQ ID NO: 46773 - DNA, 840 bp, Homo sapiens
tgttttttccattaaaagaagaatgaattatgcccggtatgcaggtcaaacaattctggcagtcaaggaaaacctgagatttggagctggggcccctgtaaatgcacagtgatgtttccgtgggcaagcttaggaccgtctggtgggccggggcagggtctgtgggctgtggccatggagggcccagggacttcttggtcagctcttacctttttctctgtttcctgccaacagatgttgcctttatcaccaccgtgaccttcctgtggaaagtgtcggcgatcaccgtggtcagctgcctcccgctgtatgtcctcaagtacctgaggcgcaagctctctcctcccagctactgcaagctggcctcctaaggggctgtgcacccccagcgggctggccccagcaccttctgcccttcccagcaccttgtgcccttgccagtgaacgcagggtttgccattgctaccaagcaagcaccacaagaaagggagggtacgccaggcgagcccagggcacagatgctgagacagcctgtccttctcagtgcagggacgtcacccctgccaggcaagcccagggcacgatgccaggatggcttctccctctcagtgcgaggcttcacccatgcctaggcaagcccagggcacagatgcccgggatggcccctccctctcagtgcgggaacgtcacccctgccaggcaagcccagggcacagatgctgcgatggcctcttcctcttaagtgtggggcctcacccctgcttttctttctttttttgtattgtcaaaattgtatttccatattgaagcagcttgagtttctactgaaaaaaaaaaaaa

SEQ ID NO: 46774 - DNA, 1070 bp, Homo sapiens
  misc_feature (1)...(1070): n = a,t,c or g
acaacctccctggtctcaagtgatcctcctgcctcaatcagcctcccgngtagctgggnctacaggcatgcaccaccanatccggctaatttagagaagtttttttttgtatagacagggtcgtagtatgttgtctaggctgggtctcaaactccctggagctcaaactggatccctccccacccctggcctccccaaagaccccaaagactacagacctgagccaccatgcccacctgttttcttgacaggacttgcatatgacaagctctctgcttctcctcacctatgcattgcaagccaggtcagaggcaggttaaacaccttaaggacatgttaggacaagtggcatacaagggaaaaaaacccgttcatttaagttacagaaacagaaaaaaaaaaactggcttattcccacacttactctactcaaagctttgagaagactaattttggcatcctctggctaaatacaaaacaacaaaacaaaacaaggcaaactctttcagcaagagctgtgcggggaagggactataagggacacacacaactgacaggcaaaagctctgagcacgtgattgctaagtttaattcaactgttacaccccattctgccttgtaaaaataacaaaacgctcctatcaaaatgacattgtgatgtgagtacaggctttttgttttggtacagctctaaaaaatgttggcaccgaatgcacttaagaaaagtgttaaggcttaatacaaatacagagacgagtcatttctcaatgcagcttagagggtgagaacaggatgctaggtttttaaatcttccaaatacaggcagtccccaacgtacagacatacaggacacctcccaaatgtaaacgacagccacacagcagggcttgcatgcgcaggaactcttcttctcccagtgagcagactaagcactctgaatcccaccccactgcctcgcagagggaaagaaggcaggacagatgcaagaagagtaatgtcaggggctccatcacagctgcccaggggcttctgctgtagttcatattttcctcattcccatctctgggttc

SEQ ID NO: 46775 - DNA, 1565 bp, Homo sapiens
tgttttcttttttcttttttatttttattttttgcatttatttaaaaaatcccatcatgaccctggaagcctttagaacagttttatcctttgaaacacaggacacatttctcccagtgcgcagaatttcaagtttacgtggttcagcttaagaagtgtatgtttcacgttccttagaggacaacagacccaagttatcactatgagaaaggaacagctgtcccagcttcaatgggataatccaacaccaccagctacctgtacaacagtaagatggtcaatccctgtctgttacccacagggacagcatgacaaggagagagcccccatctgacttaatagcaaaccaacccctttattcttatctctgctgctaggggtcaagactggtatttgttgaggtttcagattccagagacccagggatcccatccctggctgtggctacagtcacatcttaacagggccacctctgcccaggtgtacattcccaacagcatgtccttcctggttctctacccccacagcacttcttagagcagaggcagagcccagaagctgtgtggggcccagggcaagagctggaagtaagacctgcaagaggcggcagggagctaactgtagcacgaggacaaaaatgaacacggtaatactgaggtaaatgaacactcaattcatgtggaggctgtaaacgtcctgatgtcacctctgcctcaagagcagaaaatgtgactggagtggttacaggaggggcctgccagacccctgtgggaatactacatctgggcccctcaatcaaggaggcaagggagaatttctggccactggcaaatgaagcatactggcttgcagggaccttctgattcaagtacaccaagaaataagctcctcctcccccaactagatggtattgatcactctgcccacaaatggtacccccttcagcaagaactgcaagcccttcttggatttgccttcatgagaaaatggtggcttgggatggaggtgacattccttgctgtggtgaactgcaaagaaggaaaccaggcaatgtattccatagaggcctttaaagagacccgttggaaatgggccatggtctaatttggtgttgaaataaactaacctctttggctgtttctcccaaactgccaccagccaggcaaggccaatccaatactgactgctggctgggggagctcgtaatgggtgatgccgccctgctttttgcatatgtcaggctaacaggtgctttatttccagagaattgttaatgcccttttttgaaaagagcagcagaaattccggacaagaatctgaaaaataggtgtcaaaaactatttcccagaaggtagctgtacaggagtttgagtctccagctgccagggcattaggtgtctagtcactccactcttccccaaagccgctctgctccccacagctcccaggtgtcagttctcattctacccaccctcacactaagagaggttctgggggtcacttttttgttccactcagtcctctctcttggggtggtttggggcaaatcctgacggacgcgtggg

SEQ ID NO: 46776 - DNA, 1395 bp, Homo sapiens
tttacccttgtggaccttagctattaaggtggacaatgactttattttctttacgtaagttttatattttattatgacattcattttttctacatgaagacacaaataaaaattataccaactacataaactattttgtactttccttgctaaaccacagatgtatttcatggaaagaggggcctttaaaggcacttatttatcattgtaggtgtgtctaaacaattgatattcaaaaacacaactttttgtgtacaaaattttacaatttttaacaaaagcagtgaagacactaaataacccagtggcgacctcttcaaagtgcagtgtccttggtcaccaatgcagatgctactggggcagccagcgggctcagagggtccaactccagacactgcatcccatggctgtcctagactgagttggcacttgtaaaaagagatggtcccacacctactaaaaaaacaagctactctagtatcaatatgacatcactcttttaccatcaatcatattgcaaaaccatagtatttaacgaccaataaacagccaaatacctaatgccacattgtcggttcaatttacctggctgggttaatatcagtctgtgtttgagtatttcttttgagcacacaaaaacaaatgtatagtcacttgatgaggaaattcttcactttgactcaaatggattcaccatgctgtcagttatgaaaacaactctaattttaatctccacagggcaaccttcacttttcacagcagttctaaaactgacctacagaaaagttcaagagttttttaagaaattgggctacccatactatgtttcttatttaattttctctacatcaatacctactcttacgttccaaatatttcatgggaaatttttccctcaaacttaatatgtttcttaaacaaattgaagccactaaagttcctgtttaaaccactgataactgccccagttaaaataataataatttaaaatgattacacttcaaataaaggtactaaaatcacgccccccaaatttgtaagcgcttttgttgttattgggtactcactgtgaatagaagtaaatgtacttgacctgtatgagaataaacattttatcaagtacagcaaaaaaaacggaactgattgtgaaagccatggggatgggactttaaaacagcggtaagacgctggtttatcaccagaaacctcatgtgcctctgtgcacttgaagtaaagaccacatttgagcaggcctggtgggctggcacaggcctcagaacaggtgctgtttgtgtgaattctcctccctgcattgtccattctgttctagggcagtctgattctggcaacaggagtctctaagttccaatcactcactcacaaaagagttttctg

SEQ ID NO: 46777 - DNA, 7222 bp, Homo sapiens
  misc_feature (1)...(7222): n = a,t,c or g
cgggcggcctcttgtgtgagggcctgtgggattctccggatatggccggagtgtttccttatcgagggccgggtaacccggtgcctggccctctagccccgctaccggactacatgtcggaggagaagctgcaggagaaagctcgaaaatggcagcaattgcaggccaagcgctatgcagaaaagcggaagtttgggtttgtggatgcccagaaggaagacatgcccccagaacatgtcagggagatcattcgagaccatggagacatgaccaacaggaagttccgccatgacaaaagggtttacttgggtgccctaaagtacatgccccacgcagtcctcaaactcctggagaacatgcctatgccttgggagcagattcgggatgtgcccgtgctgtaccacatcactggagccatttccttcgtcaatgagattccctgggtcattgaacctgtctacatctcccagtgggggtcaatgtggattatgatgcgccgagaaaaaagagataggaggcatttcaagagaatgcgttttcccccttttgatgatgaggagccgcccttggactatgctgacaacatcctaaatgttgagccactggaggccattcagctagagctggaccctgaggaggacgcccctgtgttggactggttctatgaccaccagccgttgagggacagcaggaagtatgtaaatggctccacttaccagcgctggcagttcacactacctatgatgtcaactctctaccgcctggctaatcagctcctgacagacttggtggatgacaactacttctacctgtttgatttgaaggccttctttacgtccaaggcactcaatatggccattcctggaggccccaaatttgaacctcttgttcgagacatcaacctacaggatgaagactggaatgaattcaatgatattaacaagattatcatccggcagcctatccggactgagtacaagattgcttttccttacttgtacaacaatcttccacaccatgtccacctcacctggtaccatactcccaatgttgtattcatcaaaactgaagatcctgacttgccagctttctactttgaccctttgatcaacccaatctcccataggcactcagtcaagagccaggaaccattgccggatgatgatgaggaatttgagctcccggagtttgtggagcccttcctgaaggacacacccctctatacagacaatacagccaatggcattgccctgctctgggccccgcggcccttcaacctacgctctggtcgcacccgtcgggccctggacataccccttgtcaagaactggtatcgggagcattgtcctgccgggcagcctgtgaaagtgagggtctcctaccagaagctgcttaagtactatgtgctgaatgccctgaagcatcggccccctaaggctcaaaagaagaggtatttgttccgctccttcaaagccaccaaattctttcagtccacaaagctggactgggtggagggttggctccaggtttgccgccagggctacaacatgctcaaccttctcattcaccgcaaaaacctcaactacctgcacctggactacaacttcaacctcaagcctgtgaaaacgctcaccaccaaggaaagaaagaaatctcgttttgggaatgctttccacctgtgtcgggaagttctgcgtttgactaagctggtggtggatagtcacgtgcagtatcggctgggcaatgtggatgccttccagctggcagatggattgcagtatatatttgcccatgttgggcagttgacgggcatgtatcgatacaaatacaagctgatgcgacagattcgcgtgtgcaaggacctgaagcatctcatctattatcgtttcaacacaggccctgtagggaagggtcctggctgtggcttctgggctgccggttggcgagtctggctctttttcatgcgtggcattacccctttattagagcgatggcttggcaacctcctggcccggcagtttgaaggtcgacactcaaagggggtggcaaagacagtaacaaagcagcgagtggagtcacattttgaccttgagctgcggggcanctgtgatgcatgatattctggacatgatgcctgaggggatcaagcagaacaaggcccggacaatcctgcagcacctcagtgaagcctggcgctgctggaaagccaacattccctggaaggtccctgggctgccgacgcccatagagaatatgatccttcgatacgtgaaggccaaggctgactggtggaccaacactgcccactacaaccgagaacggatccgccgaggggccactgtggacaagactgtttgtaaaaagaatctgggccgcctcacccggctctatctgaaggcagaacaggagcggcagcacaactacctgaaggacgggccttacatcacagcggaggaaacagtggcagtatataccaccacagtgcattggttggaaagccgcaggttttcacccatcccattccccccactctcctataagcatgacaccaagttgctcatcttggcattggagcggctcaaggaagcttatagtgtgaagtctcggttgaaccagtctcagagggaggagctaggtctgatcgagcaggcctacgataacctccacgaggcgctgtcccgcataaagcgtcacctcctcacacagagagccttcaaagaggtgggcattgagttcatggatctgtatagccacctcgttccagtatatgatgttgagcccctggagaagataactgatgcttacctggaccagtacctgtggtatgaagccgacaagcgccgcctgttcccaccctggattaagcctgcagacacagaaccacctccactgcttgtttacaagtggtgtcaaggcatcaataacctgcaggacgtgtgggagacgagtgaaggcgagtgcaatgtcatgctggaatcccgctttgagaagatgtatgagaagatcgacttgactctgctcaacaggctcgtgcgcctcatcgtggaccacaacatagccgactacatgacagccaagaacaacgtcgtcatcaactataaggacatgaaccatacgaattcatatgggatcatcagaggcctgcagtttgcctcattcatagtgcagtattatggcctggtgatggatttgcttgtattgggattgcaccgggccagtgagatggctgggccccctcagatgccaaatgactttctcagtttccaggacatagccactgaggctgcccaccccatccgtctcttctgcagatacattgatcgcatccatatttttttcaggttcacagcagatgaggctcgggacctgattcaacgttacctgacagagcaccctgaccccaataatgaaaacatcgttggctataataacaagaagtgctggccccgagatgcccgcatgcgcctcatgaaacatgatgttaacttaggccgggcggtattctgggacatcaagaaccgcttgccacggtcagtgactacagttcagtgggagaacagcttcgtgtctgtgtacagtaaggacaaccccaacctgctgttcaacatgtgtggcttcgagtgccgcatcctgcctaagtgccgcaccagctatgaggagttcacccacaaggacggggtctggaacctgcagaatgaggttactaaggagcgcacagctcagtgtttcctgcgtgtggacgatgagtcaatgcagcgcttccacaaccgcgtgcgtcagattctcatggcctctgggtccaccaccttcaccaagattgtgaataagtggaatacagctctcattggccttatgacatactttcgggaggctgtggtgaacacccaagagctcttggacttactggtgaagtgtgagcacaaaatccagacacgtatcaagattggactcaactccaagatgccaagtcggttccccccggttgtgttctacacccctaaggagttgggtggactcggcatgctctcaatgggccatgtgctcatcccccaatccgacctcaggtggtccaaacagacagatgtaggtatcacacactttcgttcaggaatgagccatgaagaagaccagctcattcccaacttgtaccgctacatacagccatgggagagcgagttcattgattctcagcgggtctgggctgagtactcactcaagagacaagaggccattgctcagaacagacgcctgactttagaagacctagaagattcatgggatcgtggcattcctcgaatcaataccctcttccagaaggaccggcacacactggcttatgataagggctggcgtgtcagaactgactttaagcagtatcaggttttgaagcagaatccgttctggtggacacaccagcggcatgatgggaagctctggaacctgaacaactaccgtacagacatgatccaggccctgggcggtgtggaaggcattctggaacacacactctttaagggcacttacttccctacctgggaggggcttttctgggagaaggccagtggctttgaggaatctatgaagtggaagaagctaactaatgctcagcgatcaggactgaaccagattcccaatcgtagattcaccctctggtggtccccgaccattaatcgagccaatgtatatgtaggctttcaggtgcagctagacctgacgggtatcttcatgcacggcaagatccccacgctgaagatctctctcatccagatcttccgagctcacttgtggcagaagatccatgagagcattgttatggacttatgtcaggtgtttgaccaggaacttgatgcactggaaattgagacagtacaaaaggagacaatccatccccgaaagtcatataagatgaactcttcctgtgcagatatcctgctctttgcctcctataagtggaatgtctcccggccctcattgctggctgactccaaggatgtgatggacagcaccaccacccagaaatactggattgacatccagttgcgctggggggactatgattcccacgacattgagcgctacgcccgggccaagttcctggactacaccaccgacaacatgagtatctacccttcgcccacaggtgtactcatcgccattgacctggcctataacttgcacagtgcctatggaaactggttcccaggcagcaagcctctcatacaacaggccatggccaagatcatgaaggcaaaccctgccctgtatgtgttacgtgaacggatccgcaaggggctacagctctattcatctgaacccactgagccttatttgtcttctcagaactatggtgagctcttctccaaccagattatctggtttgtggatgacaccaacgtctacagagtgactattcacaagacctttgaagggaacttgacaaccaagcccatcaacggagccatcttcatcttcaacccacgcacagggcagctgttcctcaagataatccacacgtccgtgtgggcgggacagaagcgtttggggcagttggctaagtggaagacagctgaggaggtggccgccctgatccgatctctgcctgtggaggagcagcccaagcagatcattgtcaccaggaaggacatgctggacccactggaggtgcacttactggacttccccaatattgtcatcaaaggatcggagctccaactccctttccaggcgtgtctcaaggtggaaaaattcggggatctcatccttaaagccactgagccccagatggttctcttcaacctctatgacgactggctcaagactatttcatcttacacggccttctcccgtctcatcctgattctgcgtgccctacatgtgaacaacgatcgggcaaaagtgatcctgaagccagacaagactactattacagaaccacaccacatctggcccactctgactgacgaagaatggatcaaggtcgaggtgcagctcaaggatctgatcttggctgactacggcaagaaaaacaatgtgaacgtggcatcactgacacaatcagaaattcgagacatcatcctgggtatggagatctcggcaccgtcacagcagcggcagcagatcgctgagatcgagaagcagaccaaggaacaatcgcagctgacggcaacacagactcgcactgtcaacaagcatggcgatgagatcatcacctccaccaccagcaactatgagacccagactttctcatccaagactgagtggagggtcagggccatctctgctgccaacctgcacctaaggaccaatcacatctatgtttcatctgacgacatcaaggagactggctacacctacatccttcccaagaatgtgcttaagaagttcatctgcatatctgaccttcgggcccaaattgcaggatacctatatggggtgagcccaccagataacccccaggtgaaggagatccgctgcattgtgatggtgccgcagtggggcactcaccagaccgtgcacctgcctggccagctgccccagcatgagtacctcaaggagatggaacccttaggttggatccacactcagcccaatgagtccccgcagttatcaccccaggatgtcaccacccatgccaagatcatggctgacaacccatcttgggatggcgagaagaccattatcatcacatgcagcttcacgccaggctcctgtacactgacggcctacaagctgacccccagtggctacgaatggggccgccagaacacagacaagggcaacaaccccaagggctacctgccttcacactatgagagggtgcagatgctgctgtcggaccgtttccttggcttcttcatggtccctgcccagtcctcgtggaactacaacttcatgggtgttcggcatgaccccaacatgaaatatgagctacagctggcgaaccccaaagagttctaccacgaggtgcacaggccctctcacttcctcaactttgctctcctgcaggagggggaggtttactctgcggatcgggaggacctgtatgcctgaccgtttccctgcctcctgcttcagcctcccgaggccgaagcctcagcccctccagacaggccgctgacattcagcagtttggcctctttccctctgtctgtgcttgtgttgttgacctcctgatggcttgtcatcctgaataaaatataataataaattttgtataaatagg

SEQ ID NO: 46778 - DNA, 1370 bp, Homo sapiens
ttttttttttttatgtcactgacaaagaacttttatttctttttaatgacattaaacacaactgctacaagggaaaaaacatgataaagaggaggcaccaaacttcagtttcataattgaaactgacaacgccagtaaatcagggcctgcattcgaaactacaggttatttcaggctccttacttgtaagtaaacaatgtaaacagcatatttttactctgctttgtcaagacccccatggtgggaatgtcgtcatggatgaagaaagcagttaaatgcacctaacacttgcttaaaaaataatacagcaagaattccaactgcaatattaggacttaggagggccaattaccaaatataagagatatgcagctttgaaaagagatgaaaactccagattctactcactaccatctttaaggcgaacatgccagataatgagttttctttggctttgttttttcttcttaaagaataccatgttaaccactagagaacagctctctcctcccccagtccaacagatttaattaagcttgctaaagctttggaaaaacagaattatttgagctaagaggaaatgtgattgtcacattttctagttaacctgtcactcatttgatttggcaaaggcagtgctcctattacacattcagtcttaaaaccccatgtaccaggagggcacgagtcttagatttttgcctaggcaaaatcctgtcccttcactccttgggttttctgtagggaactagactacagttccctactgtagctgcaatgctagctattccaactacatttaattttaactatgctatggtcccaaaggtggatgtttggcatgtctcactccatcaacctaatttagggcagcctggagaagtgaccgatgtagtaaatgccaagtaggctaactaaaataatagatttcaactactgcctttgaatagaacttctcctttgcattttggccccagaatttaaaacaaatgttcaaggaaaagcaaatccttgactggataaaaacagtaaacacttagggacattcacctaaatttattgttggcttaaatgaccaagcgttccccacgtccgtttctaaagtggggtaggatgtttagaatgcattactcacacagaaagatgggattgatgaaatcacaaaactaaacacaggctatagcaactatgaacagccttcacagagaatgaacaatagcacaaatgccagactgcaacacttcctaaaatgatgtctatagctatctgtaaagagagaataaccggccaggtgcagtggctcatgcctgtaatcccagcactttaggaggccgaggtgggcagatcacctgaggtcaggagttcaagac

SEQ ID NO: 46779 - DNA, 1308 bp, Homo sapiens
cgtcgacttttttttttttttttaaatttaaaaagatgtcctcactgcacaagtgactacgggctacaggcaaggatgggagacggaggcttcaacacaactcattgcacttagaaccgttactaaccgaaacaccatttgcttgtcaacaatgtacccttgacagcagggagaaacttctttatagtctctgcttcagacaagatttacagctttctccaaggccagaggcccaatgtgtgaccacaagtcttgtttcttgtccaccagacccaatcctctggcaccttgtaccccccgttcctcagcaatatgctcggcctaggttccagaggcagctggaaggaagcagctatgggctcattcagttctgtttgcccaaatccagaagccctaggaaagtcccgtctgagtcttgactcctgacccttgcagtggctggagtcggtactggtgcacacccccactcccacggtgtgggtagtgctgtgaattggaaaccgcagataccctggaggcctggtagacagctgactgcccagcactgggcagactgatagtccgtaagtctgatggcaatgacgacctagagttctgaggaaaggaggtggaactcagagttcctgtgctggactgagaaactgaatctgaggttggcgagtctgagggtccctgcagggtagggctagcagcactagaagggcagctcctccttggaagattgctgccagtgctgtttccagaatgtggctggctgctaaaataccctggtgtccccgtaaatggggccaacgagtctgtggacacagggtgggcggggctggaataggacgtggaagagagggatgattctgaagaaccgtgagagggggggtttccaggtctcagtgcagtagttcgataactgtatcctggagactgtgtaggaatgtcctctgaagggggaggaactctgctgaaggaggctttgtgattctgtccgaggactatcacactgcaggagctggtagctgtatctggaagggctgtaaactgttgctcctttagagagtgctgagcttaatgtctctgggccttctccatctgcagggtctgagtctttctctgtgatgttactctcccatgtgggagagggctctcccttttgggccaccctcacgctgcttcggaggaccttggggatgctccctccttctcggagtcgttctactgatgtgggaacccatccacctactgctgatattctcttgaggtctgcagtgagatgaagaagtgcctctggaatctgtatggttaccgcctccaaat

SEQ ID NO: 46780 - DNA, 1307 bp, Homo sapiens
gctacgtgtgttgccatagcgaccattttgcattaactggttggtagcttctatcctgggggctgagcgactgcgggccagctcttcccctactccctctcggctccttgtggcccaaaggcctaaccggggtccggcggtctggcctagggatcttccccgttgcccctttggggcgggatggctgcggaagaagaagacgaggtggagtgggtagtggagagcatcgcggggttcctgcgaggcccagactggtccatccccatcttggactttgtggaacagaaatgtgaagtttttgatgatgaagaagaaagcaaattgacctatacagagattcatcaggaatacaaagaactagttgaaaagctgttagaaggttacctcaaagaaattggaattaatgaagatcaatttcaagaagcatgcacttctcctcttgcaaagacccatacatcacaggccattttgcaacctgtgttggcagcagaagattttactatctttaaagcaatgatggtccagaaaaacattgaaatgcagctgcaagccattcgaataattcaagagagaaatggtgtattacctgactgcttaaccgatggctctgatgtggtcagtgaccttgaacaccgaagagactgacaatcctgagggaagttcttagaaaatcaaaagaggaatatgaccaggaagaagaaaggaagaggaaaaaacagttatcagaggctaaaacagaagagcccacagtgcattccagtgaagctgcaataatgaataattcccaaggggatggtgaacattttgcacacccaccctcagaagttaaaatgcattttgctaatcagtcaatagaacctttgggaagaaaagtggaaaggtctgaaacttcctccctcccacaaaaaggcctgaagattcctggcttagagcatgcgagcattgaaggaccaatagcaaacttatcagtacttggaacagaagaacttcggcaacgagaacactatctcaagcagaagagagataagttgatgtccatgagaaaggatatgaggactaaacagatacaaaatatggagcagaaaggaaaacccactggggaggtagaggaaatgacagagaaaccagaaatgacagcagaggagaagcaaacattactaaagaggagattgcttgcagagaaactcaaagaagaagttattaataagtaataattaagaacaatttaacaaaatggaagttcaaattgtcttaaaaataaattatttagtccttacactgaaaaaaaaaaaaaaaaaaaataaaaa

SEQ ID NO: 46781 - DNA, 5570 bp, Homo sapiens
  misc_feature (1)...(5570): n = a,t,c or g
aagttttggagcgccggacaagctgaggtccgcgactcgtcgctaagattccccaaaactgagatttcaagaaaattcaccctttccgctttctttggcgcccttcaaccgtgaaggaaatgaaggttgagaacctggaacccgcttccaaagaccaagccctttctctgtgcctcacaacagtcttgcgctgtagctgtttttattacccctattttactactggggaggagatttgaggtcctgaaagtgaagtgacttgctggacgtcacttagcagaggagatggcgaaacctggattagaggcgatgccttctaactcccagcgtggacttgcctcctttcctgggggtgactgaatgcccagccagggacgcgacgtctctggccagcagaaatacggcctcctccccgccgactgggcaaagggggaccttgcggccaaggagggattcgcaggcgggccgggggtgggagcgggggccggagccggagccttggcccgcccccgggcggcgctgtgattggccggccgctccggcgggcgtcgcgattggccgtcctgcagccgttgagatttgaactcggtatttgtggctttgcccgcgcgttgccagactcagaggcggccctttgcctctgcctgccggggattggccggattctccgccgacttgaaaactgccttgctaattggtgcgtgttgtgcacgcgtgttttttccttttcatttcagcctgactgccggaatcagagccgcgggtgagatccccagccctgtgagcctgtaggagtagaatggctccccaaatgtatgagttccatctgccattatccccagaggagttgttgaaaagtggaggggtgaatcagtatgttgtgcaagaggtactgtccatcaaacatcttccaccacagcttagagcttttcaggctgcctttcgagctcaggggcccctggctatgctgcagcactttgatactatctacagcattttgcatcactttcgaagtatagatcctggcctcaaagaagatactctggaattcctgataaaagtggtatcccgccactcccaggagcttccagctatcctggatgatacaactttgagtggatcagatagaaacgcccatctaaatgccctcaaaatgaactgttatgctctgatacgtctcctggaatcctttgagaccatggccagccagacaaaccttgtggacctggaccttggtgggaagggtaagaaagctcggaccaaggcagcccatggctttgactgggaagaagagaggcaaccaattcttcagcttttaacacagctacttcagttggacatccgtcacctgtggaaccactcaataattgaagaagaatttgtcagtttggttactggctgttgctaccgccttctggagaatcccaccattaatcaccagaagaaccgccccactcgggaagccataacacacctgcttggtgtagccttgacccgttataaccatatgctcagtgctacagtgaagatcatccagatgctgcagcactttgaacacctggcacctgtactggttgcagccgtgagtctatgggcaactgactatggaatgaagagcatagtgggagagattgtaagagagattggacaaaagtgtccccaagagctgagtcgagacccttcagggacaaagggctttgcagcattcctgacagaactagcagaacgtgtcccagctatcctgatgtccagcatgtgcattttgctagatcacctggatggagaaaattacatgatgcgtaatgctgtgctggcagccatggcggagatggtgctgcaggttctcagtggcgatcaactggaagcagcagcccgagacaccagagaccagttcttggatactttacaagcccatggccatgatgtcaactcctttgtgcggagccgtgttttgcagctcttcacccgaattgtccagcagaaggctctccccctgacacgtttccaggcagtggtggctttagctgtgggacgtctggcagacaagtcagtgctagtatgtaaaaatgccatccagctgctggccagttttctagccaataatcctttctcctgcaagcttagtgatgctgaccttgccggaccactgcagaaggagacccagaaattacaagagatgagggcccagaggcgaactgcagcagcttctgcagtgctggacccagaggaggagtgggaagccatgctgccagagttgaagtctaccctgcagcagcttctacagcttccccagggagaggaggagattcctgagcaaattgccaatacagagacaactgaagatgtgaaaggacgcatctatcaactgcttgccaaagctagttacaaaaaggccatcattctcactcgagaagccacaggcacttccaggagtccgaacccttcagtcatatagacccagaggagtcagaggagaccaggctcttgaatatcttaggacttatcttcaaaggcccagcagcttccacacaagaaaagaatccccgggagtctacaggaaacatggtcacaggacagactgtctgtaaaaataaacccaatatgtcggatcctgaggaatccaggggaaatgatgaactagtgaagcaggagatgctggtacagtatctgcaggatgcctacagcttctcccggaagattacagaggccattgnatcatcagcaagatgatgtatgaaaacacaactacagtggtgcaggaggtgattgaattctttgtgatggtcttccaatttggggtaccccaggccctgtttggggtgcgccgtatgctgcctctcatctggtctaaggagcctggtgtccgggaagccgtgcttaatgcctaccgccaactctacctcaaccccaaaggggactctgccagagccaaggcccaggctttgattcagaatctctctctgctgctagtggatgcctcggttgggaccattcagtgtcttgaggaaattctctgtgagtttgtgcagaaggatgagttgaaaccagcagtgacccagctgctgtgggagcgggccaccgaagaaaggtccgcctgctgtcctcttggagcgctgttcctctgtcatgcttcttggcatgatggcacgaggaaagccagaaattgtgggaagcaatttagacacactggtgaagcatagggctggatgagaagtttccacaggactacaggctggcccagcaggtgtgccatgccattgccaacatctcggacaagagaaagccttctctgggcaaacgtcacccccccttccggctgcctcaggaacacaggttgtttgagcgactgcgggagacagtcacaaaaggctttgtccacccagacccactctggatcccattcaaagaggtggcagtgaccctcatttaccaactggcagagggccccgaagtgatctgtgcccagatattgcagggctgtgcaaaacaggccctggagaagctagaagagaagagaaccagtcaggaggacccgaaggagtcccccgcaatgctccccactttcctgttgatgaacctgctgtccctggctggggatgtggctctgcagcagctggtccacttggagcaggcagtgagtggagagctctgccggcgccgagttctccgggaagaacaggagcacaagaccaaagatcccaaggagaagaatacgagctctgagaccaccatggaggaggagctggggctggttggggcaacagcagatgacacagaggcagaactaatccgtggcatctgcgagatggaactgttggatggcaaacagacactggctgcctttgttccactcttgcttaaagtctgtaacaacccaggcctctatagcaacccagacctctctgcagctgcttcacttgcccttggcaagttctgcatgatcagtgccactttctgcgactcccagcttcgtcttctgttcaccatgctggaaaagtctccacttcccattgtccggtctaacctcatggttgccactggggatctggccatccgctttcccaatctggtggacccctggactcctcatctgtatgctcgcctccgggaccctgctcagcaagtgcggaaaacagcggggctggtgatgacccacctgatcctcaaggacatggtgaaggtgaaggggcaggtcagcgagatggcggtgctgctcatcgaccccgagcctcagattgctgccctggccaagaacttcttcaatgagctctcccacaagggcaacgcaatctataatctccttccagatatcatcagccgcctgtcagaccccgagctgggggtggaggaagagcctttccacaccatcatgaaacagctcctctcctacatcaccaaggacaagcagacagagagcctggtggaaaagctgtgtcagcggttccgcacatcccgaactgagcggcagcagcgagacctggcctactgtgtgtcacagctgcccctcacagagcgaggcctccgtaagatgcttgacaattttgactgttttggagacaaactgtcagatgagtccatcttcagtgcttttttgtcagttgtaggcaagctgcgacgtggggccaagcctgagggcaaggctataatagatgaatttgagcagaagcttcgggcctgtcataccagaggtttggatggaatcaaggagcttgagattggccaagcaggtagccagagagcgccatcagccaagaaaccatccactggttctaggtaccagcctctggcttctacagcctcagacaatgactttgtcacaccagagccccgccgtactacccgtcggcatccaaacacccagcagcgagcttccaaaaagaaacccaaagttgtcttctcaagtgatgagtccagtgaggaagatctttcagcagagatgacagaagacgagacacccaagaaaacaactcccattctcagagcatcggctcgcaggcacagatcctaggaagtctgttcctgtcctccctgtgcagggtatcctgtagggtgacctggaattcgaattctgtttcccttgtaaaatatttgtctgtctcttttttaaaaaaaaaaaaaaggcccgggcacttgttgtcacgcctgtaatcccagcactttgcgatacccaaggcggggtggaataacctgaggtaggggagttcgaagacccagcctgacccaacagggagaaacccccatctcctactaaaacttaaaaaatttagcccgggcgtaatttgngtngnnnnnnnnnnnnnnnnnnnnnnnnnnnnnnnnnnnnnnnnnnnnnnnnnnnnnnnnnnnnnnnnnnnnnnnnnnnnnnnnnnnnnnnnnnnnnnnnnnnnnnnnnnnnnntagnnacctccatctcaaattaaaaaaaatgcctacacgctctttaaaatgcaaggctttctcttaaattagcctaactgaactgcgttgagctgcttcaactttggaatatatgtttgccaatctccttgttttctaatgaataaatgtttttatatacttttagaaaaaaa

SEQ ID NO: 46782 - DNA, 1211 bp, Homo sapiens
tttttttttaaaccttcccttaaaggactttatttctctatttttatatggatcatttattaaattagaagactaaaaagtaaaaatatattttacaatcaaagaaaaatctggacaatggaccccagtaaaataatcagaagcgcacgttctgagaccactcctgcctggcaccctgcagggtagcgcccagggagcatctgcagaggggagaggagaggagggggagcctccggcgacctgtcttctatctccggagccccgcctgaggctccaagatggcacagtcaggctgtccttagtgaccgctgccacggagctggcgatcggcctgcatcttcaaacccaggagcaggagcagcagaggctggcaaggcctgggccctcagacaccaggggcctaaacccagctcccaaacccactgcagcctccccttgtgagctggcagacaagcctggtccttctgagtgtgacgacctcatccacacctgacacaggcgggggcgggggagggtgggggttgtgaaccagctaattctggggaccgctcggaggggctcagcaagctgcttctacagtaagccacttctacagtaagccttcaaacaggaaataaagcataaaatgaaggaaagaagaatcttatttaattaaaggccttgcaaaatgtgatttgtctattaaaaaaataaagcgcttgtgaaaaagaaaactaagagatggcggcaagcgtggtcatcggcaaagggttgctctccctccagcgaggctggcccccactgtgtggtccctcgggcccccacacgggctgctcaagggctggcagcaggggccacgtcctctctaggagacacccacagagccacatgtgcacgcgtgtggcagtctcactgcaccccagcaacgcgaaggcagaaaccggtgctggtggccacacctgggcgcctggacaccgaagcccccagcacagtgaggcctctgagtgtggcttgtggtctgtcctgggttagagttgttaatatcacggaacataccatctagaacgttccagtcccacctgacaccttcattcccaatggagaagaaatctacacaggcgtaagaccaggccatctgagacagggaatcccaggggcccctccgtctgagtggtcggcgtctgctgaacaaataccatgtctttcttcttcaaaggatcaaaggcctttag

SEQ ID NO: 46783 - DNA, 1348 bp, Homo sapiens
gggctgctgtggggggatccacgaggccctgcccatcctggaaggccgtgagagtggacttggtagttgcacccgtcagccagttccctttcgccctgctcggttggactggctccaagcttttccagcgggagctgcgccgcttcagccggaaggagaagggcctgtggctgaacagccatgggctgtttgacccggagcagaagacatttttccaagcggcttcagaggaagacatcttcagacacctgggccttgagtaccttctcagagcagagaaacgcctgagcctgcctgtgtcccccacttccactcaggaaattgggctgcccccaacctggccactgaatgtctccaggcagatatgctgccccctgacccccaccttcacccctccccgccaaggcctggctcttccggaggtcaattgtgcctgcaggatcagttgagcccctgctggtgtgctgcagggtgtgatgaggtggggagccctcagtgccagcctcatcactgtgtgaccctgggtctgctcttagcctccccatggctcacgttcctgccctggatgggatgtgagtggggcccacatcgtggagctgtggtggggcctgcagtcatgaatggcaagtggtccctgatgtgcagtgtctcattagttgcactgcagttaactgtggctcctgcagggcaccctgcccagaatgcccagaagagaaccatgcatacctgcactgcatttgagagccatgagctggaggctgtggttcgtgccagcaaggagcctactgtctggtgtgctgtaggcatctggagagggagagggcctgggtaggagctgggaggaagataattttcaactatggggcttcagtactgcagcgccccgagccaggctctgtgcttctgcctttaaggcctgttctcagcacaatgtctcaaaaataggtcatatcctgccactcccgtcgcagagccctttaatggttccaaaccctaagtccacacatagcccctggctctggcatctctccagccccactggccccgagctgcttgactcaccggcttcctatttgatgcacccaggcccccttgtggccaactccctccccttctcactgaggcagaagcactgaggtgggctggacatgggtgccctccacgtccctcatatccccaggcacactctggcctcaggttttgccctggccatgtcatctacctggagtgggccctccccttcttcaaggccttgaatcaaaagccacttttgttaggcgaggatttcccagaccactcatcacattaaaaaatattttgaaaacatgcagtacaaaaaaaaaaaaaa

SEQ ID NO: 46784 - DNA, 1613 bp, Homo sapiens
  misc_feature (1)...(1613): n = a,t,c or g
gccgccgctgaagccaccgccgggtgcccagcgccgccgccgcccccgagctcccccgcgcccctgcccgcgggcggccggtgggcagcgggcgccatggccgcgccggagccgctgcggccgcgcctgtgccgcttggtgcgcggagagcagggctacggcttccacctgcacggcgagaagggccgccgcgggcagttcatccggcgcgtggaacccggttcccccgccgaggccgccgcgctgcgcgctggggaccgcctggtcgaggtcaacggcgtcaacgtggagggcgagacgcaccaccaggtggtgcaaaggatcaaggctgtggaggggcagactcggctgctggtggtggaccaggagacagatgaggagctccgccggcggcagctgacctgtaccgaggagatggcccagcgagggctcccacccgcccacgacccctgggagccgaagccagactgggcacacaccggcagccacagctccgaagctggcaagaaggatgtcagtgggcccctgagggagctgcgcccctcggctctgccacctgcgaaagggacctcagggctatgggttcaacctgcatagtgacaagtcccggcccggccagtacatccgctctgtggacccgggctcacctgccgcccgctctggcctccgcgcccaggaccggctcattgaggtgaacgggcagaatgtggagggactgcgccatgctgaggtggtggccagcatcaaggcacgggaggacgaggcccggctgctggtcgtggaccccgagacagatgaacacttcaagcggcttcgggtcacacccaccgaggagcacgtggaaggtcctctgccgtcacccgtcaccaatggaaccagccctgcccagctcaatggtggctctgcgtgctcatcccgaagtgacctgcctggttccgacaaggacactgaggatggcagtgcctggaagcaagatcccttccaggagagcggcctccacctgagccccacggcggccgaggccaaggagaaggctcgagccatgcgagtcaacaagcgcgcgccacagatggactggaacaggaagcgtgaaatcttcagcaacttctgagccccttcctgcctgtctcgggaccctgggacccctcccgcacggaccttgggcctcagcctgccccgagctcccccagcctcagtggactggagggtggtcctgccattgcccagaaatcagccccagccccggtgagcccccatcctgcccctgcccaccaggtactgggggcctgtggcagcaagatagggggagagagacccagagatgtgagagagagtcagagacatgagacagagagagagagagagagacacagagangagacagagagagaagcgaagcgaagcgcgcggcagccgcggggcgagggcctttgctgctctgccggggcctgctgactgaaaggaatttgtgtttttgctttttttccaaaaagatctccagctccacacatgtttccacttaataccagagaccccccccttcccctcccccttcccctcccccttgggacgcgctctaaataattgcaataaaacaaacctttctctgcaaa

SEQ ID NO: 46785 - DNA, 528 bp, Homo sapiens
gcagaaaaccctcgtggatgtgactttggaaaacagcaacattaaggatcaaatcagaaatctgcagcagacgtatgaagcatccatggacaagctgagggaaaagcagaggcagttggaggtagcgcaagttgaaaaccagctgctaaaaatgaaggtggaatcgtcccaagaagccaatgctgaggtgatgcgagagatgaccaagaagctgtacagccagtatgaggagaagctgcaggaagaacagaggaagcacagtgctgagaaggaggctcttttggaagaaaccaatagttttctgaaagcgattgaagaagccaataaaaagatgcaagcagcagagatcagcctagaggagaaagaccagaggatcggggagctggacaggctgattgagcgcatggaaaaggaacgtcatcaactgcaacttcaactcctagaacatgaaacagaaatgtctggggagttaactgattctgacaaggaaaggtatcagcagtttggaggaggcatcagcagcctccg

SEQ ID NO: 46786 - DNA, 1221 bp, Homo sapiens
tttttttttttttttttctgggagaacaatggctttattcagatgttggtgcctctgcccctctggtgcccccgatccccacaaggggccgcgaggcgggcaggtcacagcaggttgaagtcccctttgtgctgttccagccactggtccagcgtcagggccttggggttgagtctcagggtcagctcgatgtcacggtcgggtctcagggcatagaaacggaacatgttggccaggtcccgggcaccgggaaagccaagcttttcgtagtcctcaggagtcatcttggcatcgtgcacgaccttgcgggtgtgcttggtgagcagggcagcgtactcctcggccgtgtgcctgcaagtgctcagcccgatgttctggccgacgtatttttctggcatcttcaaaaggctgagcaccacaggacccaggtcagacacggacatgccatccatgggaacgtcacctgtgggcaagctcagcaagtagctctttccgtctggggctttctggggcaagaagtgggagaggaggttctcaaaatagcagggcagccgcacactggtcatgggaacgccaatgtcccggaaatattcctccacctcccctttgccgtcaaagtgcgcggcggccaatctccctgccgtcagcttcttgatgttctccaggccgctgtagaccacatagtggaggcccagtttcttgtccaccatgaggacgagaatgggacgaatccggtccagagatcggctggagtgacctcctgctcctggctgcagctctcccagtaattggtcacgatgaaggtggcgtaagccccattcagggccagctccatgatgacctggtcatcttggtctccctgcactacttctgcaccttgcagcctcagctcctttgctgccttcttcctagggtttcgggtcaccactcgaaccttgaatgtcccatcttccaggagtatgcgggccacggagccaccctgggcacctgtgcctccgaaaaccaccaccagtttcttgtccaccatgaggacgagaatgggacgaatccggtccagagatcggctggagtgacctcctcgccgcggcctgggggggacaagttccaggagcccgggaccccgattctgcggccgagtccactgcagaggcggggatggagctgcgctgctaggcgccaactccctccccgcagctccggccccacctggcagagcgccgc

SEQ ID NO: 46787 - DNA, 968 bp, Homo sapiens
atccttatggacccctttgatgatgacctgaagcaaagaggggagaagagtggaattgagatcttatccctatatgatgctgagaacctaggcaaagagcacttcagaaaacctgtgcctcctagcccagaagacctgagcgtcatctgcttcaccagtgggaccacaggtgaccccaaaggagccatgataacccatcaaaatattgtttcaaatgctgctgcctttctcaaatgtgtggagcatgcttatgagcccactcctgatgatgtggccatatcctacctccctctggctcatatgtttgagaggattgtacaggctgttgtgtacagctgtggagccagagttggattcttccaaggggatattcggttgctggctgacgacatgaagactttgaagcccacattgtttcccgcggtgcctcgactccttaacaggatctacgataaggtacaaaatgaggccaagacacccttgaagaagttcttgttgaagctggctgtttccagtaaattcaaagagcttcaaaagggtatcatcaggcatgatagtttctgggacaagctcatctttgcaaagatccaggacaagctgggcggaagggttcgtgtaattgtcactggaggctgccccatgtccacttcagtcatgacattcttccgggcagcaatgggatgtcaggtgtatgaagcttatggtcaaacagaatgcacaggtggctgtacatttacattacctggggactggacatcaggtcacgttggggtgcccctggcttgcaattacgtgaagctggaagatgtggctgacatgaactactttacagtgaataatgaaggagaggtctgcatcaagggtacaaacgtgttcaaaggatacctgaaggaccctgagaagacacaggaagccctgggacagtgatggctggcttcacacaggagacattggtcgctggctcccga

SEQ ID NO: 46788 - DNA, 1079 bp, Homo sapiens
  misc_feature (1)...(1079): n = a,t,c or g
gctcgacttttttttttttttgccacatatatgtttattctgcgagtccgtgtcccacagtctgagactcttcttcccctccccttcccgccccgtgaagtggcccggggcgaggcccccatccatcttggctcagccaattcccacccagtttccaggagtctcatttgcatttccgggagcagctgtccaatgggaaggcagcaccctgcccccccccacaagggggcggcactcctggtggatcgcaccactcttgggatccagggatggggggaacgggcttccactgaggtccgggtgacaggagggtggtcttccctcaaggcagggttggagttcagtggaggagggagttctggccttggaagaggcccagcagtccgctgtctggggcgggctccttgatgagtttctggatctccttgaactgggggtggacggcatcgcccacaagctgcagaatgagcccttcgctggtggagaggaaggcaccactctgtctcatgcgggccagagccaccagccggtccacctggctgcgtgaggagcaggcgtccaccaccacatggacctgcagcccccggtctaggaggtccagggtcgtgttcaagatgcaggcctgtgcctcaatgccacagagcagcacagagcgcagctggggccgactgtccagctcctgctgcaagggcaggcaaccatgctgaagcaggtcttttgccaagccgcgaaggccctcagtccccagcttcgggcaccgtggggcccaggccttgtgggtacttgctccgtcagcatgactggcacctcaagcagccgggccaccttgagcatgcgggcagccactgagacgatctgtgggaagtaggcgatgttgtggcggaacttctcctgcatgtcacacaggaacaggacagaggatcctgggaggagcntcgccaggctgggcctgcagccgccattttccggaaggtgcgggttcgagcccggaacggcccctctgcaggtgaggcgggggcaccctcactctcggcgctcggacgccaccnctgagnctcttgcgggcttcncagggctgg

SEQ ID NO: 46789 - DNA, 419 bp, Homo sapiens
gagtaaacactgaccctttccccctttgctgctacctaggcagatgccagccccaaacctcatccctagtggaggccttgctgatgtggaagtggccagggccctcatggaggctgggcagaagcccaagagcaggctctaaagctgccaaacccggcagccctggtccccggaggctcttgccagtctgacagtgttcttggcactgctcagaggtgagtgtggctgagtttagcaactcccctgggctagcgttaatgctggggtttcctctcctgtgcccagggtctctctatgtaggacagctagggatctcgtcctgtccccaggaccagctcggtaaccaaggacaggttcctgttgctgtggctgttttaatttggtaaaagtgaggggttggctgccttgggtgagtttct

SEQ ID NO: 46790 - DNA, 3308 bp, Homo sapiens
  misc_feature (1)...(3308): n = a,t,c or g
cgggtcggagcactcaccgccgctgggggaccctgtcggaagcaactgccgccgccgcctctttcatctcttctggggcaggggcagggcaggttttacacatccataagtagacctttttggagcctcaccagccaattcaatggcgtcctcttctactgtgcctctgggatttcactatgaaacaaagtatgttgttctcagctacttgggactcctctctcaagagaagctgcaagagcaacatctttcctcaccccaaggggttcaactagatatagcttcacaatctctggatcaagaaattttattaaaagttaaaactgaaattgaagaagagctaaaatctctggacaaagaaatttctgaagccttcaccagcacaggctttgaccgtcacacttctccagtgttcagccctgccaatccagaaagctcaatggaagactgcttggcccatcttggagaaaaagtgtcccaggaactgaaagagcctctccataaagcattgcaaatgctcctgagccagccagtgacatatcaggcatttcgggaatgtacactggagaccacagttcatgccagcggctggaataagattttggtgcctctggttttgctacgacaaatgcttttggaattgacaagacgtggtcaagaacctttgagcgcactgctgcagtttggcgtgacatacctggaggactattcggcagagtacatcattcagcaaggtggctggggcactgtgtttagtcttgagtcagaggaggaggaataccctggaatcactgcagaagatagcaatgacatttacatcctgcccagcgacaactctggacaagtcagtcccccagagtctccaactgtgaccacttcctggcagtctgagagcttacctgtgtcactgtcggctagccagagttggcacacagaaagcctgccagtgtcactaggccctgagtcctggcagcagattgcaatggatcctgaagaagtgaaaagcttagacagcaacggagctggagagaagagtgagaacaactcctctaattctgacatttgtgcacgttgaagaaagaagaggtgcccgagncattggaaanaggttgcttgtgcttnctgtggtctttgcaagcgcggaacttgcaaagaggcactttcctgaagccccagttcccttgcttccacatatcattgcnacttccctgcttggggacaagggaacttgacacagaagtgatcacagttgagaaatccagccctgctacatctctgtttgtagaacttgatgaagaagaggtgaaagcagcaacaactgaacctactgaagtggaggaggtggtccccgcactggaacccacagaaacgctgctgagtgagaaggagataaacgcaagggaagagagccttgtggaagagctgtcccctgccagcgagaagaagcccgtgccgccgtctgagggcaagtctagactgtcccccgccggtgagatgaagcccatgccgctgtctgagggcaagtctatactgctgtttggaggggctgctgctgttgccatcctggcagtggccatcggggtagccctggctctgagaaagaaataggaggcttttcagaagagaaagacagaaggatgtaaggttggagttgtattggctggaatttgaacctccagcagctgtctggacatttgtggaacactctgggataattggggacttctgctcaacatggcagtggcatgttaggcatgttagggcttgaggtggggcattcacattcatctgactgtaaatcccaagggcctccgctcatgctaaattgagaatcttaggggtaaagcaccccctccaggaccgggtttctcagccttggcactagtgctgttctgaccattctctgtgttggggctgtcctgtgtgtggtgggctccacccactagatgccagtggcaccccctcccagagatgacaaacgaaaatgtctcttagacattggccaaatgtcccgtgtgaacatcccctattgagacccactgctttagcgagagagggtttacttaggaagaattgggatagaaattcccagctgagagaacttagctgtgggctcctcagctactgacttcttagctcttaatccccttagaatttcatctttctcgatgagcaggctctgcacccactctttttttgccccccgccctcatcctggagtgtgagggtgctcgcccgtactctcagctgcctctcagggactgcactgttcctcttcacccccaggttcctgctaagatcccacgggcgagggcttgctctggactcagtctgtcaagtccccgaagcttcctgcagctccaccttgtaaaaatgctgcctttgggaatcttcgaaatatgtacacagagaaaatcacatgaaggagacctggggtccccacttgtgagtgcaactgcaagtaactctggctagagagacacatgtgtcttgtgtcaaggcaggaggataacctggatgaccttctgaggtctcttcagcccttttcgctagtggtcacccaccaccatggttacttgccagcaacatctctattgctggatggtccctgtctataaccttgggctagtatattttttccaatatgggaccttagtcttactactgatgagttctatgggtctcttgctagggggtaaggatttttattcttgggcttatagagccagttagatcataattcttatgaaatagagagtgtcctaaatatcactgaaataaaaagtaggaaaaagaagcttgaattttaagactgaggctgctctgcagattctagtttggctttcagagttcaagagtggtggcatcttcacctgaattcttcaatgccagggtaataaaccaaaatagtcctaatcagtatatgctagttgagcatcggcataattttctttcctctggctgatcccagccctaaaggaaggggtagaccccgtgtctttccagccctaaaggaagggtagacccgtgtctttccagccctaaaggaagggcagacccgtgtctttccatgcccgagggccacgacgtcactatgcagggcacacgtggcttggtttaaaaaggtcatcttagatttatcttagtaaatgtaataaattattttttagatcttgaaatttataataaaaatactttacctaccctgatcaccaaaacctgatgttttaaatgtgctttctttttgaaatttatgttttcaaataaaatctccctaaagcaatatttaaaaattggtcaaaaaaaaa

SEQ ID NO: 46791 - DNA, 342 bp, Homo sapiens; identical to SEQ ID NO: 18117

SEQ ID NO: 46792 - DNA, 340 bp, Homo sapiens
ggaaagtgataccaacagttttcttgttccttttactgtcttgaatttggtctttaagatagttgagccaccagcccatggtagatattgtagaaaatacagacatactagatagagcatctttccagacagttgatgttctgggtagagaagcctaatatctatgacgtatgaacagtgactttcagcccacacttcatgcctgacattgtgtttactatgtattttacattttatttaattctcagaatgacccaatatgttaggtacttttactgtccccacttgtgcacaagaagaaacagtgacacattaaataactaggccaaggtcaagctgc

SEQ ID NO: 46793 - DNA, 1047 bp, Homo sapiens
aaaaaaggtagaactttagacttcatagcactgaattaacctgcactgaaagctgtttacctgcatttgttcacttttgttgaaagtgaccatgtctcaagttcaagtgcaagttcagaacccatctgctgctctctcagggagccaaatactgaacaagaaccagtctcttctctcacagcctttgatgagtattccttctactactagctctctgccctctgaaaatgcaggtagacccattcaaaactctgctttaccctctgcatctattacatccaccagtgcagctgcagaaagcataacccctactgtagaactaaatgcactgtgcatgaaacttggaaaaaaaccaatgtataagcctgttgacccttactctcggatgcagtccacctataactacaacatgagaggaggtgcttatcccccgaggtacttttacccatttccagttccacctttactttatcaagtggaactttctgtgggaggacagcaatttaatggcaaaggaaagacaagacaggctgcgaaacacgatgctgcctgcccaaagcgttgaggatcctgcagaatgagcccctgccagagaggctggaggtgaatggaagagaatccgaagaagaaaatctcaataaatctgaaataagtcaagtgtttgagattgcacttaaacggaacttgcctgtgaatttcgaggtggcccgggagagtggcccaccccacatgaagaactttgtgaccaaggtttcggttggggagtttgtgggggaaggtgaagggaaaagcaagaagatttcaaagaaaaatgccgccatagctgttcttgaggagctgaagaagttaccgcccctgcctgcagttgaacgagtaaagcctagaatcaaaaagaaaacaaaacccatagtcaagccacagacaagcccagaatatggccaggggatcaatccgattagccgactggcccagatccagcaggcaaaaaagccgaagaagcctgggaatcaagtttgaaacaaagattaataaagttctttgcctagt

SEQ ID NO: 46794 - DNA, 1497 bp, Homo sapiens
ttgtgtcacacacctcatattgattccagtgtgattgattcagatgaaaaatggctctgtcggcagtgtgtttttgcaacaacaacaaagaggggtggtgcacttaagaaaggaccaaatgccaaagcattgcaagtcatgaagcagacattaccctatagtgtggcagaccttgaatgggatgcaggtcataaaaccaatgtccagcagtgttactgctattgtggaggccctggagactggtatttgaagatgctacagtgctgcaaatgtaagcagtggtttcatgaggcttgtgtgcaatgccttcaaaagccaatgctatttggagacagattttatacgtttatatgctctgtctgcagttctggaccagaatacctcaaacgtctaccattacagtgggtagatatagcacacctatgcctttacaacctaagtgttattccataagaagaaatacctttgattcctgaaccttgagccttatgaccatacattaatgaaaactgggatagattgcacccctggagagctggcagacacaccaaaatctgaaagatatgagcatgttctggaggcattaaatgattacaagaccatgtttatgtctgggaaagaaataaagaagaagaagcatttgtttgggttgcgaattcgtgttcctcctgtgccaccaaatgtggctttcaaagcagagaaagaacctgaaggaacatctcatgaatttaaaattaaaggcagaaaggcatccaaacctatatctgattcaagggaagtaagcaatggcatagaaaaaaaaggaaagaaaaaatctgtaggtcgtccacctggcccatatacaagaaaaatgattcaaaaaactgctgagccacttttggataaggaatcaatttcagagaatcctactttggatttaccttgttctatagggagaactgagggaactgcacattcatccaatacctcagatgtggatttcacgggtgcttccagtgcaaaagaaactacctcgtctagcatttccaggcattatggattatctgactccagaaaaagaacgcgtacaggaagatcttggcctgctgcaataccacatttgcggagaagaagaggtcgtcttccaagaagagcactccagactcagaactcagaaattgtaaaagatgatgaaggcaaagaagattatcagtttgatgaactcaacacagagattctgaataacttagcagatcaggagttacaactcaatcatctaaagaactccattaccagttattttggtgctgcaggtagaatagcatgtggcgaaaaataccgagttttggcacgtcgggtgacacttgatggaaaggtgcagtatcttgtggaatgggaaggagcaactgcatcctgactgtaggactgaacattatgttcactgcactctgattttctgtaggtacagttcaaagccctaaaggagtctggcttttactatctttcttaaagaaaaaa

SEQ ID NO: 46795 - DNA, 786 bp, Homo sapiens
tccttaggatacttctgaactggtgaggtatgctcacacttgaggtttcctctaaaagttatttttctactttcttctgctaccaaagcagttgccgctacagattgaattcacttgggccatccatgggttactgggttaaggatttttgataggaaggctacgggttatcagtggcctcagtgctttcgggatacgcccttgtttacactgactacactgacaacaaagtggtattggagtgttatagggttatggagaatacctttaattatcaattataggttttaaatttaccttggcttttaaaggaatagggtatactgtttttttcttaagtacttgtatatttctttctctttttctctctttgactttctgtctctctctctctgactttccttttgcctctgtctcttcctctttctgcctctctctttctctggtctctctttctcttttcttgactccttctttgtctctctgtctcttcctgtcttttcctctctttgtctctgctggtctttccttgcctctgccagccgcttatgctgctgttctcttaactactgtggcggggaagggggtctaaaaccagctgtaactgtctatgtagggaaactggtctgggtgccttggcttacaggttaccttgtgccatacctttgaaacaagggacctgtctaggcttccttctgatggccaacccacctctaatgctggccagtctatttcacacaaagttctaagttttcctggtgtcatagtaacaccgtaatctcccta

SEQ ID NO: 46796 - DNA, 1976 bp, Homo sapiens
ggcacgagggaaagtgcgacacacttttatccgaaaggtttactccatcatctccgtgcagctgctcatcactgtggccatcattgctatcttcacctttgtggaacctgtcagcgcctttgtgaggagaaatgtggctgtctactacgtgtcctatgctgtcttcgttgtcacctacctgatccttgcctgctgccagggacccagacgccgtttcccatggaacatcattctgctgaccctttttacttttgccatgggcttcatgacgggcaccatttccagtatgtaccaaaccaaagccgtcatcattgcaatgatcatcactgcggtggtatccatttcagtcaccatcttctgctttcagaccaaggtggacttcacctcgtgcacaggcctcttctgtgtcctgggaattgtgctcctggtgactgggattgtcactagcattgtgctctacttccaatacgtttactggctccacatgctctatgctgctctgggggccatttgtttcaccctgttcctggcttacgacacacagctggtcctggggaaccggaagcacaccatcagccccgaggactacatcactggcgccctgcagatttacacagacatcatctacatcttcacctttgtgctgcagctgatgggggatcgcaattaaggagcaagcccccattttcacccgatcctgggctctcccttccaagctagagggctgggccctatgactgtggtctgggctttaggcccctttccttccccttgagtaacatgcccaagtttcctttctgtcctgggagacaggtggcctctctggctatggaatgtgtgggtacttggtggggacggaggagctaagggactaacctgttgctcttggtgggcttggcaagggactaaggctgaagatgtgtcttctcccccgccacctactgtatgacaccacattcttcctaacagctggggttgtgaggaatatgaaaagagcctattcgatagctagaagggaatatgaaaggtagaagtgacttcaaggtcacgaggttcccctcccacctctgtcacaggcttcttgactacgtagttggagctatttcttcccccagcaaagccagagagctttgtccccggcctcctggacacataggccattatcctgtattcctttggcttggcatcttttagctcaggaaggtagaagagatctgtgcccatgggtctccttgcttcaatcccttcttgtttcagtgacatatgtattgtttatctgggttagggatgggggacagataatagaacgagcaaagtaacctatacaggccagcatggggaacagcatctcccctggggctttgctcctggcttgtgacgctataagacagagcagggccacatgtggccatctgctccccattcttgaaagctgctgggggcctccttgcaggcttctggatctctggtcagagtgaactcttgcttcctgtattcaggcagctcagagcagaaagtaaggggcagagtcatacgtgtggccaggaagtagccagggtgaaagagagactcggtgcgggcagggagaatgcctgggggtccctcacctggctagggagataccgaagcctactgtggtactgaagacttctgggttctttccttctgctaacccagggagggtccctaagaggaaggtgacttctctctgtttgtcttaagttgcactgggggatttctgacttgaggcccatctctccagccagccactgccttctttgtaatattaagtgccttgagctggaatggggaagggggacaagggtcagtctgtcgggtgggggcagaaatcaaatcagcccaaggatatagttaggattaattacttaatagagaaatcctaactatatcacacaaagggatacaactataaatgtaataaagtttatgtctagaagttaaaaccctgaaaaaaa

SEQ ID NO: 46797 - DNA, 2157 bp, Homo sapiens
agaggcctgcgcccacaccctctcctgtccagccttcgcccgcctgggcagggcccggcgccgtccgtggatgagccacagaacctcttccaccttccgagcggagagaagtttccattcctcttcttcttcctcctcctcttccacctcctcctcggcctcccgtgccctcccggcccaggacccgcccatggagaaggccctgagcatgttttccgatgactttggcagcttcatgcggccccactcggagcccctggccttcccagcccgccccggtggggcaggcaacatcaagaccctaggagacgcctatgagtttgcggtggacgtgagagacttctcacctgaagacatcattgtcaccacctccaacaaccacatcgaggtgcgggctgagaagctggcggctgacggcactgtcatgaacaccttcgctcacaagtgccagctgccggaggacgtggacccgacgtcggtgacctcggctctgcgggaggacggcagcctcactatccgggcacggcgtcacccgcatacagaacacgtccagcagaccttccggacggagatcaaaatctgagtgcctctcccttccctttccctgtccccccgccccacgcctgccagcaaagcctcgctaaccccattacaacagctccaggacatctcagcccaggttctagcccccacgcaccccagaccccagggtggaccatcctcccaaactagggccctccactctatccagggcaggccagggactccctggcctgaacaacatggatggcccagattttcagatttggcctccgtcactttaatccagagtacaggggctggggtcagggaaggaagatctaaagaacccactgtgggtcaggggaatgggaccagcaggacatatgggcaagctctgcaggacagacagacagacaaaccctctgatctatgaagtctctgcagggcaaggggaccagggacctggaaccctcttggccaaggggagtgggagggacagagggaaggtcacaggcaagggtgcctatctaagtggaactaattgcccgagggctcagcaaggccaagaggagacagccgtgacggtaaacttcccctctaccagcctccaagccccacgccagcgagcaggctgcctgcccaccccgtgccccacagccagctggctgtgccagggcagagccatgccacatctgtatatagatggggtttttccaatacagctggttcgtgataaactgcatgaaactcctgccgtcctgcgcctgctggggcctccaggcaaggccaagtggggttgggggtggggctggtccttctccctcccacaggcctgtgttcttggggctgctcccatgcagacaggatcacctaacagagatggaagccagggcatggatggggctttgggtcctcgaggttggaccccagcttcttgccaccttcccctccgggcagtcagctctccatccatccccctctttaatctatgaatctataggctcggtgtgtgtaacacacacacccctatcgttgtccttcaaatactcagcattaccattggttgaggccaaattcagagctttctcaaatcagatttacaatctccattttcattaacggggaaacatccccgagccactgagtgctgtgctttgtcactgaaggttagatctgaacccagggtgtcaacagctgctctcaactccccacctctgggcactgaggagtatttcccctcattctacctctctaaaggctatgcaaccctccccacgtcttccagctgggggatgggggggagtcataggaaaagcccccatctcccatctgggatagggaccttccatcagccttaaccctgggaaatgcctgctgcccccaatgactcttggtttcgtctcccacatacagaagcagggtggaggggaagggtgggtctcagttagcaggggtccccagggcaagtcagcctcctccctccatgcctctctggtcagtgtgccttagggtggcctctcactcccaccactctgggccccttgggggaggactggggagggggccgtgggagagccctgacgctggaacctgtatacacaataaaggacagtctcacagaaaaaaaaaaaaaaa

SEQ ID NO: 46798 - DNA, 1097 bp, Homo sapiens
tttttttatcatttagagttgtgagtgaattgcatttttatttacgtttaagagtctctctccctccttgtgttctagtctgtgaatggctcacacttggacttagtgtaggctcctatgggaggagcgggcggtagtgagaatcttcatcaaatggagtaacatgacccaaatctctagaggtttcataattttgctcttgcttctaaaaacataatcatctcttatggggtgttatgtgctttgtatcctgaaattttccactttgctgcttcttggtgtgaggcgagaaatgccaccacgtggcacttgcaggaggagactggtggaagccacagggctaggcctttcacttcccagtgacactgttcccaattccctccaggataagctgagactcctcaggatgtggttctgcagcagatgaggtgcgaacaaagcctgctctgccctgggcacccaggatggcactgagttctaaaaggcaaagggtatgtggtgaggggccaggctgaggccctggtgtggtaccatcatgggcagcagcaccatttgaggccgggtaggagagacgtgccagggcctggccccccaagagaccagcagacaaactgaggcggcagagagagagattccagtgtcaccaggaagactgcagatcataacaacaatggttgctgatttggcatcaaagaggtggcaactgtcaaagccgtaattgctgaaaatggcaccaacatgctgcagctggagagagtgggtgacccaacatttgtttgaagaacagatgatgctctttgaatggctcagccaacagcccaaagttttaagggaagacctctctgccagcttctcttggacagtgtctcatgtaaaacctccaaggcacttacatagcatatttttgtgtccactctcttgctagtctgttgtacttctctctgtcggccttgtaggtgtgtgctatctctggcaccagggggtcatcggggttggggtcgcagagcagcgagcagatggacaagagaacttttgacacagtcaacgctggagaccactgagaccgcaggatatcaaggcagatgctgccattgctg

SEQ ID NO: 46799 - DNA, 1084 bp, Homo sapiens
ttccccttgctaggctggaggacacacctaaacatgtggaatcccaatgccgggcagccagggccaaatccatatccccccaatattgggtgccctggaggttccaatcctgcccacccaccacctattaatccaccctttcccccagggcccctgtcctcctcccccagggagctccccatgggcaatccagctttccccccagggtggggccccctcattcctgttgccacagccaagggtatccaggatgccaaccgttgggtccctaccctcctccatacccaccgcctgcccctggaatccctcctgtgaatcccttggctcctggcatggttggaccagcagtgatagtagacaagaagatgcagaagaaaatgaagaaagctcataaaaagatgcacaagcaccaaaagcaccacaagtaccacaagcatggcaagcattcctcctcttcctcctcctcttccagcagtgattctgactgaatacaggccctggacccttccctcaagtctcaccagttctgctctcccatcaagcttcagatgccatgttgtactgggggaatgtagcccttgtgctccccaccccctacctccacctgagcctcaccctgctgttgagccctgaagtggctaggggaaatgggaagaggattgccatggcctggccatcttgttgctgcttggttagatcatatagctaatgaattaggcaggggagctattttttgaagatgatgaacctaaatgttgaagacaagtttgagatctgtaaaatgtgattttttacttccacttataatacttgtgattggggaggtttgtggaaattcaattatgatgaaaaacctctatcttttttgtaatgttggcatacttggggaatttagtggaaaatacattccccagcaggccttttgttggttgcactaactgcaaggttgctgggaagtagagtctgtttggtcgatgagctttgactgcggttttggaaccttacctctcctccttagcccaatatgctgtcttgggtcctattcaaataaagttatttctcctggtctcaaaaaaaaaaaaaa

SEQ ID NO: 46800 - DNA, 3160 bp, Homo sapiens
tttttagtgtggaattgttttttttaaaactgtgtgtaatacaaatccagccaaaacaatagtgcaaaaagttacaaagcaacaatctcttgggctaatgcagtataggctatacagaaacagccacgatgaaatgtgcagatcaggcacggtcgaataccaaggaaccaaggagacggttaatatttcaacccacagtttgtgttttggattttttcccccaaaatttccatacaacaaacagacatctagatcaacccagcaagctatggtggaagtgtgcagtccagaagagcccatggagaaacaagtctcctgaggccatgaagatccgcaacaggctgagtgagagtagcacttggaacatagccacgttctgtggtggaggaggtgggcctcgttagactgctcagattactggaacctcgttatcacatcccattctacaagtttttcactgaatgtttcctgacatctataaatgagggtgcctgcccatgttaatgctgattaaaaaacacaagtacacaaatctatctccttcattgctggtgtatggacccagaacaccatcacaaaatatttccttggcctaaaagatcactggattaacaaggagttttaacagaggaacaggagtgctgtactgagaggctttcgaagggaaacacaggtaccgccatttccgatgagtttctgaaaatgctagaaaaatgacagactgccaaagacagctgtcatgctgttctccatgataacggcactaatattaaaaaaaataagaacttttaatgattgtaatgtatacagtttgggctgtttggcaaacccctgcagatgtgcattaatgatgctttatttaaaaacaaaaaaccaaaaacagtccatgttgaaattgatcagtgtaagttaaatggtggtttttaggctggacccatgatttaagctgtacccatccagctcaaaccgaaaaaaaaaaatcatttgactgttaaagcaattgttcagagtcttgaagaagaaaccaggcaggaaaatgccaataatgatgattggcgaaatcaaaatcgaaaacaaagaaactgtttatcaagccgccgacaaagaaatcttgcatggagactacaagtctggagtttctgggatgaaattgtacaggaatctcagtccacagtttcctcaatcgctgcggagacggagctgtcactgaatctgacagagccctgcactccccggtccgccgaccctttctgtaatccagtcttcactgtagcctgaggaactgtttcaacctgctcctttttgatcttcttctttggcacaacctcagtggatttctctgattcagaacgagttctaattgatcttctctgttgcttcttttctactgagcctgtagaaccagatgttgcttcaggagatgatacactctgcgttggcttttcatttctctggtttggtgtagaaattataagcctgtcttgccccctgacacttatttctgttttgttaccaattccctttgttgaataaacaaattgatcgataaatttcccatcccctgtagcattctgaagagcaaacacttgttcaattttcacaactggagacatgttacacttctgcaaatccaggctccctttgtgcatcgtaatggaagctggtaaggatttcctttgctgccgcagttttccaggctattttaacaggcggtggctcttcctcttccgcacttgtgtgccgcctctggctatgtctccgaatttcagtacttgagagtgaggaggccacctcccctgcattggtctgttctggctgagtattcagcacagatcttggtcgtcgggtttttttaacttcggttttggaggcaacactcttttttgccttgggataaagcctcttcaggctgtttatcaatgtaaataaaagtatactgttctattctttcttctcgagtcattttcaatgctttctctgcatgggcaatgccaatatcccactgagcacgttctctctgaggtcggggtttccgaatcttttgtttctcagagtgattgctggcttgtttggttgcctcagccagtaattcttcatactgtttatgacctttatactctcgtacccgtttttcatgaacccacgccctctctggctggttgctaaaaaactggacatgatattctcgggcacctcttgtgttaattttagtatgaacctcaagctggggatcacttgaaaccatacaaggccaccaaggataggttcccaccttggaccacacaagatcgccaacctgaaacttaacaccagtggacacttccgttgttggaacagaagatagtattggctgaactggggcttcctcttttagtactggttcttcccttggtttttctgatacagtgtcaaccctctcatttggtctattttgttcctctggttctaatttggggattttgtgtgacttgcgctcttcagatcttgatgagtcatgcttgttgctttttttcctcttttcttttctgctttcatgctttgatttcgtgtgctcacttgcctgtacttcatttaaaaggtctccacaaagggaagactcaaacaattccctgccattctggatagttttggttatttttagtttaatttcaggtgagccagtcttctttggaatcacagtttgtggtaccgaagacggaggtggtggctgtggaggggaaggtttttccagaatttcatgtggtcttgtgtttggaatttctgaatgataatagtcagtggggctaaagtttctaactgcaccaaagccattggctgacccattaggatactgattatatgactggtatttggtttgagtttcatacacactgattgatgatggatacccatttgtgagtggaggaagatcttctgttgtagctgggtactgaaagccttgctgcaaagtagcttcatatggtgtctggccaccatcttcagcaatgtcactgttgttatcaaaggcatcctcctgacggatgttggcggagtcaatgagttgaggtggttgctgaattgtgtttcccatgatcccttgcatgaaagagaaagagaaatccattgttctgctccagcatccttaactttccctttctctcatcgggccttcagtttgttc

SEQ ID NO: 46801 - DNA, 2548 bp, Homo sapiens
ttttgtatacattacttagtattcacgacttctatgaaatctgtaaagaatagtgacgtgacatgtaaacttttaagtagtaaagtcttggactttaaaaggtgtttttcacatccaatataacttactttaaaacaaattatttcagaagattatctaagtgtcacaaacaagcaacatatatatactgcaattttatttcaatcgcacaaacgaagttagcgtgtaggaaacttaaatgaaacaaatttaaacgaaatagttacggtaaaaatagcagaaaactgaaaattctaaaaaggaagtacacctaaaagcatgagaattcaacattcattagtgtttcatcttcagttttgattgacacttgatgcttgcaaatttttaaacaaacttttaaatcatgatgactattctgaagagatttcagcaccagcactaagatttgtacattcagtttgtttgcaattgacttgtgagccatttacatagtggatagtacagacttgtcacaggtcagatcacagtgttgaggaaagcagtgccttcctgtcattagaaaggatcccctaaactgtactcagcttaagacatccaacgtacaagagcacaaaaaccatcataataatgtggttccaaggaacgtggttttgataaggtaaataacttaggcttctgtttcccattttaattactgaaatctctaataatgacacaactgtcatgtatgatagcaaatgtatataataattcattcagacttcttggaaagaacatttagcaatctgggatgatgggaaatatagcatgattcaacactgggttttttttttttttttttttttgtcagtttacacatacatcatgttaatattagaccaaggcacaaaacgtttagtgcataaacccagtttcttttaagatttagcattttattttagtctcttatcttagtttggaccacttgtacccagtactctacctactacagactatttaacttacccaacaaaatcaaaagaggttgctgaccagatttataggggacataactgtttatattatcaaagtgtttgcataaccaaaagtacaataataaagatgaaaatgcctcctatttcttttagaaaataatacttaataagcttgctgcatctttgatgtttttactactactgcatgacaatgaatatctgatagaaaaaagaaatgtatacttgaattatgatagctcatccatcacagtttaatctaaaaatgaaatttctacagaaacaggaactattttgacaaagaaaaaaaaaatccctcatccaaacttctttgtagtggtaaaggctgcaaatttgcagcgtttagaaaactacactatcaacaagctttgctttatggactgagatgtacaaaatctagaaagcagatgaaagtgaattatttcaaagttttagtaaaacttctgataatcagagttcaaagcaaatatggcacataacaactcaagcataaatcaagatggagagcctggagagtttcttaaattttccaaaaagctatcattccaacatgtaggatttctcccctattttaaccttaccagtttcaaaggaaagaaaagggagtggcttccatatagacagcacgtgcgcgagagcacacacacgcagagtggcaggcagagtgtctaattccttcttcccaccttccttcttcccaccacccaagtctcactttacttattaaaagaaaactgcagaactcctcattggttttcctttacctaatgatttctgtgaccttaattgctgccatcattgttatttcttgcatttcaacataacaaaattcaaaagcagcttcattcaggaacacgtatctaaacacctgtgtaaacagcgggggtacctaggtaataataactgccaaattcagtgatcaaacttttgagttccacagttaagatattatgtgaagctcagaatcatgtttcagaccattgaaattactggttaaaatacaaatagctgaagacatgatgtaaaagattaagtacttggttttgtaacatatttaccaattaaagtcacaaaatatttctcattatttattcatgcaggtaactgagaaaaagatagtgcagaaatcaactttaaataaaaaattattcctccccttcctcccactcccctatactctacaaaatgttttccctgggactaggccttgaaaaggccactacatattagtgtgacatgcattactgtctgcaattaaaaaagctaaccttgtggtgattgtaattacattataaaaatgtccacatgcataaatctaaaaaaggttgaaaacctacagtaaatctacaatatagtgtttacatttgaccactggtttgtgttatgtagaagtcatagatttggtaaagcattgtaacaatttaggaaggcatctaaatctttaagttctggacaaattttatgttttaatctacaaaattgcatgaaggctaactcgagaaacttcctatcattctaaaatttctcaagctgaa

SEQ ID NO: 46802 - DNA, 2076 bp, Homo sapiens
gagttatggagggggcgggctctgcagggaagtgcgtcagaggaggcgcggggagagtagggtgctgtggtctgagctagagggtgaagctggcggagcaggaggatgggcgagcagtctgaatgccagaatggataaccgttttgctacagcatttgtaattgcttgtgtgcttagcctcatttccaccatctacatggcagcctccattggcacagacttctggtatgaatatcgaagtccagttcaagaaaattccagtgatttgaataaaagcatctgggatgaattcattagtgatgaggcagatgaaaagacttataatgaatgcactttttccgatacaatggcacagtgggattgtggagacggtgtatcaccatacccaaaaacatgcattggtatagcccaccagaaaggacagagtcatttgatgtggtcacaaaatgtgtgagtttcacactaactgagcagttcatggagaaatttgttgatcccggaaaccacaatagcgggattgatctccttaggacctatctttgggcgttgccagttccctttaccttttgtgagtttaggtttgatgtgctttggggctttgatcggactttgtgcttgcatttgccgaagcttatatcccaccattgccacgggcattctccatctccttgcaggtctgtgtacactgggctcagtaagttgttatgttgctggaattgaactactccaccagaaactagagctccctgacaatgtatccggtgaatttggatggtccttctgcctggcttgtgtctctgctcccttacagttcatgggcttctgctctcttcatctgggctgctcacaccaaccggaaagagtacaccttaatgaaggcatatcgtgtgggcatgagcaagaaactgcctgctttacaattgccatttttatttttttaaaataatactgatattttccccacctctcaattgtttttaatttttatttgtggatataccattttattatgaaaatctattttatttatacacattcaccactaaatacacacttaataccactaaaatttatgtggtttactttaagcgatgccatctttcaaataaactaatctaggtctagacagaaagaaatggatagagacttgacacaaatttatgaaagaaaattgggagtaggaatgtgaccgaaaacaagttgtgctaatgtctgttagacttttcagtaaaactaaagtaactgtatctgttcaactaaaaactctatattagtttctttgggaaacctctcatcgtcaaaactttatgttcactttgctgttgtagatagccagtcaaccagcagtattagtgctgttttcaaagatttaagctctataaaattgggaaattatctaagatcattttccctaagcattgacacatagcttcatctgaggtgagatatggcagctgtttgtatctgcactgtgtctgtctacaaaaagtgaaaaatacagtgtttacttgaaattttaactttgtaactgcaagaattccagttcagccgggcgaggattagtattatttttaactctccgtaagattttcagtaccaccaaattgttttggattttttttctttcctcttcacataccagggttattaaaagtgtgctttctttttacattatattacagttacaaggtaaaattcctcaactgctatttatttattccagcccagtactataaagaacgtttcaccataatgaccctccagagctgggaaacctaccacaagatctaaagttctggctgtccattaacctccaactatggtctttatttcttgtggtaatatgatgtgcctttccttgcctaaatcccttcctggtgtgtatcaacattatttaatgtcttctaattcagtcatttttttataagtatgtctataaacattgaactttaaaaaacttatttatttattccactactgtagcaattgacagattaaaaaaatgtaacttcataatttcttaccataacctcaatgtcttttttaaaaaataaaattaaaaatgaaaagagactc

SEQ ID NO: 46803 - DNA, 1098 bp, Homo sapiens
ttttcattcatagagaagctcaggtgtcatttttattctgtggttttaaaatgaaataatcttggttagtcacttacaactttgacgactttaaccacctgatgaaacctaccagtttctgcagcctcaggtctccataagggtcttcttaaattggctcctcctcatttcaccaccagcttttggggcccaaggtcctaaggttgtgttcttgaagccaagttcccacattaatccatgttaaccacatgtggttaaacccctgtttaccatatacagatctatcaggcttggtgctacagagatgaggaagacagtccaggcctcccgggggcttagagcttgggggtgagagtgggggtggcagacgttaacaaaatctcccatgcagtgtgatcagcattggcactgcgctgctgtcaccaaggttgatggcctcggattcccctctgcatccaccggtgggacagctggggttgcaggattgagaggaaccctgccagctgctctgcatcccaaggctctgaggctgagggagtcacgtgcgagatgttaggtccaaaccagcccgccctaagtagcaagaatctagaacctgaaggaagctggtgcagtgtccatcaaatcagtttccacaaagctactccccgtctgcagctcagtttctgtgagacttgcccgaggtcttttagaggcttaaaatggttggctggtgtcggattccctgagaagcagcagttaggaagcgtggttcctccagcacttagatggttttctgaaattgctcaagtatttcttcataatcatgttcatcatcatctagatcctgcctttggggcttagcgggcctgtggcccttcctgtgggcaggaatcttgctgtacgtactggagccatccttgatgaactctggcaaggtcttcgccttgggtttgggcagccgagcgtgttgctgcaatcctaagacttgagaagacttgacgcctccctcactgctgtgtctcctctgcttgctgaggccctgatttttagggggcctgggtgggggggcttggatctcacaggctggtaacttccgaagacgataatagaaggtgc

SEQ ID NO: 46804 - DNA, 1914 bp, Homo sapiens
  misc_feature (1)...(1914): n = a,t,c or g
aaaaacctcaaaaatgcattgccatgattttattattagtgtcccaaaatgggactcccaagtaataaatgatttattccagccacagccaaaaaagactttgcctgggctaaaagagtctctctctaagtatgtaatatacaagaaatacaattcaaagagatgttcctataagtacattttttacacggcatatatttaaaaaggaggccccttttaatataaaattccggttatataccaatatggttaattagcatttacactatagtttgaacgtattttaaatagcatgatgtgtatacaatgtctcccgcgcccattggcaaccagggtcgtgggaagcttggtgaggagttaaccaggtcctgtggtttaagcagtggagcacccgggattcctgcccccctttctgctcacacaattgcactccattcttccgccttccttgttttctccaaaaccacctgataggggggatgtcctgatttctgaggtgtgcttctcatcatgactgcttcgttttgcccttctgatttccacggcacaagattataggaggaaactcattctcatcatcaagacacactggtcccgtcgcaaactcatgttcaggaataacttctcctcgcagcgccccgccgtcctcagaataacctggcaccgtggaggctgaagatgcacttggtctggctacggtcgctgcataagactgaggtaaggaaggtctgaggtcattttctttattctcttctgttgttcctgagccaagcaagctgtgggttttgattaagacacactctcctccatcctgaggatccaaattgtacatataaaggtgtccactggatgacgcaactagcagccgtggcaacttctggatcgttgagagggtacagatgttcctctgtccggagaagttcaagcgtgcagtggcaaaagccctgtcctgatgcatcatgtctgacacctgggtagggaggtagttggtagcagccataaacatctttcccatgtagccactccaggtcgaaggctcttctggtcgactgttggtgacctgttccagcttgaagatgtgtaccgtctcggtgttactggaggcgcagaggaattgtgaatccatactgaacactagagagctgattgtcacataccttttcatccctctccggaactcatagagcttttgcccatcagggacagagaacacccggatgactgtgcctttttcagacgcacttgctagtttggagcctgaggcattgaaggtgatggcagctagtgttccctcatgggcagcaatagtgcagactgttttcagggagtttccatcataaagcacaatctcccctgaagtcaggcttccaggataggccaggtaagaattggaatggttgatagagagagcacatagacctgttgggtttgcaggaatatccaggagggtcttcaacagcttcatgtctttaatgttgtgaatataaatggactcttctaggcaaaccagcagcctttgccggttcagccttatggacaagatgttgctggagtagctgtaattacagatctctgtgcctttcttgaagtgatacacgttcatctgccgtggttttgtgtgactgactaccaccaccaggctgctggagaagaggcgctccacgatgtagacgtccgggatttcattgcttccgtggacttgatccagctgctccacagaactcagagaaaacagcttatacccggctttagttccaattgctagggatgtgcagtcctggttgaaagagaagcagctgagcgccgactcaaccccgcccgggggagcgtccgcgcctcggcctccatcggggctcgnntcgggaagccgcagctcgganccggcgacagccacctcagcagcccgcccgcgcc

SEQ ID NO: 46805 - DNA, 1510 bp, Homo sapiens
tttttttttttttgtttgaaaaatagtttgtagaccattttatttaaatatatgaacaaccaatgggctactgcaatccaagtaaactcttcacattttagaacctttgtgaagtatagtaagataaagtaagactgttggtctttggcagattcctcctgccccccagacagggacatagatatacagataaatgtttatatagttaaagagcggaggcccaggtgaaaattccccaccccaagctggctccccaacccaaaaattaccattggcccctgagaacacccaaagaccaccctcccagatttcacacaatatcaattgcaggaacagtcgtgcatggcaaagtatagttctatgcatttcacagcacagaaaacccttctttcagagggcatgcaagttgccggagattacacccccaagtctggtgctcttgtgatgagcaacttactggcaaacacatctcccagtgttgtaagcaggcaaatacattgagcacattttgctgtaattccatctatttgcaatgcctgcacagtgtctgtctctggctgttaacttactcattcttgacagaactctgctttattgattgcacttttttaaaaatgccaaaggatttttcacacttgttagcttgaccgccaccactagggtataagagcaagtgttctctatgccttacttgctacagtctcctccttctttggagaggattcccgtaatggtaacggtgatgggggaggctggtgccaacgacacaaatacatttctgtggtggaaaggtacggcaaatcttctatctcacttgagaaggctttctccttgggatgggtgctgggtcccttttggggagtggagagtcttggtggggtgtccactgaagaccggggcttttctggggtttcttggctcctcaattcacgtttacaaacagtttcagataaggaaccacagggttcctctttaataggagagtgcttaggagtttttgttttgacttttgaaaattcaggagccagctttttaacaggagtctttctttctgtacttccaaatggggatttccttttatgtccctttccactccgcccacatgagaagggcttgggaggcagagtctgggatgtctcggaaagctccgggctggcactccagtttaattttctcagatagctctgtttcctctctctcttcagtttcatagccctgaaacagcttgtgcctttctttctcgttatccttctttaccagctgcatccgcctttccatacgttcaatccgagcaaggagcgtgtctctctctgacttcagctcctcgatctccttttccttggcctcagctgctgctgctgctgttcgatgaggtccaattgcagcagaaggatggtgccgggggaggaagtgggcttcggccgcccaggctcgtcctcgggcccgcccagcgccgcagcccgctcgtagtccagtcgctgctcaggattcgccggcagggccgcggcgc

SEQ ID NO: 46806 - DNA, 838 bp, Homo sapiens
cctgttccagtgcgcgggtctgtggagagccgggtgcgagcggcggcagcacgaggggaaaagagctgagcggagaccaaagtcagccgggagacagtgggtctgtgagagaccgaatagaggggctggggccacgagcgccattgacaagcaatggggaagaaacagaaaaacaagagcgaagacagcaccaaggatgacattgatcttgatgccttggctgcagaaatagaaggagctggtgctgccaaagaacaggagcctcaaaagtcaaaagggaaaaagaaaaaagagaaaaaaaagcaggactttgatgaagatgatatcctgaaagaactggaagaattgtctttggaagctcaaggcatcaaagctgacagagaaactgttgcagtgaagccaacagaaaacaatgaagaggaattcacctcaaaagataaaaaaaagaaaggacagaagggcaaaaaacagagttttgatgataatgatagcgaagaattggaagataaagattcaaaatcaaaaaagactgcaaaaccgaaagtggaaatgtactctgggagtgatgatgatgatgattttaacaaacttcctaaaaaagctaaagggaaagctcaaaaatcaaataagaagtgggatgggtcagaggaggatgaggataacagtaaaaaaattaaagagcgttcaagaataaattcttctggtgaaagtggtgatgaatcagatgaatttttgcaatctagaaaaggacagaaaaaaaatcagaaaaacaagccaggtcctaacatagaaagtgggaatgaagatgatgacgcctccttcaaaattaagacagtgg

SEQ ID NO: 46807 - DNA, 2035 bp, Homo sapiens
  misc_feature (1)...(2035): n = a,t,c or g
ggacccattaaaactttaaatatctgtgggaaccatttttcctgattttcccttttttaacatcatggcaaagatgggtttttttccaacaaaatttaatttaatatctttccacttgaagattttaggtttgttttcaatacttaatgaatataaaactaaaggagaaaagccaacctgaaataatttaaactttatatgaacatttcgataagagtttgtggattttttctgtagataatatatttgatccagaactcaagtgcatggaaacatgattttgatttttaaaatctaaaaaaaaaaaaaattaaaatcatgcttccctctattgcagtatcagttatttagtcacagaatggtattttatgtaaattaaaattaggtgaatgcaatgcaggtaactggttttggaatgggaatgtgcagtgctttatgtttggggagttggagcagggtatcttttcatcaattaggaaggaaagtttggaaacttnctgattacctttatgttggtttccccttattatttgtctctacgctagatctgctaaaccaacccagcttgctcagagatctcatattgaagcaacatacaggcaatccacatctttctttccctttgaagtatagtcattggatgggatgagggacagggcctgttgggttcacagggccttgcactgcatgggcacatacttaaaagctcttgtgcatggaatccctgtctgttagccacaggcctctttagctctatacattcaaaataactactgtagtagaaaatagataagcttcagctgagttggcttttgatagtggaaaaaaaacaaaatttgactttttatggccaaaattccttgttgacagctgtgatgttctaatatgatttgggaatatgtcagtctacagaacctgcatcctgtaaaaacacctttggggtagacgataaaagtcatttttaaggcaaatacttaccatgtgactttttattaccaaatgcatcagtagtggagctggtatgttgtttcataggatggaaacattagaagtccagagaaaaataaattttaaaaaaaggtggaaaagttacggcaaacctgagatttcagcataaaatcttttagtatgaagtgagagaaagaagagggaggctggttctgttgctcgtatcaataggttatctgtgtccctcatcttggtgttacagtgttatttctgtcagtattatgaatatgtggttgacccatcctgtcaaatgtaccaacattttcgaaagaattcattcaaatctcttatgccaacagaaaagttccttcttgtttaatatctctttacctcagtcctacattttgattctctggaggagattttagcttgtcttaaaaagccaaatttggagtcatcaagcctgctgaacctgatggggcagctttttgaacagctttctggaagtaagaacttcagttgaaaagccctttgatcgcttcagcccgggacatgcccttcagatggcttattctcagtaaagctttatgtagactgtgacactgtatatgtgtgactcgtacaactttgacgtgtttctgaagtggtttaatcgtatttgttattagcttctttgtggaaatgcaatttttatactaaaaacattgcttatttgcaatgcaatatgttataaatttgttgtttatattactggtattagtcttagcctaatgaacctaattatttttctttctgtattctttgcttcctcaaatagcatctgcagcaattggaatgagaaatccagatatgtgtttcaagtagtacattgcctgaatcacaaatcacttgatcacagtattgtatataatccctgatcctatttgtttcattttattgtaaattcccatttgcatcaaaacctaatgatagtgattggtaagtaaaaacaaatggtgtattgcttttcatacaagtgttttcacaaaagccatttgcctaggcagcaaaaaatattaatttgttaaaaaaaaaaaaaaagtcgacg

SEQ ID NO: 46808 - DNA, 1497 bp, Homo sapiens
cttggggctgctgggactcgcgtcggttggcgactcccggacgtaggtagtttgttgggccgggttctgaggccttgcttctctttacttttccactctaggccacgatgccgcagtaccagacctgggaggagttcagccgcgctgcccgagaagctttacctcgctgaccctatgaaggcacgtgtggttctcaaatataggcattctgatgggaacttgtgtgttaaagtaacagatgatttagtttgtttggtgtataaaacagaccaagctcaagatgtaaagaagattgagaaaattccacagtcaactaaatgcgacttatggtagccaaggaagccccgcaattgttaccatgggaaacctgagtgaatggtttgaaattgaagactttgtcgttgttactttagggaagtaaatatctttttgaattagagaaagtgtttggggacagaaaagtactttatgtaactaagtgggctgttccagaagcttaggaggtcattttttgtaattttctttttaattactttagagagctaggggatgcaaatgttttcagttaggaaagcctttatttacttttgggaaattgaacaagaaatgcatctgtcttagaaactggagattatttgatgttaggtaaaacatgtaattgtttctctggcaaatttgtatcagtaatttgaaaatgagatattaggaaaaaccaattcttcttaaatttagttcatctttctttaaaagaacattaaatgtaaccattttgtcagatccatgtattttggagcataaaatgtatgctgttgtgaccaataaatataaaatatggtaattggaattaactccacaccatagtatgcattgttatacatactgtgtacctaattatgtatagcagtgtagtctcaattatatctgaaagtaattgtgactaacaagtatgctttgccttatttccacatttaaactacctgttaatataagggatttgtagtatcagcttgttgagcaatgactttgaatctagttttcagtgatcagaagcagcagttatttgagtgtatgaatggaatgatgatcactgtgctataatgtactgaaaccaccatattacagaaatatttactacatattttccatctgtagtttctcagaagggctatggattagtttgaactgtcaaatccttgcatacttctgtgacacccctgccccattttctgtctttaattaaccaaggtgttaggtgtgactgtcacaactgttatgttttccagtaaactagaagtacgatatttgataattatatttgtatttcaccacctaaatgtaatgttgattcctcaagaatgaaatgaaggcactacattgaaatatgttttgtataaatttgtcatgttgaacagcattttagcatggtaagttcccttagctatatgaattttggcatgtttcagagagatcagtaaataaaatattagataaaatata

SEQ ID NO: 46809 - DNA, 1105 bp, Homo sapiens
ttcttttttcttgtcttcagactctgatattctttcttccacttggttgattcatcagttgatacttgtgtatgcttcaggaagttctcgtgctgtgtttttcagctccaacatgttgtttatgctcctctctaaactggttattctagttagcaattcctctaaccttttatcaaggttcttagcttctttgcattggggttagaacgtgctcctttagctcagtgaagtttgctactacccaccttctgaagcctacttctgtcaattcatccatctcaacctcctcccagcactgtgcccttgcctgtagaggtgttgtgatcatttggagtaaacaagccactctggcccttttgagttgtgaggggtttttcattcctttctcatcttcatgagtttgtctcattttgatctttgaggctgctgacctttagatgaggttttcgtggggactttttggttgatgttgttgttgctttctgtttttctttcgacagtcaggtacctcttctgtagggctgctgtggtttgctggggattcacttcaagccctatttatctgggtccctcccacacctgaagatgtcaccagagggtgctggagaacagcaaagatgggaccccactccttcctctgggatctctgtccttgaggggcacccacctgatgccagtagaaatgctcctgtataaggtgtctggtgaacccttttgggggatttcacccagtcacgaggcacaggatccaggacttgcttaatgaagcacttttgatttgtccctttgggaagggggtatgctgtgctgggggaaatcccactcatctgggctgcctggaatcctcagagtgagcagggggaaagaacaagtcttccggtttgtggagacaacagccagccacccctcccactagggactcagacctagagagatcagagttctctccctaattccctggcttgagttgctggagttcctgcagggaggccccacccagtgaggagggatgggtcagggtcagcctaaagaggcagtctggccatgatctgccacagccagtaatctgcgctgtgcggaatacctcttgggaccaagccgtcca

SEQ ID NO: 46810 - DNA, 940 bp, Homo sapiens
ataacctctgcctcaagtacgtcggggtggccttctacaatgtgggccgctcactcaccaccgtcttcaacgtgctgctctcctacctgctgctcaagcagaccacctccttctatgccctgctcacctgcggtatcatcatcgggggcttctggcttggtgtggaccaggagggggcagaaggcaccctgtcgtggctgggcaccgtcttcggcgtgctggctagcctctgtgtctcgctcaacgccatctacaccacgaaggtgctcccggcggtggacggcagcatctggcgcctgactttctacaacaacgtcaacgcctgcatcctcttcctgcccctgctcctgctgctcggggagcttcaggccctgcgtgactttgcccagctgggcagtgcccacttctgggggatgatgacgctgggcggcctgtttggctttgccatcggctacgtgacaggactgcagatcaagttcaccagtccgctgacccacaatgtgtcgggcacggccaaggcctgtgcccagacagtgctggccgtgctctactacgaggagaccaagagcttcctctggtggacgagcaacatgatggtgctgggcggctcctccgcctacacctgggtcaggggctgggagatgaagaagactccggaggagcccagccccaaagacagcgagaagagcgccatgggggtgtgagcaccacaggcaccctggatggcccggccccggggcccgtacacaggcagggccagcacagtagtgaaggcggtctcctggaccccagaagcgtgctgtggtgtggactgggtgctacttatagacccaatcagaatacggtggttgagaaggaaccagtgtttacaagtaatatcagaaagttgaaggaaccagtgtttacaagtaataccagaaagttgccaaacccttctcta

SEQ ID NO: 46811 - DNA, 4284 bp, Homo sapiens
  misc_feature (1)...(4284): n = a,t,c or g
tgagccatttccaccctggtattcaaaatagtcgctaattttgtggccacgtcccccaatactttttccctgactactttcattctggttttctgcttttctctttcttcccctggatgattccgattgtttcttctccggtgtctctgattctttgtcacttaaagatcccaagcttccaaaactgtgattagagctttcgttatttgttgaggctttagctccaacactgcaactgcccgtacttccagtgctcccacttgcaactccagtaaatctagcttccaataactcttgcctgctgaatcacacgccgccatccgggaggcccagggaaggtgcaatggatgagcttcatagtctggatccaagaaggcaagagttattggaagctagatttactggagttgcaagtgggagcactggaagtacgggcagttgcagtgttggagctaaagcctcaacaaataacgaaagctctaatcacagttttggaagcttggaatctttaagtgataaagaatcagagacaccggagaagaaacaatcggaatcatccaggggaagaaagagaaaagcagaaaaccagaatgaaagtagtcaggggttccccaacctcccggtcttccagtccttggcctattgggaaatgggtcgtacagcaggaggaaaaagtattgggggacgtggccacaaaattagcgactattttgaataccagggtggaaatggctcaagtccagtaagaggcatacctcctgcaatccgttctcctcaaaattcacattcacattccactccttcctcatctgttcgaccgaatagcccttctcctactgcattagcatttggggaccaccctattgtacaaccaaagcaattatcctttaaaattattcagactgatctcacaatgctgaaattagcagcattagaaagtaataaaatccaggacctggaaaagaaggagggacgtatagatgatttgctcagggctaactgtgatctcagacggcaaatagatgaacaacaaaaattacttgaaaaatacaaagaacgattaaataagtgcatatcaatgagcaagaaacttcttattgaaaagagtacacaagaaaagctgtcaagcagagagaagagtatgcaagatcgattacgcctcgggcactttacaacagttagacatggcgcttcatttactgaacaatggacagatggttttgcatttcagaatcttgtgaagcaacaagaatgggtgaatcagcaaagggaagatattgaaaggcaaaggaaacttctagccaaacgcaaacctcccacagctaataattctcaggcaccctctaccaattctgaaccaaaacaaaggaaaaacaaagcagtcaatggagcagagaatgatccctttgttagaccaaatttaccacaactgttgactttggcagaatatcatgaacaggaagaaattttcaaacttagactaggacatctcaaaaaggaagaggcagaaatccaggcagaacttgaacgtttggaaagagtcagaaatcttcacatacgtgagctgaaaagaataaacaatgaagataattcacagttcaaagatcacccaacattaaatgaaagatatttattacttcatctgcttggtagaggtggctttagtgaagtgtataagggcttttganngctttatgaacaaagatatgctgctgtgaagatacatcagcttaataaaagctggagagatgagaagaaagaaaactaccacaaacatgcctgcagagagtatagaatacacaaagaactggatcaccccagaatagttaaactctatgattatttctccttggatacagatacgttttgtacagtgttagaatactgtgaaggcaatgacttggatttctatctgaagcaacacaagttaatgtcagagaaagaagctcggtctattgtaatgcagattgtaaatgcactaagatatctcaatgagatcaaaccccctattatacattatgatcttaagccaggaaacatcctactggtagatggaacagcatgtggtgaaatcaaaatcactgattttggtctgtccaagattatggatgatgatagctatggtgtagatggaatggatctaacttcccagggggcaggcacttactggtatttacctcctgagtgttttgtagttggaaaagagccaccaaagatttccaacaaggttgatgtatggtcggttggagtcatcttctttcagtgtctttatggtagaaagccatttggtcacaatcaatctcaacaagacattcttcaagaaaatacaatattaaaagccacagaagtccagttccctgtaaaaccggttgtaagcagtgaagccaaggcatttataagacgctgtttggcatatcgaaaagaagatcgatttgatgtgcaccagctggcaaatgacccataccttctcccacacatgagaagatcaaattcttcaggaaacctacacatggctgggctgacagcatcccctacacccccttcttcaagcataattacttactgactttcctccaagattggcatgatatctttgaatttgcttccagatgcacacttaagtttgagagcatttgagtgnnnnnnnnnnnnnnnnnnnnnnnnnnnnnnnnnacacaagacgtggttaagaactgtttgtgaactgaagttcctcatagtgtcatttgtatgagagaggatcatggacaatgaataaatgcacacttctgactataattttgagcagtgaaggaaggatgactgcctgttacacagaaacaggaataccatgttaagatagaggaaaaaaattttgtttatttgggggaacactgtaaataacgtttataatacttaaatacatttggttgttactagagagttctaatatgaagggtagtttttcattatttaaaaacacatggaaaaatatgagacatatttctaacatacgaactatagtgcctggatacattcttcagcatttggcagttaatctgctgaaaccaaagtaagaactgaatgacagtgacagttgtgttttatagtaatagaatgtgagagttagaatctttggacaaagttaggctttgtcatttgcctattcagacttttaccaagttgtacctcgagatcacatgtccgttttctttcactggttatattaaagggagagctattatttctaaatactttacacctttgacaaaatgagctgcttgtgttgaaatcagttgaattcactaaattataatattgccagtgttttcaacacgttagaattgataacaggtatttttcttttgttaccaggccttgttcatcaaaacaggtgacagtgagtaaccaaatgcagaccagttctatgcaggataatgataaattcccttctagctctattgtaaattgttgtacagatgtcatatttcaattactaagtttcagcagcttattcttgtacaaatgtttaaaatatggcttttctaattggatattgtattttttttaagtcttcttgaaggcactctaattgctgctaaatgatgttgcttctttgctaaaaaattaaatgacctagaaggtgcaagttgactgtacatcatagatattaaaaagcagacagtcattaacaatcaagatgtaaaagtgatccatgttggacataattgagtttttaaatcagtttattgggttctagggctgtagaacacatagatactagatttttaatttgttcatggttattctacatttctagaaagttcttatcagcaagatggtcccataagcaaatttcttgtggtttgtacagatttgttaaaatgtgaacgttttctaactgcctcgtagggtagaaaccaatatttttcaggatgctgtatttcactcctgtaaggactttttctttattgtcacattcataatgctgatacttacatgtaagttgttcatgttgcagaaaaaggttatacgtaccacggattctctttaatattgtacagttaaactgtatttctgatgttgcaagccattttgttttttcattgtacatagacacattgtctctttaaaatgctgctgaaattgtagagagtatagccaaaacagtaataaacaatgacagttaaaatgtaaagactatgaaaattacattggaagggagctttcaagatggtaggatattgactaactgagctccttcacttaaaaatcagctgaataaattccttaagtatacttcaa

SEQ ID NO: 46812 - DNA, 2284 bp, Homo sapiens
gtggcggcggttgggccggtgatacccgggcgctttatagtcccgccgcctcctcctccacctcctcctcctcctcctctcctcctggagcagaggaggttgtggcggtggctggagaaagcggcggcggaggatggaggaaggaggcggcggcgtacggagtctggtcccgggcgggccggtgttactggtcctctgcggcctcctggaggcgtccggcggcggccgagcccttcctcaactcagcgatgacatccctttccgagtcaactggcccggcaccgagttctctctgcccacaactggagttttatataaagaagataattatgtcatcatgacaactgcacataaagaaaaatataaatgcatacttccccttgtgacaagtggggatgaggaagaagaaaaggattataaaggccctaatccaagagagcttttggagccactatttaaacaaagcagttgttcctacagaattgagtcttattggacttacgaagtatgtcatggaaaacacattcggcagtaccatgaagagaaagaaactggtcagaaaataaatattcacgagtactaccttgggaatatgttggccaagaaccttctatttgaaaaagaacgagaagcagaagaaaaggaaaaatcaaatgagattcccactaaaaatatcgaaggtcagatgacaccatactatcctgtgggaatggggaaatggtacaccttgtagtttgaaacagaaccggcccagatcaagtactgtgatgtacatatgtcatcctgaatctaaggcatgaaattctttcagtagctgaagttacaacttgtgaatatgaagttgtcattttgacaccactcttgtgcagttcatcctaaatataggttcagagcatctcctgtgaatgacatattttgtcaatcactgccaggatctccatttaagcccctcaccctgaggcagctggagcagcaggaagaaatactaagggtgccttttaggagaaataaagagggtgtcggttggtggaaatatgaattctgctatggcaaacatgtacatcaataccatgaggacaaggatagtgggaaaacctctgtggttgtcgggacatggaaccaagaagagcatattgaatgggctaagaagaatactgctagagcttatcatcttcaagacgatggtaccccagacagtcaggatggtgtcacatttttatggaaatggagatatttgtgatataactgacaaaccaagacaggtgactgtaaaactaaagtgcaaagaatcagattcacctcatgctgttactgtatatatgctagagcctcactcctgtcaatatattcttggggttgaatctccagtgatctgtaaaatcttagatacagcagatgaaaatggacttctttctctccccaactaaaggatattaaagttaggggaaagaaaagatcattgaaagtcatgataatttctgtcccactgtgtctcattatagagttctcagccattggacctcttctaaaggatggtataaaatgactctcaaccactttgtgaatacatatgtgtatataagaggttattgataaacttctgaggcagacatttgtctcgctttttttcatttttgttgtgtcttataaactgactgtttttctttgcttggatactgtgattccaaaataaatctcatccaagcaagttagagtccagcctaatcaaatgtcataattgttgtacctattgaaagtttttaaataatagatttattatgtaaattatagtatatgtaagtagctaatgaagtaaagatcatgaagaaagaaattgataggtgtaaatgagagaccatgtaaaatatggtaaattcctagtacctgaaatcctttcaacagatttttatatagcaactgctctctgcaagtagttaaactagaaactgggcacatgggtagaggctcacatgggagttgtcctcacccttgttaatctcaagaaactcttatttataataggttgcttctctctcagaacttttatctattacttttttcttcttatgagtatgtttactctcagagtatctatctgatgtagacagttggtgatgcttctgagactcagaatggtttactctaacaaaacactgtgctgtctatcccttgtacttgcctactgtaatatggatttcacttctgaacagtttacagcacaatatttattttaaagtgaataaaatgtccacaagcagtgttgtcatgtagtcaatggcagatt

SEQ ID NO: 46813 - DNA, 944 bp, Homo sapiens
ttttttttttttttgcagtaacattcccctttaatagcctggtgggacctccagaggtggaggggtgggttgcctgggcccagctacccaggcccgttgcccacccactccacagcccagagtgggggctgaacaagcacccagcaggggggctagacaagccaattcatttcccatcgctgagtgggtcgggggaggcagcgccgaccttaatcacatggtgttaaaaaaaaaaaaataactaggggcacgtggcaggaaggggaggcaaggccaaggcaggggattcccccaccggccgccccccaaacccctacccatggcccccaataaatatttgcaggggatgccagggcttgtggccgtggcgggggtgggtatgcgccaaccctatttcaggcagcgctcaaagtaggtggagccgatgtagccaccccgcatggagcgctgcacgttctgctcaaacagccgccggttgttctgcaggacctctgcggcctccttgttcagtgggtcctcggggttgggctccaagaagagatactgcaggccataaattatggagtttatcgtaaggactggcttccagtcctctctgaggatgttgaggcagacgttgccctcgaggtcaatgttggggtgatagaccattgtctcacacttcaccttggggggatcatgcgggtaaccctggcccaccttaaaactgaacacaaacttcccactcttgtagaagccctcatcaggacagatgaccagcttgaagttgaggaggtcgtctggatctgagaagctgatatcacacgtcttgggcaggttcagctcgtttatgtccttctggatccgcagctgcgccgccgacgccttcttgctgctgcccttggtgccgcccgccgactcctcctccttcttctgctgcttcagcgagaacagcttgatcatcc

SEQ ID NO: 46814 - DNA, 1229 bp, Homo sapiens
gaacatggcggcgcccgttgtcacggccccgggcaaagctctgctgcgggcgggcgctggacggctgcttcggggaggcgtccaggagctactgcggccgcgacatgaagggaacgcccctgacctggcctgcaacttcagcctttctcaaaatcggggcacggtcatcgtggagcgctggtggaaggtaccgctggccggggagggccggaagccgcgcctgcaccggcgacatcgcgtctataagctggtggaggacacgaagcatcggcccaaagaaaacctggagctcatcctgacgcagtcggtggagaatgttggagtccggggtgacctgggtctcagtgaagaaatctttaaggccggaattcgacttccttcctcaggggactggctgtatatgcatcccctgaaaacaagaagctgttttgaagaggagaaattgctgagacaagaaggaaaattagagaagatccagaccaaggcaggtgaggcgacagtgaaatttctaaaaagcttttcgcctggaggtagggatgaagaacaatgtcaaatgggagcttgaaccctgaaatagttgcccgccacttctttaagaatcttggtgttgtggttgccccacatacattaaagttaccagaagagcctatcacacggtggggcgagtattggtgtgaggtgacggtaaatgggcttgatactgtgagagtgcctatgtctgtcgtgaactttgagaagcccaagaccaaaagatataagtactggttagcccagcaagctgccaaggctatggcccccaccagccccccagatctaaatctactctccctccaaggcagcaaagcagaatcgggagcagtggagcagaaatgtgcaagcacccctgatctcactcccagctctgaccaaatacagaattttagagaacatctgaagacatcagacttgcactgcgtatacatgttgaattcttcatttttgccatctttaactgtcatcactggggcagggaagtcctgttccagaagtaccaggctgtagatttgataagctagatgcagtagaccgaaaccatccaaaacctgtttagcttcttcctccattggagtttattgggacaaacaggagagccagccattgtctccagtacttgcctcattctcatcatccaaactgaacatttgtatcccaagcagaaataaagagaatatgttctttttaagtaaaaa

SEQ ID NO: 46815 - DNA, 1675 bp, Homo sapiens
  misc_feature (1)...(1675): n = a,t,c or g
tttttttttttttattttttaaatttttaaattttaaccaccaccaccacagccttttattatgtgcttgccaggcactgtgctaaagctttacaaacattgtttcagttattccaacaaccctgaggtagatattttcaacatgcctccctccacccangtnannatagtngagganacngaggcncagagnggntaagtaaatcaaccaaggtcaaacccagctggtaagtagtgaagctagaaattcaaaccaactatatgtgactccaaaatccatgcctttaaacactatcctagattgtttaccattgaaagttaaaggacatatgctccttcccaaaatatgagaatagattttcagtgggaaagcaggggggagcccatatgtaaattctttcatcagctatgggactcaaactcttggaggagtggagagatagtctgggtataagctgaccactaggtcctctcatctctccagctgccagggcctttctcattcaagatctctactcctgacatctgactacgcaatatactgtttccctttcagcaaccactgggatgcagaggtcaggcacatttggtgacacagagccaaagacacctcagagaaattaggagacactcaaaaaagtccaccacccctgaactactgatccctaaggcacacagatgcatttagatggaaaccctccatgaaggggacatgttccacgtcatgtttgatgcccatcaccacccctgcaaaggggatattggtatctccttctgacagctcagttcttccacaccagcttcccgggcctgacatcattctcacaaagtctcctcagcaatccctgcacctctcccctcaactggcccttgtaggtgcccacccctaacccacctctggaggcctcactgaccacacgccccaggcctcaagacttcccgtttctgaggttgtgcccaacagaaatgccctcaaagtgctcagcaaggctccattcatccatgacctatgaggattaaaccaagatggctgaagacaagcagaaggggctacccacagtgagacaagctgaaccaggatgtacagaactgacaatggaagggcaagaacacacagcagacacaaaacaagaggactagccatgggcaaaataaacagagctgtcaaaaatcagaaaagggagacggccctaagatgatcagggatgaccagagagagggatcctaaagacaagtctattcacacttgcagccatggagtttctgagggaaggacaactgtttaggaaaaagggtcttggtaaggaggccgctggagagactaggcaggagacagctgaataagggaaactgcaggcagctctggagagggaggctggaacatccctttagagccaacagtttgagaagacatcagagaagtatgcaggcagtggaagacaagcagctgaaggtctcaaaggggagtaagacaccagctgaaaggccagactctggagccctgagctacttctaggtatacctcatcatctaccccatctgggtgaaactggtccctgagggtcattccctgcagcccctgctaaattctgtaccagattttgaagggtggaagacccagaggtagggaacctactgagaggcgagacgcagccccatttttgggaagttcccc

SEQ ID NO: 46816 - DNA, 535 bp, Homo sapiens
  misc_feature (1)...(535): n = a,t,c or g
gnnnnnnnnnnngnnnnnnnnnnnnnttttgnnaacagctattacatgatcactatgacatgantacnaatttaatacgactcactatatggaatttggccctcgaggccaagaattcggcacgagattgtgtccagatctggcaccctgacttatgaagcagttcaccaaacaacgcaagttggattggggcagtctttgtgcgttggcattggaggtgatccttttaatggaacagattttattgactgcctcgaaatctttttgaacgattctgccacagaaggcatcatattgattggtgaaattggtggtaatgcagaagagaatgctgcagaatttttgaagcaacataattcaggtccaaattccaagcctgtagtgtccttcattgctggtttaactgctcctcctgggagaagaatgggtcatgccggggcaattattgctggaggaaaaggtggagctaaagagaagatctctgccttcanaagtggcagagntgnggncagntgnnnnctgnncngntgggacc

SEQ ID NO: 46817 - DNA, 2023 bp, Homo sapiens
gaagtaattactcagagcgcaggggccggggcttggctttactgttgcaggtgataaccttgtcaactgcttattagtgaatgctgaacaaatttcccaaagtttgtatttttaaaaatagaaaaccgtgaggacatactgaatgccggtgacaaattaacagaggtccttgaagaggctaacactctgtttaatgaagtgtcccgagcaagagaagcagtcctggatgcccactttcttgttttggcttcagatttgggcaaagagaaagcaaagcagctgcgctcagacctgagctcctttgacatgttaagatatgttgaaactctactcacacatatgggtgtaaatccgctagaagctgaagaactcatccgtgatgaagatagtcctgattttgaattcatagtctatgactcctggaagataacaggcagaacagcagaaaacacctttaataaaacccatacattccactttctgttgggttcaatatacggagagtgccctgtgccaaagccacgagttgatcgtccaagaaaagttcctgtgatacaagaggagagggcaatgcctgcccagttaagaagaatgggaagaatctcatcaagaagtcaacagagaaagaagtagaaagaatcttgggattgttgcagacatattttcgagaagatcctgataccccaatgtccttctttgactttgtggttgatcctcattctttcccccgtacagtggaaaacatctttcatgtttccttcattatacgggatggttttgcaagaataagacttgaccaagaccgactgccagtaatagataaatgatactatgtttggaaaaattagttttagagaaaatatatttgttagtagaatttaagtattttactaaatgtaaatgaattttcaatgtagattaacttttacaatattgtatcttgctcaactacctgaagatactgaaaacatggccagcgtctaaaattttgatggattcatctatatcattgattcaacatctgctgtacatattaacaaagaaatgatataatttccctcagatcttaatttagaaagttggtgattgcagtcatttttgtagtatccctctttctaatcacgttttgtcagatgccggcaccttcttttctctttgaggttctatgaatctttcattcttacctgaataatttcacactctccattactcatgtcctcctaaggtctcctgtggagagtgaatatttccatcgcacttacttgctactttcaatgttctcaatgtcctattggactcactagggcttagctctgtggttgacacatagatatgcagatttttcaaatgtctggaatgtgttactctactacatgttttttgaaatgggaaacagatggaatgactggctactgtaataatactacagcagctccataatgcatgaaatcctaaaaagtatgtaatattataagtatcttttcaatacaggtttcattgctattattcatcagtttccgtttagattacctgttccgatttaataacctttgataaatttgaaaaatttgtctttcaaacagagcctgttagtattaatgaagaaaatgagggatttgaacataacacacaagttagaaatcaaggaattatagctttgagttaccgtgactgggaggtaaagctctgcctgttgcccctgcatagttctgactctgccttcacttgcagtaagcccagtgcctaaatgttcattattgtctgccaggagattgtgaagacctttgagatttcagagcctgtgattactccaagtcagaggcagcagaagccaagtgcttgatgctagctgaaggactcaaatggatagtgaagtccaaaacggaaagcggcatgtattgtacatattgtatgattcaacatttttaaaggcagattgtttttagtaaaatgtagcttttgatagttaataaatttgtcatggttgtctttgattaaaggaaactcaccgccatattcacaa

SEQ ID NO: 46818 - DNA, 569 bp, Homo sapiens
gaagtggaggggctgtttgctaaatcaatcaaatacattctctttttgctattaaagccatctatttagaatgttattttcattccatctactaatttttttttaaatagcaatttaattcccaggtttggggatagtactttttggttttgtcttgtcatacttaacattttatttttgagactgataatgtcttcagtcagatgtgaatgaatgttagcacataacccctccaaattcatgtatttagatagctactgctacagtgcactgtatggtgtgctgatgagaacagacaaaaggaacaaaaccacctttctgtccccagagctgcttataccctttgtaacagggaatgtgtctatgatagttagggaaacctgttttagaagagctagatatctgtctaacatttacagcagttaaaattttaaaaatttattattattttgagaaatggggtctggctgtgttgtttaggctggccttgagttcctggatttaagcgatcctcctacttcagccttctgagtggctgagactacaggcgcatgccactggcctgggta

SEQ ID NO: 46819 - DNA, 597 bp, Homo sapiens
gctagaaataaagttaccccattttgtagtggtaatggttaaagaagtgggctctgagttacttacttgatgaacacttacttgctgcatgaccctggtcaagttgtctaacacttaatgccccagttccctcatctgtaaaatggagatactaatagaactgtccatggagcatggttgtgaggaataaattaaatatttataaagttcctaggaaagaacttacatgtactaggcattcattaaatgttagctataatgatgtaattgaatattagctatctttattagtattattatgactactaatactatagcagtaataatactactattaccatgtgccatttattagtttgaatatattacatgttgttggttgtcagatgctcacaactctccaaggaaagtattattagcctcattctacaaataaagaaatttaaagtaagaaagaagattcatgacttgttcaaggccacacagctaggaagtggcaaagagatcgctagaaacaagatctgttgatactccttccagtgagactgaaagcagtgattctagtaaggaggctgccacaccaacccgggaagagag

SEQ ID NO: 46820 - DNA, 600 bp, Homo sapiens
gcgtcgacggaattggtcagaccggagcacttggcctgaagacctggaattggcgacttcgatattaacaaggatggcggcggccgcagcaagtcgaggagtcggggcaaagctgggcctgcgtgagattcgcatccacttatgtcagcgctcgcccggcagccagggcgtcagggacttcattgagaaacgctacgtggagctgaagaaggcgaatcccgacctacccatcctaatccgcgaatgctccgatgtgcagcccaagctctgggccccgctacgcatttggccaagagacgaatgtccctttgaacaacttcagtgctgatcaggtaaccagagccctggagaacgttctaagtggtaaagcctgaagcctccactgaggattaagagcaacagcccccagagcctgggctctgctggacttagtataatgtgaaaaaaatgtgttctcctattcctcataaagcttgtgctgtaaaatactttctcagggtgttcttgtcctcatctaccctctaccccttactgtgcaaccactgaggcaaagtagcttaatataaaaataaaactttattctgtctcatcaaaaaaaaa

SEQ ID NO: 46821 - DNA, 589 bp, Homo sapiens
ccaagccccacacaaaacgctgcccgtggtcttcgactctccaaggaacagaggcctgaaggagtttcccatcaaacgcgtgatgggtccagattttggctatgtaactcgagggccccaaacagggggtatcagtggactggactcctttgggaacctggaagtgagccccccagtcacagtcaggggcaaggaatacccgctgggcaggattctcttcggggacagctgttatcccagcaatgacagccggcagatgcaccaggccctgcaggacttcctcagtgcccagcaggtgcaggcccctgtgaagctctattctgactggctgtccgtgggccacgtggacgagttcctgagctttgtgccagcacccgacaggaagggcttccggctgctcctggccagccccaggtcctgctacaaactgttccaggagcagcagaatgagggccacggggaggccctgctgttcgaagggatcaagaaaaaaaaacagcagaaaataaagaacattcttttcaaacaagactttgagagaacttatttcttttgttggagagattgcttcgacttggaaccccgagct

SEQ ID NO: 46822 - DNA, 739 bp, Homo sapiens
gtcatttggtgcctgcactaaaaacaagaagagattaaagtctcaagggaagaactgcaaaaaactagccaagaatctccttaaggagccagaaaactgcaacaacttttgcctgtggaagcagtatgcacatctggagtggttgcttggcaacacggaggatgccagaaaagtttttgacacagcacttggcatggcaggaagcagagaactgaaagactctgacctctgtgagctcagtctgctctatgcctgagctggaggtggagctgtcgccagaagtgagaagggctgccacagcttcgagctgtttcacatattaaccaagctgactgagagcagcccctatgggccctacactggacaggtgttggctgtttcacattttgaaagcgcgaaaggcttatgagcacgcactgcaggactgtttgggtgacagctgtgtctccaatccagctcccaccgattcctgtagccgcctaattagcctggctaaatgcttcatgctcttccagtatttgaccatagggattgatgctgctgtgcagatatacgaacaggtgtttgcaaaactgaacagttctgttttcccagaaggctctgggcaagggggacagtgccagctcccagagttggaccagtgttctcgaagccatcacactgatgcacacgagcctgctgagattccacatgaaagtgagtgtttacccgctggcccctctgcgagaggcactctcac

SEQ ID NO: 46823 - DNA, 3144 bp, Homo sapiens
ggaagcggaagtgccggtggagcgcgagtaggaagtggtgagttcggagtagagatggccgcgcttgcaccgctgcccccgctccccgcacagttcaagagcatacagcatcatctgaggacggctcaggagcatgacaagcgagaccctgtggtggcttattactgtcgtttatacgcaatgcagactggaatgaagatcgatagtaaaactcctgaatgtcgcaaatttttatcaaagttaatggatcagttagaagctctaaagaagcagttgggtgataatgaagctattactcaaggaaatagtggggctgtgcccatttggagaattatgctttgaaaatgtttttgtatgcagacaatgaagatcgtgctggacgatttcacaaaaacatgatcaagtccttctatactgcaagtcttttgatagatgtcataacagtatttggagaactcactgatgaaaatgtgaaacacaggaagtatgccagatggaaggcaacatacatccataattgtttaaagaatggggagactcctcaagcaggccctgttggaattgaagaagataatgatattgaagaaaatgaagatgctggagcagcctctctgcccactcagccaactcagccatcatcatcttcaacttatgacccaagcaacatgccatcaggcaactatactggaatacagattcctccgggtgcacacgctccagctaatacaccagcagaagtgcctcacagcacaggtgtagcaagtaatactatccaacctactccacagactatacctgccattgatcccgcacttttcaatacaatttcccagggggatgttcgtcctaaccccaggaagacttttgctaagagcttccagaagtacttgcaaatatgctgggcagtgctttgcagtatgaagatgtaagcacttgctggtccagaatctacaaaaggctctcaagttactgacgacaggcagagaatgaagcctttgtatgacagacccatgtatttttggcatgaggaactaacagtccattactctatcttcagcctatcaggatcacagttttaaggaagacttggttttgttgaatatgacaatgaaatctgtgtgtatcagatttttattgaagcattcatcagcagcctcaaccagttttcattgtccatttactagattcaatcgtctctgagtatatagggctgatgttagcaagaccctaaaaatgtccattgaaccctgcttcaaaaaatgaaaacacacctctataaaatgtgtactgggaataagctttgtatttacatacattaggggaattttttaaaatctgtaatgtttggacaaacagatgatattactttgctataaaattataaatgtaacttttaataaagatagccagaatattctaaattagaaattacgtttttgtttccctcaagacataaaacaaatataacattctaaactgctggatgaatctgaaaagacattaagttcaaattttaatttattctcatattaaatataactccattaaaagtttaaaatttcatgggagaaaatataataaggtaaagaggtagaatcactttcagacttaagaataatgttgatttcccaagtgctttaccttatctgttaaagcgtaagatgaattggtatttgcttcataggcagtttgactgcatgtattagagaatgaaaagaagatatttgtagtaatgcctggaaacttggtgctttaaattaaggtactcctctgctgctgtagaatggattccacacagtggatagctatgggtgattcagaatattatgtttagattcccatttgttaagtttataagttttgtggggaattatgaacttactgtgtactacctgcatttgtgctgtgtgaaaaataaatacaaggattcgtttagctaattcaacttactacaaagacaaatgtctgtttttatttgcctgctaggattgtcttttttaaaagtcatttttatttataggaatatgggtgtttctataggaagaaacaggttttttgttttttgttttttaagataaatttgacaaagttaactgaaatttatctggtccattttattcatgctactaagatgggaatctttaaacacaagggtcagcaagctttggcccatggattggccacctgttacgtaaataaagtttctttgaaacaagcctacactcattcatttatgttttgtctagtggttgctttccacaactgcagagttgtatgggcttgcaagtctaaaaacatttacctatttgggccctctaaagaaaaagttaagacacctagtctaatggccttttgggaaaaaacaaatcactaactcataatcatttatatccattattttctgcataaatgtaatgctattgtacagggtttggtagaataaatattcagactgactaaactgttctaaatcctcacaaaaaagtccccaaacaacatgcctcctaaaaaacattttcctatcttttacaagaggtatgaacatttgtagggtttccacatttgcatctagaaatccaatgctctttagaatgttattacgaatagaaagatggccaggatgacctttagtgttacatgatgttcagcaaattttaattcaaaccttgatatgcctggacactgaaaagtaaacgcatcacctcctattttataccctaccttctggttcccaattgggagagcacatagagggaaggagacaatatagaaactacggagtccgctggtagtgggctgcatggtgtgacagagcccttctctgtaaaatggaaatgacaccacttagccatctcaatagttacaagaattaaaagagatacagtacctgaagtgcttagcgcatggtagcatttcataaatgtttagtgtcaatactaatgctctaataatgtaaattgttaataatttatttccctaatatcaggaaatcccagttgtctatgtggcccagtgcttaaaaacgccttcttgcatgaggggattgaactatacaatgtttgttaactttgtatttgtattttttcctataaaatcttaaaataaaattaggagatgtgttctgatgtaacagtaaaaaaaaaa

SEQ ID NO: 46824 - DNA, 1549 bp, Homo sapiens
ttttttttttttgtgtggtaccttttatttagtcagtcttcatttaaatgtgtgcttttgaaatcactaaatatgaccttttcagaattcaattctcacagtatttacagtgaactttgtgcaaacaaatccccctttgtgcaaagggggagcttcctgctccccgtttcacattaataacttacaaattcagatcacaacaaaaccccagactctagttttctgtttgaaaggtactgagctgggataatgggttgctaggaaagagctaatgcaagcccaaaggaaataaaatgttttctttatcagaaaagaataataacaaggcctcactctccaaaggaaaacagacgtcccaagatgttgtggaacagtattaagtaaccaaatacaattccaatggttatttcaccttcattttttatacttacactcatctcttttaattaaataagcgaaaccaggaaagtgcaattcgaagggactctgaactgtcagggaacgttataaaaataatctgacgtcagtgactaaagagtgcgggtcatcaggctgccggccggcctcctgcaagggcactggccagggaggcacagctgccaaagcggggaggtgcgccaggccccacatcacctgcctcggggtccatgccaggcaagaaagaaacatacacctgggcctagccaagggtggtgccctgccaggtaactcttcaggtacaaaatctacaaaggggatcagtccctggagaacacatttctcttcccctctctaggcagagaaatacctggctgaagaaaaactacacaacactcaagtaatgtataagggagggttcctgtggaaggcaacgattcatgatttagaaactgaagtgtaaaaaatacagatcaacaattgtgcctttcattcttgtaaaatatcgctttaaaatcccgttttagatggttgatgtctgaaacgaaaccacggccttttaaaatatttttgattccaagcctttttataaggaagaggaattaacacctcaatcatcctagtcacaagagactattcaggaccaaaactgtataggctttctatgtgttcactaaagactgtgatgggcaattatagaatgacagcttattagaaaaaaattgcttttatcaacatctgatacaatggctctgaaaaaaatttattgatggatctgagaattttttcacacatgaatcatttctccttccaatggttattgatactgatagaagttccccgctgagactccctggacccatggtttgtgcctgctgggcatcccactatgctgattcctactctaaaagacacttacagcagaaagcattcacccatgaccattatgaaggaaatattctgtccctcactcaccctctggaagctaatatggagcagcagtcactctatccagagccacatgttcacagttctctagcaagcaggtcacaccccgtgggtcccctattccccgtgacccttgttgatccatcctcttcctgctcagttgctcccctgctcacctggactg

SEQ ID NO: 46825 - DNA, 1742 bp, Homo sapiens
tcgggccgcggcggcgcttggcagccaggagctctgcattgaaggcactggggtaaagtgaatgccgaagacagaagatttggatgatacaccactgactttctttgtttggaatacacgttatgaaccctttctggagcatgtctacaagctctgtacgcaaacgatctgaaggtgaagagaagacattaacaggggacgtgaaaaccagtcctccacgaactgcaccaaagaaacagctgccttctattcccaaaaatgctttgcccataactaagcctacatctcctgccccagcagcacagtcaacaaatggcacgcatgcgtcctatggacccttctacctggaatactctcttcttgcagaatttaccttggttgtgaagcagaagctaccaggcgtctatgtgcagccatcttatcgctctgcattaatgtggtttggagtaatattcatacggcatggactttaccaaggatggcgtatttaagtttacagtttacatccctgataactatccagatggtgactgtccacgcttggtgttcgatattcctgtctttcacccgctagttgatccccacctcaggtgagctggatgtgaagagagcatttgcaaaatggaggcggaaccataatcatatttggcaggtattaatgtatgcaaggagagttttctacaagattgatacagcaagccccctgaacccagaggctgcagtactgtatgaaaaagatattcagctttttaaaagtaaagttgttgacagtgttaaggtgtgcactgctcgtttgtttgaccaacctaaaatagaagacccctatgcaattagcttttctccatggaatccttctgtacatgatgaagccagagaaaagatgctgactcagaaaaagaagcctgaagaacagcacaataaaagtgttcatgttgctggcctgtcatgggtaaagcctggctcagtacagcctttcagtaaagaagagaaaacagtggcgacttaagagatggtgaatctggtgcaccatgcactttcctgctagactctggcctagttcaagctgaccaatggcagaggactgcctgaagagtaaaactgtgtgaacaatgactgactgccagtgttttccatgtatgcataggttctaacagcagggtttggaaacctgtctctaagtaatgcattacttctgtcagaagtgtcttagggtggttatctagttcagtactccaaattattggggaccttgaggcttaagtaagtatttttctgaatataatgctaaaggtaagttgcattcatttaaactaatagagcagacagaattcagcactacttaatagtttataaatcagtggtttcagttgtatatatgttaggaaatggagaggtatagagagagcaggttccatagctcagcacttttaagtggaagatcatttgaatctcagtcttcagcctgcactgatttgtagcctgcactgtcttactgatttacaaactgaaatcactgagaaatgtctttagttcagtgagaagaaaccagaacacttgttcctagtgttgtgttgttttttttaagcaaattacttacttactgtatttttatggcaggagggagaaaaagtgttacaacggtttctaatgaagtccggtatttaaatgataaatgactaatgtgtttagtagagacaaaataaaccaataaatgattgttctttgccatttaaaaaaagaaa

SEQ ID NO: 46826 - DNA, 494 bp, Homo sapiens
atctttctgttgattcgtcttttctggagattgggacagagcatctgtggtccagggaagttagtcctctggcctcaattctgttgtggatgtgcagtgataagcgggcattgcgtgcctcgggggatgcctagttcgtggcttcctggctgttttgtccttctgtgtcttgtagctgtagggtgccagctcagggagtggggtgttggcggcgtttccgcggttggcctccttgctttgccgcacctccaggttctgggcatgagaggccgtggcctcatttctggtggataacctttttagtttaatagcatctttaattagatcacagcattgaattcaaaatttcttctgcaaagaaagttgtggggcataagacaccgggaatgagggaggaggaagacagttgtgttttctctttaaaccttgagctctagccgatgcatttgtcaggaaatacagcactttgtcttaagaaaacaaggaaggaggcc

SEQ ID NO: 46827 - DNA, 731 bp, Homo sapiens
tttttgaaaaaaaaaattgacaaactgctagacagactaagaaaaagagaagacacaactaagtaaaaccagagataaagaaggaaacattcaactgatactgcagaaattcaaaggatcattagtggctactgtgagtaagtacatgccaataaatgagaaaatctagaccaaatggaccaattcttagatacctacaacctctcaagattgaaccatgaagaaatccaaaacctgaacaaaccaataacaagtaacaagatcaatgctgtaataaagtctcccagtaaagaaaagcctgggacctgatggcttcactgctgaattctaccaaacatttaaagaagaactaataccaatcctactcaaactattctgaaaaatagaggaggagggaatacttccaaactcattctacaaggccagtattaccctgataccaaaaccagacaaagacacatcaaaaaaagaaaactgctggccaatttctctgatgaatattgatgccagaatcctcagcaaaatattagcaaactaaattcaacaatacattaaaaagatcattcatcagggtcgggtgcagtggcttaagcctctaatcccagcactttgggaggccgaggtgggcagatcacctgaggtcaggagttcaagaccagcctgaccaacatggtgaaacctcgtctctactgaaaatacaaagttagcccgagtgtggtggtgcatgcctg

SEQ ID NO: 46828 - DNA, 1423 bp, Homo sapiens
ttttttttttttaaagtggaaaacatgtttattaacattcaaactcccctcatacaaggccatataaaaatccttagcattttgattatacattagtctacactttctacatagttacaatgatgtataatttagcttttcataatacagtgtttcaatacatcattagttctgttaaacataagtcacttactttcaaatccaatacttgaacagtttcctctgtacatagtttagcagggctaattagcataagatgctatttattaagaggtatatgatctgagtattaacagttgctgaagtttggtatttttatgcagcattttctttttgctttgataacactacagaaccccttaaggacactgaaaattagtaagtaaagttcagaaacattagctgctcaatcaaatctctacataacactatagtaattaaaacgttaaaaaaaagtgttgaaatctgcactagtatagaccgctcctgtcaggataagactgctttggaacagaaagggaaaaaacagctttgagtttctttgtgctgataggaggaaaggctgaattaccttgttgcctctccctaatgattggcaggtcaggtaaatgccagaacatattccaactcaacaactctaggtaactttatggaggtggaagctgggttagttcatgctaggtggctgtagcactgacctcatgtataaaacgcaaaacacttaaatactgtgatctaggtcttaattgcaagctatactgaggatttttttttttttttatgttttggctatactttcattccaaaagaagagctgaattgatgcttgagttacagcaccagtctattattagtgaatgaagtatattcttggcagataaataccagatcaaaagtcctgtttcagtaatttgattaaactgtagaatactaaaaaataagttatttctacagaaatctttgaagggagcaaaaaatcaaattacagtatatacctaatcattttaaagggaaataaaccaatcatcttctgaaagtcaaacagtatttgctatgttgtaatcccgttcaccattaggctgcaactggaccacgacatcatgttcattaatttcattttctgcatcactactgtcagtatcttcattgtcgtcttcctcatagtctgaagattctgtcatgttctgatgtgagcgggattccgataaagccccaaatgactgggcactgacagaagctaaaggtctcagtaaaggggtatgttctgtcacttcattttcttcttgactactgtctgtgtcagagtctgaatcgccttgagaaggaacaactttttgcttgcacactggacaggtttttttggttttagttagccaagggtctacacacttgcagtgataagcatgggaacagggaaggattc

SEQ ID NO: 46829 - DNA, 329 bp, Homo sapiens; identical to SEQ ID NO: 18214

SEQ ID NO: 46830 - DNA, 92 bp, Homo sapiens
ggaaagtagattagtggttctgaggggaagtagggggagaaggaaatgaagaatgtctcctaataggtgtagggcttcttttggggggtgat

SEQ ID NO: 46831 - DNA, 2229 bp, Homo sapiens
aaatttcagaaaagaaaaaaatagcagagaagataaaagagaaagaacggcaacagaagaaaaggcaagaagaaattaaaaagaggttagaagaacccgaagaacctaaagtgctaacaccagaagaacaattagcagataaactgcggctaaagaaattacaggaagagtcagacctcgaattagcaaaggaaacttttggtgttaataatgcagtttatggaatagatgctatgaacccatcttcaagagatgactttacagagtttggaaagttactaaaagataaaattacacaatatgaaaagtcactatattatgccagttttttggaagtcttaagttcgagatgtgtgtatttcattgggaaattgatgacttgaaaaaaattaccaattcactgactgtgctttgcagtgaaaaacagaagcaagaaaagcaaagcaaagccaaaaagaagaagaaaggtgtggttcctggagggggattaaaagccaccatgaaagatgatctggcagattatggtggttatgatggaggatatgtacaagactatgaagacttcatgtgacattttatcttttcttggtgtcatctttatgttgcccacaatcccttgaacatgtagcacaacttcctttcctttcagttctgccaaatgctacaatcagaagtgcagtatcttttgtgctggttatttaaccccttgacacttaggtgctaatgtgcaaatgagggaacttggatcttgctgccaaggggttaaaattgggaacctaagttgctactaaatcatagttcaaaacctaataatgttgtcgttgttgctatctgatttcatagcagcagtcactaaattggaaacaaaaggttgcaacgtgacaaaaaaaattgtgtagtatttaccagcaccattcagtaatacagccttaaccatacctccttgaactacttcataacttgtcaagaaaagcagtttgcagcaagggcatgtggtgtgcacctagtattaaaattgctttgtcttaaaattgaacatgaggatattaaaaatacattgtgaagaagactgcttatctcagagtgaagatactgcggctgaaaagcactagtttgatataaaattaaaatgaccaaaaccctccaactttgaagctaaagaaggtaaacctttccattattgcattacatgttgtggaatctctcgagtgcaaagactgtctagttatttatcaggctatttctactgatgaactgcttcaggtgggggagggaaacttatttttatttgcctgatttaagtgtctgagaaacaaatctttgttctcttaggctgcaatggaacaactttaccagggttttggcatttcctttcctttcctttataaaacatgctcagcaaactgcaccagttaactacagtttggtaaattgttatgttaacaattatgacatctgcaatgttttataaagcaactaatttaataaaatcactgttgtgaggacttaaattttgtgttacctcccaagagatactttttgagagtatagaacacagctcttgggagtacagttctctacgttctctactaaatcttaataaatgcttgacatagttacagctttaaaacatgagtgatttgccaggtccttatgttgtcaccatagagcaacaaaggtatagggctgccttcctcttatttatttggggacattattttgttatttagataccaaggcctaattaattaagtacctataagaactatttatttggagtaactgagcctgtaactcaggtttatggctgttaagtatagattggggaatctttattatgtcttctcctaagcagtttaaccaaatgtgtggttagtgtttttttattcccctaagacagaaagaacaaaaaatgttttaaatttctcttatataggaaataataggaacgtcaaagctctgtatacctactaagtggaaaacaagaccatcatctaagtgatttgagaaattaacaaaagtagtgactacacagcaataattacagtaaattaaataaagattcctttaaggcagacaagggctaagatttccttagcagtaataatgacatacactgaattgaaaatctattttattacagaaagatcagtttctaacaaatgaaaatgtatcacctgttccttaactgtgtaaataataattaaatttctttgaaactggaaaaaa

SEQ ID NO: 46832 - DNA, 1361 bp, Homo sapiens
tttgcaggtaaaagaaaagactttattaataatcagtgggtgggaggtgagggtgtgcaacgcactgcaagcgcccagttcctcggaggacggcgcgtggctcagtccaggctcatgtcctcctcttcgtccttcttgtccttcgtgtcgccctctttctgctcgggcttggcgttgttctgcatggctttggcaaacgcttccacatcgcccttgttggcggcctccacagcctctgcaggcagaccgaactggcacatgagggggcccagctgccccgaggccaaggctgcgctgaacatgcccaggggcctgctggaactggggcgaggtcagggtattctggatctcatccgcggtctgcggcagcgactccccagatggcaagtagggaagcaggcgctcctggacatccgcgttggcgaggatgggagccattatctccggcgtcagcacactggccaggtccacttgctggccgcctgctggcccggctggtacgttcatcgtggccaggatgctctggaggtcgctcagctggatgggctgggtcgggctggctgctgtgctggctccattcccggaactgggcgcggggctcgggctagttgctgaggcagctgctggagcagaaggggctggggtggcacgggtggaagaggtggtggatgacggggtgaccgctgccgactggctccgggagctggaggaggagctgctccctggaggcccactgctccccagtaagctggccaggccaggtccagtcagggcccccagcccacccagtcctccgaggccggctggtccgatgagctgcatgagctggctgtggctcatgtttcccagcaggctctgcaggccaccctcaccgcctagcgcagagagttcgtgggccgctgcttccgctggcccccagtgccccaggcatcggggggttgttcagatactcgttgactttccggcaatgctcctcatcctggtctgtcttgggttcctgcatccagaagaaaagccgcttggaccctgccttgaacttcagcacgtagaccctcccgctggggcactgcggcacccgcttgaactcacagtcgtcagggaagatgatcaagtcgtcttccacgttcccggacgtcctgtccttccagcagaagtgaataagcgagtcgtccgtctgctgaatgtacaccagccctttccgcttatccggagtcacggtggtccccttcagggacatctttcccgcccgaaactccaccaagtacttgttggaggcgccccgagagcctggcaccaggcttggaaagagcgcgcctgaggtcgtcatcctgcctcgcgcccacactcgttcgagaggcgcc

SEQ ID NO: 46833 - DNA, 1879 bp, Homo sapiens
gtctccaggtttttcatttgttgcaagcctactcagactccaaacacggaacgaattcagacttccagcacgagctgactgacatcactgtttgtaccaaagccaaactctggctggccaagagacgtctcaggaatgtctaaggtcatgatatctccggatgagatcctgtttgtgttttttaaatacaaaaggaaacattatcgtatttcaacccaagccagtgggacaaggcaaaatccatgtttggtgaccagagctgtatatattgatattctcttcctattgacttgctgcctcaacagatctgcaaaggacaaccagccagttctggagagtcttggcttctgggaggaagtcagagggattatctcaggatcagagctgataacgggattcccttgggccttcaaggtgccaggcctgccccagtacctccagagcctcaccagactagccattgctgcagtgtgggccgcggcagccaagagtggagagcgggagacgaatgtccccatctctttctctcagctgttagaatctgccttccctgaagtgcgctcactaacactggaagccctcttggaaaagttcttagcagcagccttctggacttgggagagaaggggcgtgccacccttgctgtgcaacatggggagagaagttcttattgttgggccatgaaggaaaatcacccagaatgcttctgcaagatactgaaaattctccactgcatggaccctggtgagtggcttccccagacggagcactgtgtccatctgaccccaaaggagttcttgatctggacgatggatattgcttccaatgaaagatctgaaattcagagtgtagctctgagacttgcttccaaagtcatttcccaccacatgcagacatgtgtggagaacagggaattgatagctgctgagctgaagcagtgggttcagctggtcatcttgtcatgtgaagaccatcttcctacagagtctaggctggccgtcgttgaagtcctcaccagtactacaccacttttcctcaccaacccccatcctattcttgagttgcaggatacacttgctctctggaagtgtgtccttacccttctgcagagtgaggagcaagctgttagagatgcagccacggaaacccgtgacaactgccatgtcacaagaaaatacctgccagtcaacagagtttgccttctgccaggtggatgcctccatcgctctggccctgccctggccgtcctgtgtgatctgctccagcagtgggaccagttggcccctggactgcccatcctgctgggatggctgttgggagagagtgatgacctcgtggcctgtgtggagagcatgcatcaggtgggaagaagactacctgtttgaaaaagcagaagtcaacttttgggccgagaccctgatctttgtgaaatacctctgcaagcacctcttctgtctcctctcaaagtccggctggccgtcccccaagccctgagatgctctgtcaccttcaaaggatggtgtcagagcagtgcccaccctccctgtcctcagttccttccagagagcttcccacccagctgctgagtttgtgaagacagtggagttcacaagactacgcattcaagaggaaaggactttggcttgcttgaggctgctggcctttttggaaggaaaggaaggggaagacaccctagttctcagtgtttgggactcttatgcagaatcgaggcagttaactcttccaagaacagaagcggcatgttgaagaaaatctgggggattgggatgggggtatgtgtggatttttcctccactaaatctgcaggaaacatgttgaacataaattcaaaaattttatcccaaaaaaaaaaaaaaaa

SEQ ID NO: 46834 - DNA, 1056 bp, Homo sapiens
caaagacctgacgggagaggtggaggaaaatgagagatatgcatatgaatggccagagatgcctggggagtgccctgaatgtcattaagaaggcaaatgataccttaaatggaatcagtagtagttctgtttgcacagaagtaattcagtcagctcaaggcatggaatatttattaggtgttgttgaagtgtacagggtaaccaagcgtgtggagctggggataaaagccactgcagtgtgcagtgagaaactccagcagttgctgaaggacatcgataaagtgtggaataacctaatcggcttcatgtcactcgccacactcacaccagatgaaaactcgctggatttttcctcctgtatgttacggcctgggattaaaaatgctcaggagcttgcctgtggagtgtgcctcttgaatgtggactcgaggagccgggcattcaactcagaaacagacagtttcaagctggcctatggagggcaccagtatcacgccagctgtgccaacttctggatcaactgtgtcgaaccaaagcctcctggcctcgtcctgcctgacctgctctgaacaactcctctgtgaagcattgacttttttttttctgtgacaccccacggggtgacagggaccaataaatagaatgcgagcactgccacagttcgcttccctgaatcgatatgaagaacaccgcaagggacggggccccccgtcatccccacggccagtctgcaggacttcaggtaaaattgtcccacccaaactgcacgtggcaccagaagcttgctcacttatctctacttaagattttctgaaatacggaccacggctttcttgatctaaggaagaacttgctgctgcagtattgaaactgtgaagaactgacatttgaagaaaaatagattaccgttgcgggactagaatgggcgactgcttggagccagtgcttgtttttatctaggacacttactgtcctgtgaagtagaatacatttatctgcatttagtttgttaatgtctgaaatgaataaaaagaggaaattgcgattaaaaaaaaa

SEQ ID NO: 46835 - DNA, 3018 bp, Homo sapiens
gaccgccgccacttgggcagccagcacaatcgggcggaggtggcgctgccctttcagacctgaaagatgtctgaaaattccagtgacagtgattcatcttgtggttggactgtcatcagtcatgaggggtcagatatagaaatgttgaattctgtgacccccactgacagctgtgagcccgccccagaatgttcacctttagagcaagaggagcttcaagcattgcagatagagcgaggagaaagcagccaaaatggcacagtgcttatggaagaaactgcttatccagctttggaggaaaccagctcaacaattgaggcagaggaacaaaagatacccgaagacagtatctatattggaactgccagtgatgattctgatattgttacccttgagccacctaagttagaagaaattggaaatcaagaagttgtcattgttgaagaagcacagagttcagaagactttaacatgggctcttcctctagcagccagtatactttctgtcagccagaaactgtattttcatctcagcctagtgacgatgaatcaagtagtgatgaaaccagtaatcagcccagtcctgcctttagacgacgccgtgctaggaagaagaccgtttctgcttcagaatctgaagaccggctagttgctgaacaagaaactgaaccttctaaggagttgagtaaacgtcagttcagtagtggtctcaataagtgtgttatacttgctttggtgattgcaatcagcatgggatttggccatttctatggcacaattcagattcagaagcgtcaacagttagtcagaaagatacatgaagatgaattgaatgatatgaaggattatctttcccagtgtcaacaggaacaagaatcttttatagattataagtcattgaaagaaaatcttgcaaggtgttggacacttactgaagcagagaagatgtcctttgaaactcagaaaacgaaccttgctacagaaaatcagtatttaagagtatccctggagaaggaagaaaaagccttatcctcattacaggaagagttaaacaaactaagagaacagattagaatattggaagataaagggacaagtactgaattagttaaagaaaatcagaaacttaagcagcatttggaagaggaaaagcagaaaaaacacagctttcttagtcaaagggagactctgttgacagaagcaaagatgctaaagagagaactggagagagaacgactagtaactacggctttaaggggggaactccagcagttaagtggtagtcagttacatggcaagtcagattctcccaatgtatatactgaaaaaaaggaaatagcaatcttacgggaaagactcactgagctggaacggaagctaaccttcgaacagcagcgttctgatttgtgggaaagattgtatgttgaggcaaaagatcaaaatggaaaacaaggaacagatggaaaaaagaaagggggcagaggaagccacagggctaaaaataagtcaaaggaaacatttttgggttcagttaaggaaacatttgatgccatgaagaattctaccaaggagtttgtaaggcatcataaagagaaaattaagcaggctaaagaagctgtgaaggaaaatctgaaaaaattctcagattcagttaaatccactttcagacactttaaagataccaccaagaatatctttgatgaaaagggtaataaaagatttggtgctacaaaagaagcagctgaaaaaccaagaacagtttttagtgactatttacatccacagtataaggcacctacagaaaaccattcaaggccctactatgcaaaaagatggaaggaagaaaagccagttcactttaaagaattcagaaaaaatacaaattcaaagaaatgcagtcctgggcatgattgtagagaaaattctcattctttcagaaaggcttgttctggtgtatttgattgtgctcaacaagagtccatgagcctttttaacacagtggtgatccctataaggatggatgaatttagacagataattcaaaggtacatgttaaaagaactggatactttttgtcgctggaacgaacttgatcagttcatcaataagtttttcctaaacggtgtctttatacatgatcagaagctcttcactgactttgttaatgatgttaaagattatcttaggaaacatgaaggaatatgaagtagataatgatggagtatttgagaagttggatgaatatatatatagacacttctttggtcacactttttcccctccatatggacccaggtcggtttacataaaaccgtgtcattacagtagtttgtaacatttgtagattggatagcatttttatgatttgatgagtttcttgtaaggttaccgtttctaagagttgtgctttatggccactgagagaattcagaataaattgaaagatggagtctaaaaattattagctgttacaaatggaacatttcattataacgtgatcactttgacttgagcaaatggtttaatttttatcttaaaaatcagttaagaatatataaaatcctactttggccaagtttgtttcttttcattatagtttatatgaaaagatcaccttaagtgaaattattttccttattttcctttaatcttttatgtatttattcacttttggaagctaggaatgagcaacacaaattttactctgaagtcagaagagctcatatataataattctaatgtcccacctattttcacttgtccattccatgtaccagcttagttatgatacttagtcacataattatctttgataaaggtagaggcacaaagaggcaaactaagcaagtcaaattctaatgtgtgtacttcataataattttttatccattttcatcttctttatctttatattctgtaacatgaaacttacctaatcttcaaatgttagcttcattttttacctttgaaatacttaatctttctgaataaatataatgtgtctataaaataaaaaaa

SEQ ID NO: 46836 - DNA, 348 bp, Homo sapiens
gacggaaccgcctggatgcagaactgcagctgagtgcccgcctcatccagcaggaggtgggccgggctcgggagcaaggggaggcagagcggcagcagctgagcaaggtggcccagcagctggagcaggagctgcagcagacccaggagtccctggctagcttggggctgcagctggaggtagcacgccagggccagcaggagagcacagaggaggctgccagtctgcggcaggagctgacccagcagcaggaactctacgggcaagccctgcaagaaaaggtggctgaagtggaaactcggctgcgggagcaactctcagacacagagaggaggctgaacgaagctt

SEQ ID NO: 46837 - DNA, 478 bp, Homo sapiens
gaaagtgctgggattacaggcgtgagctgtgcctggcccaccccagcattttttaagatgtatgtattcgttgttctgtttttccagatgattctgtcgtaaagtgatgctatgttgtcgttacaacatcaaagtgattttacggtttttgatgggattattcaagtgtcagaattaactgttcaaaatgttctgaatcatgtagatacatggcaggtaactgtttatgggagaaaagtacagtgctgttacgtggcactgtacagtcatgtgccacgtaacagcgtctgggtcagtgacggacacttacctgacagcggatccacaatattctcgtgcagtgtgtttggaatcctggtctgggctctcggcgttggccttgtagatcaagtaggggaagtgagtgatgttcagtcatgctgctgggacacttggttttccagatgaaaacacataaataaaactacatgcaccatca

SEQ ID NO: 46838 - DNA, 939 bp, Homo sapiens
ctcgcaacactcgtgccacgggtgcaagattggcccgtccatcctcaacagcgacctggccaatttaggggccgagtgcctccggatgctagactctggggccgattatctgcacctggacgtaatggacgggcattttgttcccaacatcacctttggtcaccctgtggtagaaagccttcgaaagcagctaggccaggaccctttctttgacatgcacatgatggtgtccaagccagaacagtgggtaaagccaatggctgtagcaggagccaatcagtacacctttcatctcgaggctactgagaacccaggggctttgattaaagacattcgggagaatgggatgaaggttggccttgccatcaaaccaggaacctcagttgagtatttggcaccatgggctaatcagatagatatggccttggttatgacagtggaaccggggtttggagggcagaaattcatggaagatatgatgccaaaggttcactggttgaggacccagttcccatctttggatatagaggtcgatggtggagtaggtcctgacactgtccataaatgtgcagaggcaggagctaacatgattgtgtctggcagtgctattatgaggagtgaagaccccagatctgtgatcaatctattaagaaatgtttgctcagaagctgctcagaaacgttctcttgatcggtgaaaccataaggagcccagtgttcctgttcatgaaatctcccttttactggaaaacaggaatattgactaccaaatcacaatgcaattgaagccgtactgcttttttgagcagttattcattccagtgattaaaactgattgtgcagaatattctaagaggtcagaaattggtgtgtataactacatttttagtgatgcaatttattgattagtgagtaagatactgtttttattgagagattt

SEQ ID NO: 46839 - DNA, 1451 bp, Homo sapiens
gcggagagattcgggagcccgctctggagatggcgcagtggacttttgaatcagctgtgcaagagaatatcagcattaatgggcaagcatggcaggaagcttcagataattgttttatggattctgacatcaaagtacttgaagatcagtttgatgaaatcatagtagatatagccacaaaacgtaagcagtatcccagaaagatcctggaatgtgtcatcaaaaccataaaagcaaaacaagaaattctgaagcagtaccaccctgttgtacatccactggacctaaaatatgaccctgatccagcccctcatatggaaaatttgaaatgcagaggggaaacagtagcaaaggagatcagtgaagccatgaagtccttgcctgcattaattgaacaaggagagggattttcccaagttctcaggatgcagcctgttatccacctccagaggattcaccaagaagtcttttccagttgtcataggaaaccagatgctaaacctgagaactttataacacagatagaaaccacaccaacagagactgcttccaggaaaacctctgacatggtactgaaaagaaagcaaactaaagactgcccccagagaaaatggtatccattgcggccaaagaaaattaatcttgatacatgagctctttctgtttattttgggagttgaaaataggcaccatcaacatttagattacagcctaattaatacctagataagacttcatttgaaataagaaataactcttttactagtgattcatttatacagatatagtatctctgtgcggggatatgatataatattgtatttccttactgttttatctattgtaaataaaaagcattttaaaaagtattgacacaaagcccatcagtgggcattaaaaatattaaaagtgcagacttttactgtccttaagtgccatcaactctcagctcccttgtagcttttgtgggatttaacaagtaacaaattctgttgtgtttccaatggtatacatctttctaggaaaaaaaaaaaaagagagagagctgtataatgatttttcgtttacatgctgaaaagtaattatcagtttctgcacagcagcagatgcagggtttttttttaaagatgtagtttgatttatcaaattaatgtgctgatgataatactggctttgactttgttactccatgttcagctaatttaggtttgtgagattaactttaggattttttgttgtgtaagacaatgataactattatttgtgcaacattactctttgaaataaaaattggcatgtagccaatgtttcctgcccacactcacttttttctatagaccattaacataatttgacttggaactaatggtttctttttagggtttcttatttatttctttacaaatcattccagttcaaaatatatatcagattaatacactgaaaaaaaa

SEQ ID NO: 46840 - DNA, 1720 bp, Homo sapiens
ctaggtcagctttggcgacactgtgtcttctcacataaccacctgtagcaagatggatcataaatgagaagtgtttgcctattgatttaaagcttattggaatcatgtctcttgtctcttcgtcttttctttgcttttcttctaacttttccctctagcctctcctcgccacaatttgctgcttactgctggtgttaatatttgtgtgggatgaattcttatcaggacaaccacttctcgaactgtaataatgaagataataatatctttattctttatcccccttcaaagaaattacctttgtgtcaaatgccgctttgttgagcccttaaaataccacctcctcatgtgtaaattgacacaatcactaatctgggtaatttaaacaattgagatagcaaaagtgtttaacagactaggataatttttttttcatatttgccaaaatttttgtaaaccctgtcttgtcaaataagggtataatattggattattaatttatttttactttctataccatttcaaaacacattacactaagggggaaccaagactagtttcttcagggcagtggacgtagtagtttgtaaaaacgttttctatgacgcataagctagcatgcctatgatttatttccttcatgaatttgtcactggatcagcagctgtggaaataaagcttgtgagccctctgctggccacagtgaggaaagtagcacaaataggatacagttgtatgtagtcattggcaacaattgcatacaattttactaccaagagaaggtatagtatggaaagtccaaatgacttccttgattggatgttaacagctgactggtgtgagacttgaggtttcatctagtccttcaaaactatatggttgcctagattctctctggaaactgactttgtcaaataaatagcagattgtagtgtctggtttggtttggacagtagtgctttctatcatattgttgtgtgcaatggtaatttgttctactggccaaagcctctttcagcagtgccttgccatcatgcttaaaagtttggctagtatatcttgctggatggagccttgaactccggcaaggattgaaccatctgacttccaaatttgccttcccctctggacctcactattaacaagcaaacctttcagggccctcttagctctcagaagctatgtatgggctttcccagattttaaagctgctgcctcgagaactactcatttctctcctggtcagcagacagaaatagccatactaatctcatagggctcaaatgcatcttcaggcagcagggaaccaagcagcgtggcacaggccttcttgactggaggaagagcttgctggcatggtgggcagtattccaggagaggccatgtccgtgttcacttcttggcacatttcagttccgttttcctcttgtttaaaactgcctctttagatgtggatgccttaatgctgtaacacatttgaaaacattggcaatacttaagttgctgccatgattacagatggaattattggctaccaaagagacgcaattgatgatgagaagcatgattcttgcttccatataaccaaagttaatcttaattgcaatttgactccgtttccttggtagggatagactttcttcagattccaagtgctctcttaaatggcaaattaagttaaagaatactactgctccattcccctcacttattgtccagc

SEQ ID NO: 46841 - DNA, 402 bp, Homo sapiens
agcgatgggaacatcaggccaattactgagaaatttcctattgactgaaatcatgtgtgacagtttcagaaataatgataggctctcgtatatgttggtacgagtttactgtaaaaatcaatagcccgacttggtgctcaggctctgttttctccttcggtgatatcgaaactgactttcagccctttcattgcacttgtgactccgggggacacgtgctgatttcctggttctatcctaacggtgcctgcccttttctgtttactccatgtcagtgcaggcattgataagaattctagtcggtggggtggtgaagacatcaagagaccttaacctggggtttccttgctgtatcttaaacttttgaccaccattcttacatttgctgtgatcagtttgtag

SEQ ID NO: 46842 - DNA, 5390 bp, Homo sapiens
  misc_feature (1)...(5390): n = a,t,c or g
ttttttttttttaaggaaatagctttctgaggtttctttaaaaaccatcctgaaangcangcagctgatgaagccacgtggaaantntntaaagcagtttaaagatcttaataaacgaggccctcataggccccttgcttgggcccactgcatggtgaaccatgtgcagaaatgtcttcccagctgtgatggtttcacattgtcatcgtcgtccccccgggaggttggagcatcaggggcctggactcactggactctcccctctcagaggtgcggaactatatctgtgacgaatgtggacaaaccttcaagcagcggaacaccttctcgtccaccaaatgcgacattcgggagccaagcctttgcagtgtgaggtctgtgggttccagtgcaggcagcgggcatccctcaagtaccacatgaccaaacacaaggctgagactgagctggactttgcctgtgaccagtgtggccggcggtttgagaaggcccacaacctcaatgtacacatgtccatggtgcacccgctgacacagacccaggacaaggccctgcccctggaggcggaaccaccacctgggccaccgagcccctctgtgaccacagagggccaggcggtgaagcccgaacccacctgaggacggcagtgaggatgagcacctctagcagcctggactccgcagtggctgtgtcagcctcacccttcgtgtgcacccgcatgggagggtcggagggtgctgcccgcccttggtgctggaggcgggcttggtgtccggctcaagtagccttcctctgctctgggaccagtggtttattttcccgcaaacgctgagtgactcggggccggacagttcataaataattgattcctttccccactaaagcagtcgaggagatttgtaatccactttttagtgcaacaagagctccatgttatgcttgtaataaattatttacacgggagctgggctggtgtgcagtggcaggtcccgtcagaagagatgaggctcctgggacaggtcagcgtcaggggcagcctgctgtctgctctggagggcggcgctcacctctgggtcgcagtccccacgatcagccagcagctctgccacgtgtgagaagctctttttcgggcaccgaggtattaactgcagcagaaaaagacgagcttttgttatcagttccacggggttgccctgacccttgagctccaggctcctgccagctggaggtgaaactgtgcttgtatccccagccacgaagagctggaccagcttcaagtacatgtccacagcaacatgcaggaaggcctcttccctgatggccgcgtcttcatggaagtaggagagaagactgtaaaaagcgaaaggcagcagcctggtgtgctgatccggggccacacggaggaggagccgccccagcctgaggtcactctctgtcaactgaaagagtgccagccaggatatcttcctcttctctaaacactcgaggattgctgcacaaacgtggaaagcctttggcaggtctgtggtgctatttgaggtcagatgtgacgacagcaggcccatcaaggagaagaagaaaaggaaaaccaatagctcctctctctcgcagtccagcttctttagctgcttcctgatgttttcttccctgacttgttgaatcgcaaagtgcagtgcagcagctgagagccagtccgggttgggtgctggggaggcagcctcaggggagaggaaatcgctggcaaactgccggccttcttgtagcttctgcagttcccggggcagcgggctctggcagtgtctcctccaccggcagagcagcacaggctccaggctcggccaccacaccagagcagaggtcaaaattaaggggcatttcgtctggcacttggccagtatgaagtcgaccatcagggaggggtcttcgccgcagacaggcgttcaggaggcccctgaagaagtgggcagtgatgtcctgtgtcagggcacctccgtgggagcagaagtttctcatctcagagttgaccaagtggaagaactgctcgcatctggcagtgatgggctgttctgcctggaagctgctgccgcagaggacagacgaaggcaggcggaggaggatccgtttgtacattagcagctccctctgtctctgaaggctggcagccacgctccacccgcttgtcagagcctggagccgtctgcggaaaatctcaaagaggaagtgctcctgggaaggggtgtggccgagaggcactatgaggtcttgctgcagctccaggtcagctaccatctcctgcaatctggaaataatatcctcatttcctgtgcggccaccaaagaccaaatcagaattttctgagtggtcataactccttgagctttggtggaaatccatcagtgcgttgacaagaatggtacacgcagcctgcaggtctccgtcacagccccctgaagccgaggactcagggagaaagtgctcatggatcgcccactggtggaagtcctgccgttcagtatctgaaagagcatcagcttcaggttgaatttccagctccaggtgtaaccagtcttggtaagttaagtgaacatcttcctctttcaacacctctcggaaggttctgtgtgtccagagagagagggcagctctctgccagtctgcagaaggaaggtgcaagggtctccaggaaaggctggctacgtcctcctcagaaagaggctgtcgggcctctgagaacaatctgaacatgaggaactgaaactttttaataaggcctggagataagcagctgcacaaagtatctcgtgactgggaagaaaacttgcagagagagtaagaaattgctgctgtacaaaatttcaggcagaagaacaaggaatccctcgtcctacaggtcaggaggctgtcaaagagcgcagggacaggaaggccagcaccaggtgcaggaggacccacatccacctctgggagcgcagacctggactcacccaggtgcacggccagggcagccaaccccagcacatgtggggcactcaggctcgggccctggtgacggagcagctggcagagccgggtgagcactgcagggagcacacgtccacacatggtcctcacgaagagggcagcccagggaccctgcctctccgggggagcgacactggaggcagccatcaggttctgacagaaagacgtcagcaggaggtccacagcaatgtgttcccgtggctccagtctcggcgtgttgatgctgagctgaatctttgatatctcaacgctgctgtcatcctcattgtggcccaggacagccctcagtctttcagaaatcactgccacctgtgccgatataacatcacgctggctggggtctgtcatggaggctctcagctctcccagtgcagctgtgagctgtcccaggggctcctcagcagagttgggttctgccctcactcccagggctgcatcttctggcttctcttcagcagcagagcaggcctggcagtaggtggagtacagagatggggggattttatctgctctcttcagagactctataaacgccacacgggagtcagggactttggggagcactcgaggtgtgagcagggcggggaggaagtgggacacgtagtaaggcctcctgaatatgctggcctccatgacggtgactgggatgttccccgtatgctcaaacaccatgatggccttttcaacatcctgaagagcttggctgtggggctcagtaatgtccccagctgatgacaaatcctcgtagagtcccatgttttctatagaaaccttgaggtcggccagccgtgtcttggccaatgagatgtagtctgtgaggagggagcggtacttgctgggaaccaggggtgggtggagaatgtgcacctgcaggtaccggggagactcaaaaggcacgagttctgacaagaacgtaaacaggaagaccagggccttcttgctgcagccatggtagcctcgtgtgctcccaaaggaggccttgaaccagtctgcatatgacaggaacgcagaggggccctccagtgctgcctggcgcacaaccaggaacgcagtgaccatgctgtccagctggcagctctcgaatgcctgggccatcaaacgcgccacccagtcttcaagcagctgctgcgcttctggaaagcagacaaccagggcagacacaaaggagagcactctctgccagtgaacctcctgcgtttccagaacttcttgcaaatggccaaccaactcctctgcactcagcatcacaaagagcctgcggtacagtgaggtgagcagagggtgtgtccgcgcaaagctccactctctctgcatctgaacagcatcagatgctttcagcacagggctgtgagtgagtatctgagtcagggtatgactgaagaacctcttcagaggatctgtggaaattacactgccaagcgtgtgtccactgaacactccgaaccagcacctcacgatcttgtgagtggaggactcctcctgtactccagcagccaaagcgtcaagtgcaaaaatcagcattctctgcagtacatcaaccgctgacctgcggcattttttcaggctccacagttcttctcagatctgagtttttctgaaatcccctcaaaacaaacatttgaacaaaatcagaaagcatggccctggcgacgtcagcatgctggcaggatgcttccatctgttcacaaaggcagcacagattcctgaagagccacgatcccacagcatgcatgtcgggatggctttccagcagctcttgcaggctcacaatgccttgtacgtgaagatgccacaccgcttcaagcaacaaagaactctgtattttccataattcttgacagaaggaaagacgggagaacatactgtgtgccaataaatactgagcaaactctaacagggaagacagcttctttctctgctccacagtcagcagcacagggtgactggtctccgctggagccgtgcagatctgtcccacgctagaggcaaccatcccggctgagagaatacccacgggaacccccagccttgaggcttgatcctgcaaagcagagcctataaatgaactagaatgattagcataggcctcagaactgtcacagtcaatcactttgctgagagacaattttttacacagtggaccttctacctcaagcaaaagggcattcaggtcctgatggcttcgcaggaggcgcacagctgattcctttaatttctgtgccctttcaggattatatttttccctcttgacccttcccgccagcagctcggcccaggccctccggcggccccctgggtcctggcccgaggcggagttcgggacccacgagtcggacatggccttggcgcctacagccccggcggcggct

SEQ ID NO: 46843 - DNA, 1281 bp, Homo sapiens
tttttttgtgttttttttttaaaggcaaaaatcttttatttcaacttttagggtagccagcagcctcttctccacatctcagaagcacaaggagacaccctgatcaagaaggcaccggcagaagcggcatggccaccattaattgctttctcttccggtggaaggctgccttgctctcatgagagttgatctgcagcgggatataagcgtctagatgatacagctgctgggggccccccatcaccaggcggttctccccgatctccagcgacagccccagggctccatccagtttggggaggtcaatttcggccaagaggaggtcgggggcttccagccacaggttcaggtgaggcttttcagggcctgactcagctctcccgggggcgggcgtgtacaggtcccccagctcctggatccgaggacgctgctccgagcggatgttctgctgcgagatggagcccatgaatggccggttcttcatcatgcgccattccggattcagctgcaagttgtatttgtcctcaaggccctccctggcgatggtgatcacgagctcccgcaagaaatcgctgttctgcatcctccggtagaagtcgctgttgacagctacgtcgtaggcggtacatccctggccttttgcatccagttctgcatgaggctctcccagactcatggggatgcgaaacccagcttggtcctcctctagcatctgaagcagctcctcctcggtcacgtcggcggggaggagggatagagggggagtggcagatgttgatgaaaaccttcccttccgaggagttggtctttatgcagaaaccaggctgaggctgggatttgtgtcgattctggtctggttgtctgggctttgctggagctccttcgaaggcctgcagcagcaggctcctcaaatcgcgccgaatcagcaccgatcggcctccgcctcgcttagctccagtcccagcagcttcggggttcgccatggccctgggaaagagatctaggcgtcctcgagaccctcaacgtgggaaactttgcccaggatccgaaccccagtgcctgctctggccctcaatcgactccggatacctactatcctgttcaaaaacctaagactggcctaagactacatttccattcaagacctgaacaccatcgtcaaatccgttgggaatatgtgtctctagacgcactaccctccgtcctacgtgccgaactgtaaacgaagccacacttccggtctatcggtaaacacaggactggagtatgccacacttccgc

SEQ ID NO: 46844 - DNA, 2046 bp, Homo sapiens
atggccgcggccggctggcgggacggctccggccaggagaagtaccggctcgtggtggtcggcgggggcggcgtgggcaagtcggcgctcaacatccagttcatccagtcctattttgtaacggattatgatccaaccattgaagattcttacacaaagcagtgtgtgatagatgacagagcagcccggctagatattttggatacagcaggacaagaagagtttggagccatgagagaacagtatatgaggactggcgaaggcttcctgttggtcttttcagtcacagatagaggcagttttgaagaaatctataagtttcaaagacagattctcagagtaaaggatcgtgatgagttcccaatgattttaattggtaataaagcagatctggatcatcaaagacaggtaacacaggaagaaggacaacagttagcacggcagcttaaggtaacatacatggaggcatcagcaaagattaggatgaatgtagatcaagctttccatgaacttgtccgggttatcaggaaatttcaagagcaggaatgtcctccttcaccagaaccaacacggaaagaaaaagacaagaaaggctgccattgtgtcattttctagaatcccttcagttttagctaccaacggccaggaaaagccctcatcttctctttctctcctcagtttacatcttgttggtacctttctagccttagacaaatgatcaccatgttagccttagaccaagaagctggctagtcctttctgtgaagctaatacaatggtcatttccagacaaatttaaaggaaacactaaggctgcttcaaagattatctgattcctttaaaatatatgtctatatacacagacatgctctttttttaagtgcttacattttaatagagatgaatcagttttggaatctaagctgtttgccaagctgaagctacaggttgtgaaataatttttaacttttggaatcatactgcctactgttactctaaatagaaatatagggttttttttaatgtgaatttttgcctatctttaaacatttcaatgtcagcctttgttaaccttaaatacactgaattgaatctacaaaagtgaaccatctcagacctttactgatactacaacttttgttttctgatggccaaaataccaaatgcctgttgtatttatggattaaaaactgcttataaaaccctgtgttactactcctactcttggagatgataatattctatgtggtcaaatatttggactcatttaggacttagatatttcagtgtacttgattttttaatttaactctttttcacagccacgctaagggtaaaaaggaataatttccttctgtcttccttttcaagtatttctgggtaagggattcaaaaaactaaaactgtttttgtttgtaatataaaatatggaattgatctttccagggtcagagatgattaatgtttttgctatatacttttatacattattttcttatcaaactagttaacaagtatttttatatgtttgtaagcagatatgctttcatagcataccttgtgtatatgtaaagataagtatttaattctcactgttcacttttaactgacaaagaaaaacaagtggaaactacagaaactgtggtagaacttttacttgctggtctggtcttggttgtacccatctttggccagtcacataactactcaagaaaccttcccaatagagtacaacaggatgagactctgaaatcactttcagtattccctgctagatattgattgttatttcaagtattaagtgtaagcttttaatggataattagtataactgtggatggcatctgattttgtttttaattctgtggattgtgtttaagcaattcaatagtatgttcctgattttgagatgctaagtggtattgcacagttgtcactttatcaagtgtgtacaacagtcccatgaagtttatagagcatacccttgtatagcttcaggtgctagaattaaaattgatctgttatcacaaaaaaaaaaaaaaaaaa

SEQ ID NO: 46845 - DNA, 1054 bp, Homo sapiens
ttttttttttttttttacaactttaaaaaatggtttatttttttctttaacaaaatcgtacagctttctcaatccccaaattaaaaaaacagaaaacaggaagaaagggaagaaggcaaaggccacacgcacaggccgggcccggcgcatcgcgcctgctggacggcacttcagggcacaacccacacgcgtctttggacttgcagacattccgcgaggcttctggcctctcgaaggcaaagcttttcagcgatttcattaatatttcattacgctgagatgagatgaaggcagatgctacagaaatatgtcagttaaagccacagaaacagaacagcttaagaaggggctgggcgcccagctcgtcacgacacttacagctctggcgtcatcagaagcctctatcatctccctctgcaaagacgcagtctacacccagtgcgagtctcctgagcggggttagtgtttgggagtgggaggcagctgctagtcagagttgggtccttagggcgcagtgcttcacggaaacgcacagacgtctatggcagacgctctcagacacgtgtgcagaagcgacgtggcttctgtctggtaggggtttggactgttgggaggagtatgagggacaaagccaggccgctggctcagcatcagcttgttggaaaagggtcacaggcaggggagcgcctgactccagcggtgtcctttctgccctcacacttcagtgctgcttcccatcagtgacggggctgacgagaaaccgtgaggcccaggtgacaagcaggctcaggacatgcgacaccgtcttcgggatgctgctttccgctaagctgctgtctgggaaagtcaaccgtctatgtcccaaatcaatcaactcagtgacacaggtactattatttctcacaaatgccaattaaatcctttaagttgaatagaaatctgggttggattaagtgggaaaacccttccttagtttacattttctttttctcaggtgttttcattgaggctactcaggaaaccggtcaggctgcccaggacacctggaacctgg

SEQ ID NO: 46846 - DNA, 1093 bp, Homo sapiens
cccacgcgtccgcgagggttgggatgagagcctacttcctacctcttaaggcactttcctcattattttgccatataatcttgaactgcatgataagctgtttaaatgtccatgacttctcccagagcaactagcaaagtatatgacattttgaatagagattagtggaaaggaaaatgtagagatttaagttcagaggtacaaacctcaataaaacctccttagagcacataccatgagtagagtatatgtaaacgtatatgagaagagagtcgctataatagtcctctctaagtagattagttcattgtctaatggaagtgaacatctttactcctgttatcaccatagtactgaatgaactgtataatgagtttttcaaacaagtatttaaaatagaactttcacgtacaaagcaagggcataaagattttggtttgtgtttctgtaagtgtagtttaccatctaaagctttggtttttaattttaaaaaaagcttcaaggtattgccattccttagcatccttattgattatgggtgatgagtttttaactcttaaaatcatatacgtgtattagtttatcttaactgttgccctaagcaaaagggaaggtatacacctaagggatgtacttattttgcatttttggtcatgggtgggaatggggtgggtgcctacttaaatagtttttaaaaaagaaaaaaatcacaaatatttttctactgttatatatgatcttcctttatactagtttctctctagtaaggcatgccagaagcccaagataccatatcatgaattcttacatattgtaccttttgttggtggttaaatcgcatcagatgcttggcattgctgccataattataaaatgcttgtaaaggatcaaatatcactaaatactttaaattgttttacttaagagtctaatctgggaagttttcaaatcatactattaatgtgtaatctaagctcttcagatgtatccatgaataatcctggaacaatattgcttgtattcctgtcatagaacaggttttgtaatctttaaaagaaatgaaaatttatataataaagtttcaaatcaatgc

SEQ ID NO: 46847 - DNA, 2960 bp, Homo sapiens
gccattctcatccctgtgctcagagctctcaagcacccacgatggccttctcaggccgagcgcgcccctgcattatcccagagaacgaagaaatcccccgagcagcccttaacactgtccacgaggccaatgggaccgaggacgagagggctgtttccaaactgcagcgcaggcacagtgacgtgaaagtctacaaggagttctgtgacttttatgcgaaattcaacatggccaacgccctggccagcgccacttgcgagcgctgcaagggcggctttgcgccgctggagaagatcgtgaacagtaatggggagctgtaccatgagcagtgtttcgtgtgcgctcagtgcttccagcagttcccagaaggactcttctatgagtttgaaggaagaaagtactgtgaacatgactttcagatgctctttgccccttgctgttcatcagtgtggtgaattcatcattgggccgagttattcaaagccatggattaacagctgggcattccggagtgcttccgctgtgacctctgccaggaagttctggcagatatcgggtttgtcaagaatgctgggagacacctgtgtcgcccctgtcataatcgtgagaaagccagaggccttgggaaatacatctgccagaaatgccatgctatcatcgatgagcagcctctgatattcaagaacgacccctaccatccagaccatttcaactgcgccaactgcgggaaggagctgactgccgatgcacgggagctgaaaggggagctatactgcctcccatgccatgataaaatgggggtccccatctgtggtgcttgccgacggcccatcgaagggcgcgtggtgaacgctatgggcaagcagtggcatgtggagccattttgtttgtgccaagtgtgagaaaccctttcttggacatcgccattatgagaggaaaggcctggcatattgtgaaactcactataaccagctatttggtgatgtttgcttccactgcaatcgtgttatagaaggtgatgtggtctctgctcttaataaggcctggtgcgtgaactgctttgcctgttctacctgcaacactaaattaacactcaagaataagtttgtggagtttgacatgaagccagtctgtaagaagtgctatgagaaatttccattggagctgaagaaaagacttaagaaactagctgagaccttaggaaggaaataagttcctttattttttcttttctatgcaagataagagattaccaacattacttgtcttgatctacccatatttaaagctatatctcaaagcagttgagagaagaggacctatatgaatggttttatgtcatttttttaattaaaaaagaaaaattcatataatcgtgtttaaaacacaaatgaagtcagtatttgcctttgttaacccttatccatttgttgacatgtagactgtttacaaaaaaaaaacacatggttaaatgttaaattttaattaaggcccccaaaaattaaatataactttttaaaatgaaaggagtcaccttttacatgactcaggtgaaaaaacagtataaacattaatttactttgtgttcaaaagaaaattccaactgctgttggggaaggacacagaaaagaaaaataaccacccaagaaaaacaaaaacaagaaaaacaaatcttatacaatcttagtatatttatcaaactagtagctagaaagtgaatatgcacattactaagacaaaaaacaagtgtaattcagaactacttgattttttttagttaaatgcaataattattatgcttagttttataacctgctctccttgtgaattcttccttcaaatgattacttaacgcagtagtaatagctagctgtaggatgtcctttaaatttttgtgcaaaaaaaaatttataccaggtatttggaaatatactttacaatattggaaaatgaagtatttttaatgtattacagcaattatgtttctaagcttaatgttaagcatgtagtcttagaataggacatgaaattaaattgtatgtagcttggaatatattgcttcagaaaactgaatgtgtatgtcggtcatattgcctttataaccatgctaatatctatgctttatacatactcaaacttgccttgccttaaaaaaatacatactacatacttaaatcaggaattctagccatctcacagaataccaactaaaactaagtgcattgagatctgagattggtaaacccagattcatttaccacagctgtaattaagtttttagaaactattctctttttggggaaatccattgaagttaatttctgttatcttattagaagaaaatgatgttgatatgtgtttcagattttccatttgaaatcttataattaatttgatttatttactgtaagtaggaggtataaatgacactcttaaattggaaggaggggtgttttagtgtctgttttaggtcaaaattagtgattctatttttatcaaaagttttatcctgaagtttcaggaccactcttccttaataaacttgttaatggaaagcgagctttatgaacatttaaaaatgttgctgctgctttgttgcttaaaaagaaagttgccaagagagacttcttagggaaaatatttgggtttttttttccaaaaattgctgaaatattgttttgccatttttaaaaagtctcaggttattaccactctgccattaaatatttgtatgcctgcatttttaaaaattctgtgcatgtactttatggagtacattctatttttgttttcagataccctacaaccaattttttttagtaatcttttagaattgaaattatcataaatgatcgagaataatcatcacatagtttaagattgtatatgttgagtagtttaaaacaatctttgcattttacagtaagaatcaaagtcccttcagtgtgcctttgtcagct

SEQ ID NO: 46848 - DNA, 824 bp, Homo sapiens
acagctatgacatgattacgaatttaatacgactcactatagggaatttggccctcgaggccaagaattcggcacgagcggcacgagggacctgggaagcttgtcctcatcctccatccttccccaggctcgagtgatcctcccacctcaggtcctaaaggaagagtcgctacattggggactgtttggacaaggagatccacggggtagacttagcgggattgtccctggggcagcctggatcctgaggctgccccgcctccttcctcagcccctccctggtcaggcgctcctggtgggtggggggggtagtccaggcttgtcttgcaactgtatgttctcttcagacccctccctggcgatgccagattcactgggctggcagattctgcccccaaacctgtccaaccagttgtttgagaggagggggtagctgggaggggcagcaggagatgccaggaacagcttcccctagcacagcacagactacagacaggggagcctctggggctgcagacactgcagacggacggacagacagatggacaacagctggaggcttggcccggccatagggctctctgcgggacagtcccagctgctagtgtcgctgttgctgctactgacccgtgtccagcctgggacagacgtggctgccccagagcacatcagctatgtgccccagctctcaaacgacaccttggcggggaggctcaccctgtccaccttcacgctggagcagcctctaggccagttcagcagccacaacatctctgacttggataccatctggctggtggtggccctcagcaacgccacccagc

SEQ ID NO: 46849 - DNA, 650 bp, Homo sapiens
tttttaagcaagactattaacattttattgttatacagcttaatggtggaagataagactgtggtcaatccatatagaaaattaagaagaccatgttttagaatattttgcagggcttttttttttttcgaagtcccctctttttttttccttcagtgtggtccttaagcatcaatgtttggtggttgtttctagcaagtcttttgcttcatttattttggctgctacgtaaggagatccacctttatctggggtgattcaaaatcatgactctcctatgagctgttctaatcttagccttgccagcagatgggcttacacctaaaataagaccagcttctcgcctactcattttctgttcaaatcctcctttatagtaggatgaaaagctaggagttgaaatcttctttgcagtttctgtgataacttgttctagaggtttccagatccgaaatgcgtagcgacctgcaaatgcaagagctgcaacacccagtcctacagctatcaaacttcttaccagtctctgctggtcgacgtcggcgtctggccgtttggccgagggctgcaagtactcagcgtagcgcaaactctcgccaactggagcgatgacaccacgggcagccatggcaaggcggcccggagactcaagg

SEQ ID NO: 46850 - DNA, 2096 bp, Homo sapiens
ccgcaccgctggcagcctgaagagagtcgctggccgtggtcgccgctaggtaggatatatctgcatcttgaaaggaagataaaacaaaagccttctttggaatagatggatttttgtcactttctgtgtgaactaaagtgattcaatgtctcttttggattgcttctgcacttcaagaacacaagttgaatcactcagacctgaaaaacagtctgaaaccagtatccatcaatacttggttgatgagccaaccctttcctggtcacgtccatccactagagccagtgaagtactatgttccaccaacgtttctcactatgagctccaagtagaaataggaagaggatttgacaacttgacttctgtccatcttgcacggcatactcccacggggaaccactggtaactataaaaattacaaatctggaaaactgcaatgaagaacgcctgaaagctttacagaaagccgtgattctatcccactttttccggcatcccaatattacaacttattggacagttttcactgttggcagctggctttgggttatttctccatttatggcctatggttcagcaagtcaactcttgaggacctattttcctgaaggaatgagtgaaactttaataagaaacattctctttggagccgtgagagggttgaactatctgcaccaaaatggctgtattcacaggagtattaaagccagccatatcctcatttctggtgatggcctagtgaccctctctggcctgtcccatctgcatagtttggttaagcatggacagaggcatagggctgtgtatgatttcccacagttcagcacatcagtgcaggccgtggctgagtccagaactactgagacaggatttacatgggtataatgtgaagtcagatatttacagtgttgggattacagcatgtgaattagccagtgggcaggtgcctttccaggacatgcatagaactcagatgctgttacagaaactgaaaggtcctccttatagcccattggatatcagtattttccctcaatcagaatccagaatgaaaaattcccagtcaggtgtagactctgggattggagaaagtgtgcttgtctccagtggaactcacacagtaaatagtgaccgattacacacaccatcctcaaaaactttctctcctgccttctttagcttggtacagctctgtttgcaacaagatcctgagaaaaggccatcagcaagcagtttattgtcccatgttttcttcaaacagatgaaagaagaaagccaggattcaatactttcactgttgcctcctgcttataacaagccatcaatatcattgcctccagtgttaccttggactgagccagaatgtgattttcctgatgaaaaagactcatactgggaattctagggctgccaaatcattttatgtcctatatacttgacactttctccttgctgctttttcttctgtatttctaggtacaaataccagaattatacttgaaaatacagttggtgcactggagaatctattatttaaaaccactctgttcaaaggggcaccagtttgtagtccctctgtttcgcacagagtactatgacaaggaaacatcagaattactaatctagctagtgtcatttattctggaatttttttctaagctgtgactaactctttttatctctcaatataatttttgagccagttaatttttttcagtattttgctgtcccttgggaatgggccctcagaggacagtgcttccaagtacatcttctcccagattctctggcctttttaatgagctattgttaaaccaacaggctagtttatcttacatcagacccttttctggtagagggaaaatgtttgtgctttccctttttcttctgttaatacttatggtaacacctaactgagcctcactcacattaaatgattcacttgaaatatatacagaaattgtaatttgcttttttttaaaaaagggggctaaagtaacactttcctacttatgtaaattatagatcctaaattcacgcaccccgtgggagctcaataaagatttactgaattgaaaaacaaaaaaaaaaaaaaa

SEQ ID NO: 46851 - DNA, 1178 bp, Homo sapiens
ttcggcacgagggacatgctgagtgaggctttaattcagaaccttgtgaaacatcttcctgagcagaagatactcaacgaattagcagagcttaagaatgaatatgatgacctctgtgagcctgaacaatttggagttgtgatgagctctgtgaaaatgttacagcctcgtctcagtagtatcctgttcaagctcacatttgaagaacacataaacaacatcaaaccaagcatcatagcagtaactcttgcctgtgaagaactgaagaaaagtgaaagctttaacagacttttagagttagttcttcttgttggaaactacatgaactcaggctcaagaaatgcccagtctttgggatttaagatcaacttcctttgtaagatcagagatactaaatcagcggatcaaaaaacaacccttttgcattttattgccgacatttgtgaggaaaaatatcgagatatcctaaaatttcctgaagaactggaacacgtagaaagtgcaagcaaagtttcagctcaaattctcaagagcaaccttgcatcaatggaacaacaaattgttcatctggaacgtgacatcaagaaattcccccaagcagaaaatcaacacgataagtttgtggaaaagatgaccagctttacaaagactgcccgagaacagtatgaaaaactctccaccatgcacaacaacatgatgaagctctatgagaatcttggagaatacttcatttttgactcaaagacagtgagcatagaagagttctttggtgatctcaacaacttccgaactttgtttttggaagcagtgagagaaaacaataagagaagagaaatggaagagaagaccaggagggcaaaacttgcaaaagagaaagctgaacaagaaaagttagaacgccagaagaaaaagaaacaactcattgatataaacaaagagggtgatgagactggtgtgatggataatcttctagaagccctacaatcaggtgcagcattcagagaccgtcgaaagcggattccaaggaatccagtggtaaatcatccctgtgcaacaagggctaatccaagatcagctacataaacggcctgagtgctgttttaaacaggattgggtgatggtacaacatgactttttaagataatcaagtagtaaaagtttctagtggaaacatgaaa

SEQ ID NO: 46852 - DNA, 2720 bp, Homo sapiens
tttttttttttttttttgtaaaagccacgctaataattacccctgcacaatgtaacagtcacaaaacagccagccatggcctgctggaagccaggggacaattcttcatacacaggcttgcgggggagagtatgcaacacagagcaactggagtaaccctcagtcccaggacacaggatggcaggacaagcactgagcaggctcccagaggtgtcttctcctgggaaaagggctgccgagtgaccatggcggaggcaagtgctggatgtggggacaggccatgtccccaaagcccctagagggtgttctctgaagaaccccagggccagatcctccaaaatgtcttgagctggttctcccttctgcctgcccccactctgaggtcccggggggtccagggggggcccgtcgtcaatggctcctgacaagggtggcacagacgcacctcacctgccaaggaccaccctggaaaagtctgtggccacagctccttgaccacttgtcaccccttcctcagatggcagggtggaggcatgggactcaagctaccaacggaagcgaacctggatccttcccagttctctctgtcaggatctggaacttccatgcagtcagactccatgtccgtgagtagggaggaaggttgtgctggccgaaggaccctcatcaacctgctcataaccatggcgtaagagcctggctagaggggcccctccattctgcccactgagtcagactgcttttgctgaaagcagaaatcccagaccctctgctcaactcctcacggggacaagctatgagatgccaagactccctggaatcccagcactgcttgcaccagtctatgtagcctgtacaaatgtgagcatctcccctcccagacagcctgaggcccaggacggcacgacaagaatgcaggcctgtgccaaatggggcatgtgccctggcaggactacttgggcaagactagaagagggggtaggaatccagaaatgagacgcagaactgtccccaggtcttcactgttgacacactagctggtttcactcacatctcagcaacaaaaacctgtatttaagcggctaattccagagatgagtagtggagagagcaaatgagcctggttagagctcactctgggaggagtatgtggacgacacttggctgtctcttcagggggccaggctgggcccccagcactcccggcagtggaaaggcagagctggctgccagctctggcctccgcctgggattcactcccatcctggctcagatctgtggctgtgcttcacccagtgggtcctccctcaaggagccaggcgggatctggaagggtctgcttatccccaccacagaacgcagactgttgctgtagtaacagaggagaaactcatcttcagtggtagggatattgctgatgtcgatgtaaacctggttcaggttgtcgctgcaggagaccttgctgtccccgacccaggcataggacacgtagtcattaacgtcccgcagccccaccttgtacagtccaatccagtcccacgggctgctggggaagtccgaggttgaagagtagctgaccatcatgtcattttccacggtccacaggtcctcgggcatcaggacgatcagcggagcagacaccaatggcttcagctccaagtcgaacgtgccggagacaggcttgtggtcgcttgatgccgtacgtcatgtggctgctgtagcccctcagagacaaggagaagtgtgacgccggcggtatgggagtgtcggggccagcacagggctgccgcttcagcctccacaggatgcgatcggtccatgcaggcttgcgttttttctcactggtgtcatagtcgttggagttcctatcaaacttgtaggtgggcgggaagagtaggcggccctcctggaactcccggagcagcgggtcatgtttcttggcaatgctgagctggtccttctcccacaggccaccgtagcaccgatttttaatggattcccgaacaaagtgcaacccaaagtcctcgatccgaaagttcatgtctccaaaccagataatgaggtcgtggtccaggatgtttgggatgtctcgcccctcacaattctgcatctccaggatccggtcaaagtgctccagccgctggtaattgttggaaatgtggggaggcaggtggcagttgatgatgctgacatagtagccataaagcttcaggcagatgttgactccacctttgttcccccagtacccaaacaggccagtgggggtggatttagtagacagaatctggatatagggcaaatgctgatacttggcaaagaccagtaagaggatcccctgcatacggacatgggagaccttgatgaagctcagaggggaaagcacatccatgaggaaactgctccacgagtcattaaaggcagcatcggaaaggaggcttatgatcccagagttcaattcctgcaaaccaataacatatatgtcaagattgaggttccggttgttcagctgaagcaggtcactgagatctagagggggcgctgccgaagccacgttccaagtcacgacgtgtatgctgagcctcctgcctttcggcccgctcagcttccgcgagctcatggccgccgtcgtccccgcgcggtggtccggcaggttcgcgtctcccggccagcgggtccaggccagagcagccctgcgggcggccggtctcacgcgcctagct

SEQ ID NO: 46853 - DNA, 997 bp, Homo sapiens
ttttttttagtttagcaccatttattaagtgatctcagctgttgttgtagctgctgcgtgtcagcctgttcttaaaacataaaatgctcttccaattcctcttgtccaggacagaaggatcttccaggtagcacgccaacagaacaagagactccgatgacgccagcttcaatgatggtgccatccagagagggagagggtcatggcacattcaaccgcggcttccagaggttttgaaaaaggagcctttgggggcccagcctgcctggcattttgatgctgtcggtgtgagttttgtattccataatggtgttgggaggtaggttaagcactcgccgaagtgtgtcccggattcgggctgtggttgcttggtcactggcagtcttattccatattggaaataatgtcttcctgaaagcggacagacaccacagccccacagatctcctccccaaccatgaactgttcccccagcatggccaaaatgagattctcccagcaacgggaggccaagcccttccgcagccgaataatccacttgccaccatttttatttgcatcatcctcccacatgggtttaattccttctttgaagagatggaagtcactgtggcctgtcaggtccccaggacgtaccatgtggctataaaacctccagaactgctccacagaggcaaaggtgccaatctgtttgatattctgttcatagctctgtgagctcgtgggacggccgggggttctcctggagtaccaaaaagtgtagttgtactgcaggggatgctctgccggtccagggacaacagcctttctcttgctactgctctgattcttgtctcgttccgttttttccttctcaccatctttctgtgtgctgttttcttcattctgatcatggtccccactgtcatcatctttcaaagcgtcgaacttgttgttcatcctctcgccgccgctgtcgccactgcctcagggagtgacttccgctccaccgggtccc

SEQ ID NO: 46854 - DNA, 952 bp, Homo sapiens
gcagttcaaagtcgtccgcgtcctggagatgctggaggcgctggtgaatgagggcagcctggcgctggaggagctgaagatggagagggaccacctcaggaaggaggtggaggggctgcggagacagagccctccggccagcggggaggtgaacctgggcccaaacaaaatggtggttgacctgacagatcccaaccgaccccgcttcactctgcaggagctaagggatgtgctgcaggaacgcaacaaactcaagtcgcagctcctggtggtgcaggaagagctgcagtgctacaagagtggcctgattccaccaagagaaggcccaggaggaagaagagaaaaagatgctgtggttactagtgccaaaaatgctggcaggaacaaggaggagaagacaatcataaaaaagctgttcttttttcgatcggggaaacagacctagatccaaggccacaagtaaggctatggctctgattctagaagacaaccttccaagatgcctggcaaaaccacctccctgtgccacacagacacactaggcctgtgtatttatttccccttcaaagcagactgaggagggaggagacgaggttctcttggcatcactttctccctggctgcagaactagacacccttgaagatttggcctgggccagtgagactgaaatcaagaaaaacagaagggatgtgcagggtgggggggtccacttcctgctcccatgtcaacccccagggcctccagcgtgcagacgcgtgtcctactcatctgctcccacggatgaccctggtcttcaatggttagcagaagggagaaaagaaagcaggaaaatgtgctattgagattccagtggtgacttcactgatatttagtgaatatttgatttagccaacatgcctttctttatgtgattttgtattaaagtaaaatgatttttatactttcaaaaa

SEQ ID NO: 46855 - DNA, 955 bp, Homo sapiens
cagtgcaccagaatggagacgctcccatttttgatgaaagctttgaatttcaaatcaacctgcctgaactggccatggtgcgctttgtagtgctggatgatgactacattggggatgaattcatcggccagtacacaattccctttgaatgtttacagacgggctaccgccatgtccccctgcagtccttaactggagaggtccttgcacatgcttctttatttgtccacgtggctattactaaccgaagaggaggagggaagcctcataaaaggggcctttctgtgagaaaagggaagaaatccagggaatatgcatctttgagaacactgtggattaaaaccgtggatgaggtattcaagaatgcccagccccctatacgggatgccacagatctgagagaaaacatgcagaatgcggtggtgtcattcaaggagctgtgtggcctctcctctgtggccaatctcatgcagtgcatgttggcggtgtctccccgctttctggggcccgataacacacccctagtggtcctaaatctcagcgagcagtaccccacaatggagctgcagggaattgtgccggaggttctgaagaagatcgtaacaacttatgacatgatgattcagtccctcaaggcgttgattgaaaatgcagatgctgtatatgaaaagatcgtacattgtcagaaggcagccatggaattccatgaacacttgcacagcataggcaccaaggaaggtttgaaggaaagaaaactacaaaaagcagtggagagctttacctggaatattaccatcttaaagggacaagcagatcttttgaaatatgctaagaatgagacattggagaacctgaaacaaatccattttgctgctgtttcatgtggactgaataaaccaggcaccgaaaatgctgatgtccagaagcccgcccgacttggaaagtcatacccgaa

SEQ ID NO: 46856 - DNA, 1206 bp, Homo sapiens
  misc_feature (1)...(1206): n = a,t,c or g
tgcgcagaggcgcggcggctgtacaactcggccgttgtcaccatgccggtcgtccggaagattttccgtcgccgccggggcgactcggagtcagaggaagatgagcaggactcagaggaggttcgattaaaactggaagagaccagagaggtacagaacttgaggaagaggcccaacggggtgagtgctgtggccttgctggtgggagagaaggtacaagaggagaccactctagtggatgatccctttcagatgaagacaggtggtatggtggatatgaagaaactgaaggaaaggggcaaagataagatcagtgaggaggaggacctgcacctggggacatcgttttctgcagaaaccaaccgaagggatgaggatgcagacatgatgaagtacattgagacagagctaaagaagaggaaagggatcgtggaacatgaggaacagaaagttaagccaaagaatgcagaggactgtctttatgaacttccagaaaacatccgtgtttcctcagcaaagaagaccgaggagatgctttccaaccagatgctgagtggcattcctgaggtggacctgggcatcgatgctaaaataaaaaatatcatttccacggaggatgccaaggcccgtctgctggcagagcagcagaacaagaagaaagacagcgagacctccttcgtgcctaccaacatggctgtgaattatgtgcagcacaacagattttatcatgaggagctcaacgcgcccatacggagaaacaaagaagagcccaaggcccggcccttgagagtaggtgacacggagaagccagagcctgagcggtcccctcctaaccgcaagcgtcctgctaacgagaaggcaactgatgactatcattatgagaagttcaagaaaatgaataggcggtactgagttgtgcagagtgggatgtaaatatcgccttcctctccctatatccctcccatgaaaaatggcttcctggccgggcgtggtggctcacgcctgtaatcccagcactttgggaggccgaggtgggcggatcacctgaggtcgggagtttgagaccagcctgaccaacatgganaaacccagtctctactgaaaatacagaaaattatccaggctggtggacatgcctgtatcccagctgccaaggaggctaaggaaggaaaattgcttgaanccaaggggcggangttgtggtga

SEQ ID NO: 46857 - DNA, 347 bp, Homo sapiens; identical to SEQ ID NO: 18309
  misc_feature (1)...(347): n = a,t,c or g

SEQ ID NO: 46858 - DNA, 454 bp, Homo sapiens
  misc_feature (1)...(454): n = a,t,c or g
gcacaagtgtgtggtgaggtacagagggaaaacatacagggggtactggtccctgtgcgccgccgtcaacagagccctcgacgaagggataccaataactagtgcctcgtactacgcgacagtgaccctggatcaggttcggaatatacttcgttctgacacagacgtttccatgcctttagtagaagagaggcatcggattctcaatgaaaccgggaaaattctgctggagaagtttggaggctcttttctcaactgcgtccgagaaagtgagaatagtgcgcagaagttaatgcacctggtggttgaaagttttccttcttacagagatgtgactctgtttgaggggaaaagagtttctttttcaaacgagcccaaatccttgtagcagatcgtggagtgtattggaaggaaaaggagatggtgcttcaaggacatttcagtatnccatgtt

SEQ ID NO: 46859 - DNA, 2147 bp, Homo sapiens
gaattcgcggccgctggtttgcagctgctccgtcatcgtgcggcccgacgctatctcgcgctcgtgtgcaggcccggctcggctcctggtccccggtgcgagggttaacgcgaggccccggcctcggtccccggactaggccgtgaccccgggtgccatgaagcaggagggctcggcgcggcgccgcggcgcggacaaggcgaaaccgccgcccggcggaggagaacaagaacccccaccgccgccggccccccaggatgtggagatgaaagaggaggcagcgacgggtggcgggtcaacgggggaggcagacggcaagacggcggcggcagcggcttgagcactcccagcgagagctggacacagtcaccttggaggacatcaaggagcacgtgaaacagctagagaaagcggtttcaggcaaggagccgagattcgtgctgcgggccctgcggatgctgccttccacatcacgccgcctcaaccactatgttctgtataaggctgtgcagggcttcttcacttcaaataatgccactcgagactttttgctccccttcctggaagagcccatggacacagaggctgatttacagttccgtccccgcacgggaaaagctgcgtcgacacccctcctgcctgaagtggaagcctatctccaactcctcgtggtcatcttcatgatgaacagcaagcgctacaaagaggcacagaagatctctgatgatctgatgcagaagatcagtactcagaaccgccgggccctagaccttgtagccgcaaagtgttactattatcacgcccgggtctatgagttcctggacaagctggatgtggtgcgcagcttcttgcatggttcggctccggacagctacgcttcggcatgacgcagacgggcagggccaccctgttgaacctcctgctgcggaattacctacactacagcttgtacgaccaggctgagaagctggtgtccaagtctgtgttcccagagcaggccaacaacaatgagtgggccaggtacctctactacacagggcgaatcaaagccatccagctggagtactcagaggcccggagaacgatgaccaacgcccttcgcaaggcccctcagcacacagctgtcggcttcaaacagacggtgcacaagcttctcatcgtggtggagctgttgctgggggagatccctgaccggctgcagttccgccagccctccctcaagcgctcactcatgccctatttccttctgactcaagctgtcaggacaggaaacctagccaagttcaaccaggtcctggatcagtttggggagaagtttcaagcagatgggacctacaccctaattatccggctgcggcacaacgtgattaagacaggtgtacgcatgatcagcctctcctattcccgaatctccttggctgacatcgcccagaagctgcagttggatagccccgaagatgcagagttcattgttgccaaggccatccgggatggtgtcattgaggccagcatcaaccacgagaagggctatgtccaatccaaggagatgattgacatctattccacccgagagccccagctagccttccaccagcgcatctccttctgcctagatatccacaacatgtctgtcaaggccatgaggtttcctccccaaatcgtacaacaaggacttggagtctgcagaggaacggcgtgagcgagaacagcaggacttggagtttgccaaggagatggcagaagatgatgatgacagcttcccttgagctggggggctggggaggggtagggggaatggggacaggctctttcccccttgggggtcccctgcccagggcactgtccccattttcccacacacagctcatatgctgcattcgtgcagggggtgggggtgctgggagccagccaccctgacctcccccagggctcctccccagccggtgacttactgtacagcaggcaggagggtgggcaggcaacctccccgggcagggtcctggccagcagtgtgggagcaggaggggaaggatagttctgtgtactcctttagggagtgggggactagaactgggatgtcttggcttgtatgttttttgaagcttcgattatgatttttaaacaataaaaagttctccacagtgaaa

SEQ ID NO: 46860 - DNA, 1597 bp, Homo sapiens
  misc_feature (1)...(1597): n = a,t,c or g
tgcgcaggcggccggactccgctcagtttccggtgcggcgaacaccaaagtccgggaacttaagcattttcggtttctagggttgttacgaagctgcaggagcgagatggaggtggacgcaccgggtgttgatggtcgagatggtctccgggagcggcgaggctttagcgagggagggaggcagaacttcgatgtgaggcctcagtctggggcaaatgggcttcccaaacactcctactggttggacctctggcttttcatccttttcgatgtggtggtgtttctctttgtgtattttttgccatgacttgttcgctgatatctaaattaagaagttggttcttgagtgaattcctgaaaatggcctacaaacttcttgaataaagaagacaggactctcaatagaagaatttcacatctccaagggacccttcctttcattttacactttgttactaatttgcagaactctattaattgggtaggatttcacccattcctagctaagttcttaaaattaaaccctttggttcgtgtttaaaaactttcaaacatctgatggctttacaggggctgaatataaaagcatttgtacttaaaggtcttgtgtattcattaagaaatatagtaatgtcttttaatgttttaagagttgatcagggtttactatgatgcaagtaataggatgattaataagggaaggtttttatgaattcaaaagtcaattattcaaaagcagggaaagattttgagagagggaacaaagtattcttagattgcgtagaagctgctaggttccagttttaatttttaggtttagttggactctgttatgaaaagataggttatgggtgggcgacaggttgatacagtcttagaaaaagcaggtaatatcaaagtattggaaagctagcatgcatgccctcttacctgggtatcttcccccttttttccttttaaactcttgagcctcctataacgaaggattatgtgtttcaaacctattttttttttactgtttcattaagtgtgcttgtgcccaaaatatttacttgtataatatctgtaacttgcttaaatacttcagcaaagtcagcatatttactcattcaacaaatatttgagccaggcattattttagacacagcagtgaacaaaacaaaaaggcattcttgccttcatggagcttacattcttattgttatttaaatctaaatgttataaaacaagaatttatattctagggttgatcagctagtatttaatcaaaaaggccacactcccatagcagctactctaagctgtagtagctaataaaaaatattaatgttggccgggcacagtggctcacgcctataatcccagcactttgggaggccaagggtggtagatcacttgaggtcaagagttgtgacaccagcctggccaacctggtgaaaccctatctctattaaaaaatacancnaaatncaaaaaaattactgggcaagttggcatgcacctgtntccaagctatttggaaggctgaggcacnanaattgcttgaatccgggaggtggaggttgcantgagccaagatggggccactgcactctac

SEQ ID NO: 46861 - DNA, 433 bp, Homo sapiens
gcgcccgctgtcaccgccatggctgccccgtgtttgctgcggcaaggacgagccggggcgctgaagactatgctccaggaagcccaggtgtttcgaggacttgcttctacggtttctttgtctgcggaatcagggaagagtgaaaagggtcagccacagaattccaagaagcaaagtccaccaaaaaagccagccccagtgcctgctgagccgtttgacaacactacctacaagaacctgcagcatcatgactacagcacgtacaccttcttagacctcaacctcgaactctcaaaattcaggatgcctcagccctcctcaggccgggagtcacctcgacactgagggccctcggtgtgaagatgaaccttccaccgtcttcactgcatcctggagtgcaaaaataaaatccactcaagagtcaaaaaaaaaa

SEQ ID NO: 46862 - DNA, 597 bp, Homo sapiens
aattcggcacgagataaaattaaaacaggcttggctggtcttgaaatcggcatcttagtgaacaacgtgggaatgtcgtatgagtatcctgaatactttttggatgttcctgacttggacaatgtgatcaagaaaatgataaatattaatattctttctgtttgtaagatgacacaattggtactgcctggcatggtggaaagatccaaaggggctattctgaacatttcatctggcagtggcatgctccctgtcccactcttgaccatctattctgcaaccaagacttttgtagatttcttctctcagtgcctccatgaggagtataggagcaagggcgtctttgtgcagagtgtcctgccatacttcgtagctacaaaactggctaaaatccggaagccaactttggataagccctctccggagacgtttgtgaagtctgcaattaaaacagtcggcctgcaatcccgaaccaatggatacctgatccatgctcttatgggcttgataatctcaaacctgccttcttggatttatttgaaaatagtcatgaatatgaacaagtctacacgggctcactatctgaagaaaaccaag

SEQ ID NO: 46863 - DNA, 1150 bp, Homo sapiens
ccctgcaaaaccacattccccattttaacgggcgttgctctcactctctctctctcttactcttactgacatcgtgtcggactagtgcctgtttattcttactccatcaggggcccccttcctccccccgtgtcaactttcagtgctggccaaaacctggccgtctcttctattcacagtacacgtcacagtattgatgtgattcaaaatgtttcagtgaaaactttggagacagttttaacaaaaccaataaaccaacaacaaaaaaagtggatgtatattgctttaagcaatcactcattaccaccaatctgtgaaagtaaagcaaaaaataataataataaatgccaagggggagagagacacaatatccgcagccttacaccttaactagctgctgcattattttattttattttatttttttggtatttattcatcaggaataaaaaaaacaaagttttattaaagattgaaaatttgatacattttacagaaactaattgtgatgtacatatcagtggtgacatattattacttttttggggacggggggtgggtggggtgaagagatcttgtgatttttaagaacctgctggcaagagtttaacttgtcttcagcatattctgattgtatcataatcattttctgctgttgcagaggatgtgaatacacttaaggagctcacagaatcccagtagcacaaattgggctttggcaaatcgtgtattttgtgtatagaaggaatttaaggagaggtattacttattttcatattgtattttaactgtttctctgatcaaatttttttacttcctcctcctgttcctccccacctccctccttttccagttcagtatttggagttcaacactgtctctcaatcagatcatcttgatctttttctttatctcccttccccttcctaagtcccatttcttggtcataaatattgcattattcacactttcaaactgtgtattttcttacaataaaaaatgatgaaaaaaaaaaaggctttacttcttttgcatgcactttaaaaacaaaacaaaacatttttcaggttccaaggaagagcatgataactgtcagagcttttaattatatttgtaaataaaagtgttcatcacaaaaaaaaaaaaaaaa

SEQ ID NO: 46864 - DNA, 2095 bp, Homo sapiens
ttttttttttcatgtgctttaaatatatttttatttgtttttctttatattaatttttttctcccatagaggaatagcattacagtctaacaatcagaattctgttacacacatacacaggcatgccacatgacccagttgaggtggttcgtctccttgagtctgttgacacgtcacatggtcaaagtctcctcatttcagccagtctcaacacaaaacacccaacagggatgcactcaacttgttggttccatgtggaactaggtggcagggcgagagggaaagtagtagaagggggctatggtgtgtctgcattcagtccccctcacataaagccacatggatctaggggggtatccaagagctctggtgggggtccgtgttgcacctaagacattataggtcagagcaagttgctcagagggttccaggcagggggctggggagcaggcatactctaaaacagcaccaaactgcattcatacacggtgccctgctggggctagactggcaaaggctggaaagacacccagcttgaaggaaccactcagacttactggggaataactggaagtcactgtttgatgtaactgggactcactctagaaacgggtccctctgacagttttggcaaagtgctggtagtactgacattaatactcacaaattgatacaaactcctctagggcctcagaaaacatcaatcaaaacagactctctaaccccctcctaaggttgcataggactttgaactctggttccctcatgtattcaagttctgtggtttaaaaaaaaatcctgaagcatgctcaaggtgaaaggcacgtacacagtcaatacagtatgacaagggctgatgcttcaggagtcagactagcaggagactgagtagtgttggttcttagaaatctatacacatttaaaatattgcccacactcaaatgcctacagaatctataggaaaggtacaaaaaaatatgagccttgcaaccaagcaggtgaagagattgggttctagaatacaggagcctccagaaatataggtaaacaaaaggccttttaaaatttgagccaaatgccctataacttaaactcttcccccaccagaaggatcatgggcaccacacaggactgagcctaggtcccagctggcagtgaggagtaggcaagaagggttggagggagattcagctcttggaggtgccgaagaccctaggctggctgtgaagtgcccaagtggtagctggaagaataaaagcaactaggttctgaaggagaacttgggagaggagcaaggctgtcaactactggggccctagtggactggcgtgggagctttgatccgtttttagtgttaatttggcttattccctggaataggagaccccatcaggtcttcctctgtcctcatcccagcatccatggggataccccatcccttccccacataccccccatgaggcctggggctatagggtcagggagggcagctgcctttgccctcatgggaatgcagagttttctccaagcttcagcttggctgtgaggcctggaaacctagagttggggtgaggggaggacctatgttcataggtaccaagaagtcttaaaagttcctaggaagagtgagcacacactagaaaaggacggctagaaagaggaaatgggaagcaactcagggcatcccaagaggctgttgctggtgtctgagcccaaaattcagtctcaccacaagaaggggaggctggtggcccctgccccttctgtctcccccagggattcaggttccctcttccaggtatttactggaggagaaggggagggggatcatagggtacccatttctccccagcaacctagaaagaaagagaggcctgtgggagaaaatgaaaagaggccccctgaaggccctgaacctggataggaacaatttgcagattgagacagtgggagtcctggactcctactcaggactgctggctagccatactgagcagggtgtgaaatacaagccagaggcaaggtgaagactgagctgtcagccttgggatggcttcaccccatggtgtgtcctccagcatccctcgttccgaat

SEQ ID NO: 46865 - DNA, 6497 bp, Homo sapiens
  misc_feature (1)...(6497): n = a,t,c or g
gagatcagcgctgggacggaacccgggttcctctcgaaccgggattgtgacgcttttggcctggctggccgctgttttctgtcccactttttactcgggcctgcgtccgctgccgccgtccctcagtttgcccccggaggaggcagggcggccgtgccttctgccgtgcgcccgcgtggctgccaccgcccctccgaatcctccggggccgcagaggggttcgctacggagggaggtgggggccttcgggaggaggaggcggaggaggcggaggaggagggaaggaagatggcggccgtggaactagagtggatcccagagactctctataacaccgccatctccgctgtcgtggacaactacatccgctcccgccgagacatccgctccttgcccgagaacatccagtttgatgtttactacaagctttaccaacagggacgcttatgtcaactgggcagtgaattttgtgaattggaagtttttgctaaagtactgagagctttggataaaagacatttgcttcatcattgttttcaggctttgatggatcatggtgttaaagttgcttcagtcttggcctactcattcagtaggcggtgctcttatatagcagaatcagatgctgcagtaaaggaaaaagccattcaggttggctttgttttaggtggctttctttcagatgcaggctggtacagtgatgctgagaaagtttttctgtcctgccttcagttgtgtactctacacgatgagatgcttcattggtttcgtgcagtagaatgttgtgtgaggttgcttcatgtgcgaaatggaaactgcaaatatcatttgggtgaagaaacatttaaattagctcagacatatatggataaactatcaaaacatggccagcaagcaaataaagctgcactctatggagaactgtgtgcactcctatttgcaaaaagtcactatgatgaggcatacaaatggtgcatcgaggcaatgaaagaaattacagcaggcttaccagtgaaagttgtggtggatgtcttaagacaagcttctaaggcttgtgtagtaaaacgtgaatttaagaaggcagaacagttaattaaacatgcagtgtatttggcacgggatcattttggatccaaacacccaaaatattctgatacactgctagattatgggttctacttactcaatgtagataatatctgtcagtctgttgcaatttatcaggcagcccttgacattagacagtcagtgtttggtggcaaaaatatccacgtagcaacagctcatgaagatttggcctactcttcttatgtccaccagtatagctctgggaaatttgacaatgcactatttcatgcagaaagagctattggtatcattacccacatcctacctgaagatcatcttcttttggcttcttcaaagagggtgaaagcacttattttagaggagattgcaattgattgtcataataaggaaactgaacagaggctgcttcaagaagctcatgatttgcacctgtcttcactccaactagctaaaaaagcttttggggaatttaatgtacagactgcaaaacactatggaaaccttggaagactttatcagtcaatgagaaaatttaaggaagctgaagaaatgcacatcaaagcaattcagattaaagaacaacttcttggtcaagaagattatgaagtagccctttcagtgggacatctggcttctttatataattatgacatgaatcagtatgaaaatgctgagaaactttatttgcgatctatagcaattgggaagaaactttttggtgagggctacagtggactagaatatgattatcgaggtctcattaaactttacaactccattggaaattacgagaaagtgtttgaatatcacaatgttctgtctaactggaaccggttgcgagatcggcaatattcagtgacagatgctcttgaagatgtcagcaccagcccccagtccactgaagaagtggtgcagtccttcctgatttctcagaatgtcgagggaccgagctgctgagggaggacctcagttaaccaattaccttttcccggattccagggaattcatactgtgaaatcaaaaccatgttgttttggggggctggaatttgcattgaaacactggtccagtccattgaagaccctattttgggtgatccctatcttgcagaatgtctgtaggaataagcatatattcagttatattcagcatgtaccgcatgtgtaagtagtctggcccacattttcaacctagtagaacaaacaacaggaaatcttttttttgttgtttttaaaaaattcattttgcagaaagcctgaaagaaaaaaaatacccctaaataaaactatttaagagtttaaaagagttgcattcttattatgtaaggatgattttaacaactttttaatatgtaattcttccatgtgggaggtattcaatactgtagtgtaaaggaaattttatgcgggaaaatctttatatgcagtataggaaaagttaacacaagtacttaattaaaggggggacatccccgacttacgtttttctaccttggccccggttagtggatacaaccactctatattacaaggaaaggactgtcagattcatctgaactggaccagtgttgatctgtaatgtaatagaaaatctgatagaccagcacttctgacttttttttttggtacaacaatgcaagatgctctgatagcatttgctaacaggaccaggaggatctaaaaaggaccagcctaatgtagaaggtggttatttggaccagaggctttagattattattttagatcctacatatacttttatcagtagaatgatttcatttagatgtataatgaaaaaggataatgcaaaaattatgtaatagataccaaattagggaagtttggcaatttcaatggcatatttttagtcaaggtacacagatggcagtgcataagcaagtctataaatatcggctgcagcatccccctcattttaaatgttgccctaataatcaatgcagttaacaagtatattggctgtgtgtcatgaaatagttcatgttcagatggaaatgttaggttactgtatggtttatggagattaatgaaaatgaatgcccaaaaataagtcttagaaaatcctccatttttatggtaaatagtaatacaactaggtcatttcatttgaaatctaggagtcaaatggaaagatcccctaataatacacctatttgcactgaacttgtctttgctgtttattgggttttgatttgattttttgtaagccagtcaggttatttaatgatgaggtaataatcaaatttaagaatttgtgacatgtagcaattcaagaaacaaaaaggtattttgctgttacctcaattcttactgtagtagcccatctgatgacttctatagttaagaatctgggttccccccctattttcaggggttcatgacttggctgttaaagatgttgctcctagctaatgcttggagtagtctgtgggtgaatggatgtgtgttgaattttagttttcttttaacatgcatgttgggtgagaggggaaaaaaatctaagctgtctgccacattgagtacagaaaagttgtagatttcaaattttattaatattttaagcacttttttgaacttcccaaccttgtttgaagctgttatttgcagtcctattagttttgagccattgcatttaagttccctaggagggggttggttgggggatgtactgaaagagatgaagcaaacccacaccctaagatggtaactgtgtgatttagaaacctgagtttactcctcaaatcgaattattttctttttaaattttggaaagagtaaattgacgtacttgcagtttatgaagctgccccccacccctcagttaattgcagtctaatgtcaagaggcacttctttattaattaccaaatagtctttgtgaccaaggactaacatttttaagttactcagctctatcctcatgggcctatatatttaatacctccaaagatattttcaggataggctttgtatacttttattggttatttagaatccagtggtatgtttgtggtataggaatgtcatggtaaattgtttttcaataaatattttgaaacatgtttccatatgaagtttttttttcaatctgtattttttggttttgtgcacatacagcatttcctaggataaaaataaacaaatgacttacagcctcatcctccctaactccatttgaactcaacttagctcacactcagtgataaaacaacatggtatgtagaagcctaggatcacagggtgataatgtcaattggcagccagttgtgtttttttgaaacatcattattggcagtttctccttatcaccactgctttaatgtagtttttttgtaaatccatatactttaatgcatacactctagcttaagaaaacattgccattttggttagggatatgacttaatgtgctattatttctggttctaatgaagaataataccctatgactttaagtgtaagattcatcctttaagtagggatgtttaggataagttagatgtgtgccactatgatttattgggtttcttaaaaatcttgaagaaaataataaaatttatctcacaataagttaacttgcgcaaactttttacatatggtgaggtgcgtaaggaagccctggccaacttaaagatttttctggaggttcagcaaagttatgttaaattaggggcctttggtctcatccttctctgactcttctacccagtcttttcctaaagttcggtgctactccagttgggtgcatcagggagctccgtcagcactcgcatgtgtcgctcaggtggccactcatgcctgcattccatttaatagagtcaattggaatttttagagcataatctttatggatcctcaaagctgactttgccaaagggattgagacccttactaccatcaaatctctgtctctgcttggttaaaaattggctcactattgctttgtagtaacccctgcccaggtattttttcacttgtgaaaataatttgagaaagacctttgttcctagcctgttgggaaaagtttataattttatgaaaattaagtacagaggctgcgatcttaggaaataatgaaggtgccatttggctgctccttaatagtgcagacagaaaactgcagtgaacacatgccaaaacatgattgaagcctttggctgaaactttatacatagaaataatgatttgctcataacaggtatcattaactgccactttttatgttttccctagaatttgtagccttgctgcttgcttttcttctgggtggcaaagttactactggaaaaacactataagtacaaagtttttggggttttatctttgctttagaagtgggtgtgtacttcacctcttggctgtggaggaccttagttgccaggaaannnnnnnnnnnnnnnnnnnnnnnnnnnnnnnnnnnnnnnnnnnnnnnnnnnnnnnnnnnnnnnnnnnnnnnnnnnnnnnnnnnnnnnnnnnnnnnnnnnnnnnnnnnnnnnnnnnnnnnnnnnnnnnnnnnnnnnnnnnnnnnnnnnnnnnnnnnnnnnnnnnnnnnngaaattttttgttgttaatatgacatttggattaatctccagcttcaacagtacttcttttgtccataaatctcaggaatgttttaggcagaaaactggttttaccctgttgataatcagaaggagtgtgctttaggatttattgcataatactattctttaattgcaatcctaggtatctatagcatgagtggccttagtgagtttgttgaagtgcacatgtttttcaagagtaaaatttaagattaaaaatatatcctatatatagatatctagaaaacttggtttgtggtgcacagtcaagtgttggatcactaaataaccattgcaggtaccgtttgtgtaacattactcatttctgtatattccttttatgggaagatattttgccatggtaactaaaacttttcagttctacttttatgatgtgaatgaatgctacgttttattaaatattaccaggtcagtactatttttatactttattaagcaacaggggattttagtttaataggctcaaaataaaaagttcttaatggaacagttaaaaacaaaacactaacaatctttacgtgaaaatccccactaatagtgccacaataatttctatagaaatatctaaggtcattaaatagatttttgaagacggttcttcattgtgtcaggatgacctttcatatcattctcaccaacttgtagtgcccaccgttatttgtaactattaaaccatactaagtatgtttgtaaccagcattgtgatatattctgtacttgtattgctaaaaatgaattattgacctaataaatatagtgttcctgcattcatagtgaaaaaaaaa

SEQ ID NO: 46866 - DNA, 588 bp, Homo sapiens
attcggcacgagccagcccaagatgattccagcagtggtcttgctcttactccttttggttgaacaagcagcggccctgggagagcctcagctctgctatatcctggatgccatcctgtttctgtatggaattgtcctcaccctcctctactgtcgactgaagatccaagtgcgaaaggcagctataaccagctatgagaaatcagatggtgtttacacgggcctgagcaccaggaaccaggagacttacgagactctgaagcatgagaaaccaccacagtagctttagaatagatgcggtcatattcttctttggcttctggttcttccagccctcatggttggcatcacatatgcctgcatgccattaacaccagctggccctacccctataatgatcctgtgtcctaaattaatatacaccagtggttcctcctccctgttaaagactaatgctcagatgctgtttacggatatttatattctagtctcactctcttgtcccacccttcttctcttccccattcccaactccagctaaaatatgggaagggagaacccccaataaaactgccatggactggactc

SEQ ID NO: 46867 - DNA, 594 bp, Homo sapiens
cttgcggccgcatcttttttttttttttttttttcaggtgtggcaacacgtttaattctgtggccaggctagcctgtctccaaggcctggtggacagcacgtcaccagaggctgccgcaggagcaggcagggccagccctgcaagaggagtgcaggcaaaggcgggggctctgaagtggctgctggaggcaagcaaggccccgggctgggagtgctcagtagccgtcgttagcccaggtgacctcgtagtcggggtacttggctttgattttctcagttgaaaatggcgtgctgggcaggaccataggccatggaatagccgtacacgtgaatcttcttgtcctgactctggtgggagatgcgcccgccgcccaaacactcacagtcgcagccttgcttctgcatgtcgcccgacactttgtcgtagatgtccgcatggtactcagcccacttgtagccgcgcacgatctccttgctctctgcagccggagccccggagcggggagccgagtggactcggatcagcacatacttgaagacgccgtcggagtcgatgtccacatcaggaatgagagcgaggtccgccaccgccat

SEQ ID NO: 46868 - DNA, 366 bp, Homo sapiens
  misc_feature (1)...(366): n = a,t,c or g
cctgggacagaggactgctgtctgccctctctggtcaccctgcctagctagaggatctgtgaccccagccatgaggaccctcgccatccttgctgccattctcctggtggccctgcaggcccaggctgagccactccaggcaagagctgatgaggttgctgcagccccggagcagattgcagcggacatcccagaagtcgttgtttcccttgcatgggacgaaagcttggctccaaagcatccaggctcaaggaaaaacatggcctgctattgcagaataccagtcgacgcggccgcgaattccagatctatgaatcgnagatactgaaaaaccccgcaagttcacttcaactgtgcatcgtgcac

SEQ ID NO: 46869 - DNA, 2998 bp, Homo sapiens
  misc_feature (1)...(2998): n = a,t,c or g
gggagaacctgaaggtgtacatcagcagtcggcctcccctggtggtcttcatgatcagcgtaagcgccatggccatagctttcctgaccctgggctacttcttcaaaatcaaggagattaaatccccagaaatggcagaggattggaatacttttctgctacggttcaatgatttggacttgtgtgtatcagagaatgaaaccctcaagcatctcacaaacgacaccacaactccggaaagtacaatgaccagcgggcaggcccgagcttccacccagtccccccaggccctgggaggactcgggcccggtgaatatctcagtctcaatcaccctaaccctggacccactgaaacccttcggagggtattcccgcaacgtcacccatctgtactcaaccatcttagggcatcagattggactttcaggcagggaagcccacgaggagataaacatcaccttcaccctgcctacagcgtggagctcagatgactgcgccctccacggtcactgtgagcaggtggtattcacagcctgcatgaccctcacggccagccctggggtgttccccgtcactgtacagccaccgcactgtgttcctgacacgtacagcaacgccacgctctggtacaagatcttcacaactgccagagatgccaacacaaaatacgcccaagattacaatcctttctggtgttataagggggccattggaaaagtctatcatgctttaaatcccaagcttacagtgattgttccagatgatgaccgttcattaataaatttgcatctcatgcacaccagttacttcctctttgtgatggtgataacaatgttttgctatgctgttatcaagggcagacctagcaaattgcgtcagagcaatcctgaattttgtcccgagaaggtggctttggctgaagcctaattccacagctccttgttttttgagagagactgagagaaccataatccttgcctgctgaacccagcctgggcctggatgctctgtgaatacattatcttgcgatgttgggttattccagccaaagacatttcaagtgcctgtaactgatttgtacatatttataaaaatctattcagaaattggtccaataatgcacgtgctttgcccctgggtacagccagagcccttcaaccccaccttggacttgaggacctacctgaatgggacgtttccacgtgtctctagagaaggattcctggatcnnnnnnnnnnnnnnnnnnnnnnnnnnnnnnnnnnnnnnnnnnnnnnnnnnnnnnnnnnnnnnnnnnnnnnnnnnnnnnnnnnnnnnnnnnnnnnnnnnnnnnnnnnnnnnnnnnnnnnnnnnnnnnnnnnnnnnnnnnnnnnnnnnnnnnnnnnnnnnnnnnnnnnnnnnnnnntcttacaccattttgtttgattgtctagtccctgtttctttttctttctaatccttattcatttaagcaaaaccatacattatcttttccagtcctttcttgtattcttactgtttttttaaaataactttttgccttaatagctcattgtcactaataacttctgtgttctcccaggcagtgttataacagaagggcaatgaaaacattggacatgaccatgagtgcttcctttccttaactctctaggtttgtagtctgttttaaattaggattagttcctgcattctgaaatacattggcctagaacattttatcccaggcatttttgaatagaaaacagttgcgtgcttttattgaagattgttaaaataatcaccatagtaacttgatatgttagtatttttctttttccttttagtatgtttcaagtgcagtaatcgtacttgtctatccagtttctatgtatgatacgagttgcttacacgatgcatggctaacttgttaatttagttttctccttagagactttgagacccttaagagacaagattgagaaagagccatgtggcttggctctagaaacgtcattatcattaggaccatcagattttagattaagctgctattgaattaataaaatcccaatgaagcagagttataagggatagatttatagctggcagaagtggtatcaaaggagaaaaacagtgaaaaagccaatttcactgggttcgttcaatccagcttgttggctaatattagttacccttgttttaatgacagagagtggctggaatctgtagctaggggaggggcaacactgttagatgtgaggaaaggaagtgccaaaaatgcctggacagatggcttgtcccaaggccaggacacacactttaaaatccaacattcacctaagcaagtaattcttaaagatcttacagaaacgcagagtcaatcaggtttataaaggaaggctgaggggagagaggaggcctgggggcctggacgaagaggcctaggacctgaagagactccagcgagtctcgggaagcccaggggacctgtcaccatctgggcacttcccaggctcaatgctcagccagagtttgctggtggacctcaggattcgaagtgtgcaacagacggagtgcgcttgctgttcagggcggccccgtgcaggagcaccagctcaccctcaggcatctcggactggagggccagcagaaggtcagcaacttactcttaaaacgattgtttcggatcatattgatctctttcctttttccttttgtcctttcactgtatgacttgaatcagttttgattctatttgtaagtgtttcttgtcgtgaggcacctgccatgtctgttgcgttttcctcggcagcgtgtagggcttcagcttcctgggttttcacccttcctgcaggcactgtggggtcctgagggccagtgggtccatttcacctcttgctgcatgatggtcagtagctgatctgttatggcattcacttccagattaattttccgtgtttgaagtatgtgcatatgtgctttacagaataaaacatctgaatttaaaaaaaaaaaaaa

SEQ ID NO: 46870 - DNA, 1497 bp, Homo sapiens
cgcttctctttcggagggagtgttcgccgccgccgcggccgccacctggagtttcttcagactccagatttccctgtcaaccacgaggagtccagagaggaaacgcggagcggagacaacagtacctgacgcctctttcagcccgggatcgccccagcagggatgggcgacaagatctggctgcccttccccgtgctccttctggccgctctgcctccggtgctgctgcctggggcggccggcttcacaccttccctcgatagcgacttcacctttacccttcccgccggccagaaggagtgcttctaccagcccatgcccctgaaggcctcgctggagatcgagtaccaagttttagatggagcaggattagatattgatttccatcttgcctctccagaaggcaaaaccttagtttttgaacaaagaaaatcagatggagttcacactgtagagactgaagttggtgattacatgttctgctttgacaatacattcagcaccatttctgagaaggtgattttctttgaattaatcctggataatatgggagaacaggcacaagaacaagaagattggaagaaatatattactggcacagatatattggatatgaaactggaagacatcctggaatccatcaacagcatcaagtccagactaagcaaaagtgggcacatacaaactctgcttagagcatttgaagctcgtgatcgaaacatacaagaaagcaactttgatagagtcaatttctggtctatggttaatttagtggtcatggtggtggtgtcagccattcaagtttatatgctgaagagtctgtttgaagataagaggaaaagtagaacttaaaactccaaactagagtacgtaacattgaaaaatgaggcataaaaatgcaataaactgttacagtcaagaccattaatggtcttctccaaaatattttgagatataaaagtaggaaacaggtataattttaatgtgaaaattaagtcttcactttctgtgcaagtaatcctgctgatccagttgtacttaagtgtgtaacaggaatattttgcagaatataggtttaactgaatgaagccatattaataactgcattttcctaactttgaaaaattttgcaaatgtcttaggtgatttaaataaatgagtattgggcctaattgcaacaccagtctgtttttaacaggttctattacccagaacttttttgtaaatgcggcagttacaaattaactgtggaagttttcagttttaagttataaatcacctgagaattacctaatgatggattgaataaatctttagactacaaaagcccaacttttctctatttacatatgcatctctcctataatgtaaatagaataatagctttgaaatacaattaggtttttgagatttttataaccaaatacatttcagtgtaacatattagcagaaagcattagtccttggactttgcttacattcccaaaagctgacatt

SEQ ID NO: 46871 - DNA, 965 bp, Homo sapiens
aaaacttttattttttttttgcaaaatacatgtgttttgtaaaagaaatctgcactgtgcttggtttatactacataattataagtaagcaaaatagtatgacttcttttgactaatctactcctaaagccttgagttgccgttcaatctcttcatctgagattgtagcctttgaagtagaggcagatggtaagcttcgagcagctgatggagctttggccatctttccagaaatttcaattccaatttcatcaagaacttgattcacaatatcctggctttcttcttcgtcatcagaaccgtcaaagatgtcatcaagtgtatcattgatcatttcttcagtcatttccattttcatgttttccttctggaaattctgcattgtttgtaatgtcttttgtggatccatcttcttgttaactgcctgcattgtttttgctgtggtagacattgctccagccatcttcatttgggaatcatcacttttgtttgtgtagacatagaagtaacttttgaacttacagcaaaagttctcgtcttctgtttccgtagatgcacaagttgtttggctaaaactttgcaagcttccttattaccaatcttggccaattttcttaatttctaattccagctgtttttcttgtttctctaaagctgctcgatctctgattatagccctctgtgtacctcgtaactctcgattctgttcctttattacatcatccacggttttcttcttgaaagagggacgccatggttaaaagactgcgcccgggcggcccggctcggcccggtccggcccaacgctggcaaaggacaggaggaaaaggacaggaccttggcgggttcggggtggcggagcggagagacagcaggaggaggtcggggtcgccaggcaggacccgcggaaggcttgtatccgcagctaccgcagccgcgtcacccggagctcaggtgaccgggac

SEQ ID NO: 46872 - DNA, 2986 bp, Homo sapiens
  misc_feature (1)...(2986): n = a,t,c or g
tgacccccatccggccctcatggctttgtgtctggagctcttgaagcaatgttcatcatgcctagtggcgtataagaagaccccgccaccggtccctccacgcaccacttcaaagccgttcatctcagtcacagtccagagcagtactgagtctgcccaggacacctacctggacagccaggaccacaagagcgaggtgactagccagtcgggcctgagcaactcgtcggacagcctggacagcagtacccgaccgcccagcgtgacacggggtggagtcgccccagcccctgaggccccagagccacccccaaaacatgcagctctgaaaagtgaacaagggacgctgaccagctctgagtcccaccccgaggccgcccccaaaaggaaactgtcatcgataggaatacaagttgactgcattcagccagtgccaaaagaggagcccagtcccgctaccaaattccagtccatcggggttcaggtagaggacgactggcganagcagtcccctctcacagtatgtcctcccgacggacacagactcggatacccaggatgccaatgactcaagctgtaagtcatctgagaggagcctcccggactgtacccctcaccccaactccatcagcatcgatgccggtccccggcaggcccccaagattgcccagatcaagcgcaacctctcctatggagacaacagcgaccctgccctagaggcgtcctcgctgcccccacccgacccctggctcgagacctcctccagctccccagcagagccggcacagccaggggcctgccgccgagacggctactggttcctaaagctactgcaggcagaaacagagcggctggaaggctggtgctgccagatggacaaggagaccaaagagaacaacctctctgaagaagtcttaggaaaagtcctcagtgctgtgggcagtgcccagctactgatgtcccagaaattccagcagttccggggcctctgtgagcaaaacttgaaccctgatgccaacccacgccccacagcccaggacctggcagggttctgggacctgctacagctgtccatcgaggatatcagcatgaagttcgatgaactctaccacctcaaggccaacagctggcagctggtggagacccccgagaagaggaaggaagagaagaaaccaccccctccggtcccaaagaagccagccaaatccaagccggcagtgagccgcgacaaggcctcagacgccagcgacaagcagcccccaggaggcccgcaagagactccctggcggcccaagcgggcagcttctgtgcggcagaactcagccaccgagagcgcagacagcatcgagatttatgtcccggaggcccagaccaggctctgagaccatgcaggaggaaagaaacgattttaaatcattaaaaacacaaaaactaagtgcgaacggaacagagttttctcaacctttgctatggttattctgtctagagaccctgagccaactttcaaattgacgcatacaagggctcacaatttggcttttttgggtccctcccagctttaggttatgaagattttactcacaaaaaaaatcaacaaaaatcacgaaactagaaaactttttttttcctcttgctggccgtggtggactagatagatggacgtcggcaactcccggcccagcctccatactgcggtctttttactcgttctatctgatgaggaactcacactagcttgtttacaggatgacggacagcccaaggggcagccttgggcacctgccatgtccctcctttccccagctatccccgctctgaccttgattttcattcttatgtttttctcttttcccttcagagctcacacagtggtcaccattgtggcaagcggctttctgggtctcagccctctctgcggttgagggcccagaggacagagagatggacatgcgtcccctccctccccccgccaagtgctcacacacaacctcacgcgcacacacacacacgcagatggaggcgcctcactgggaggtgccccgccagccctgggcagtgtcaggcaggactcactcaccgctgagcagatgagggaagttttagtcttggcgggtggaaatgagacgaagccacagttatcacactccagactcctgcccttttattttctccagccccttcttccttcagcaaaatctaggactcccgagtggcttccagggggccgtcagtcctcagccgcgcctgtgtccggtgcccgaggggcgggcggcggtgtctgtatgtatgtgtacatatgcacatagaccttagagtgtatagttaacaaacgcccatctgctcacccatgcccacccagcgccgccgccgctggctctcggggcacctggcaggaggcgggtgtgtgaatagcatatatttttacatgtactatatctaggtgtgtgtacaagtgtgtgtaaaaatatataccttgtgtgtaagcagccctttttttttttggtctcnacccccntcccccngccccgcactcctaaggccccatctgcccagcctctgagttttctgttctattttttttttaaccccaattatccttctctctctcctgcccccgcatcccactcccagggtgtcacgagccctgagctgcaaatggcccgggcctgcagggcggggtaggggagggcaaggctcagccccgaagccagctcagtacctgaggggctgctctatgctgtgtatgcgcctctctggcatccgagacatcctcttggtggcgcttgctgcagggggaccccccccccgtccccaggtgaaccaagggtctgctccggggcccatttccagcttggccgccgtcnnnnnnnnnnnnnnnnnnnnnnnnnnnnnnnnnnnnnnnnnnnnnnnnnnnnnnnnnacggggacagtccctgcccctccctacctcacaggcatgttgtgagaataaatgaggtaacgtgta

SEQ ID NO: 46873 - DNA, 464 bp, Homo sapiens
gctatgacatgattacgaatttaatacgactcactatagggaatttggccctcgaggccaagaattcggcacgagcacttcttaactaacatagtaataaggataatgtaacagctaacggcgtacaagtgccagcccctgagctaaggctttatgtagagtctctcatttagtgtttatgaagtcctgctgtcattgtccttattttacagataaggaacctgagccccagacagttttgactccaccatagtcatgcatcccatggtgtcagagacctcttttgagcccagctctgtcccaaaactcatggggtttttttggtttgttttttgagataggttgtctgtctgtcgccccggctgggatgcagtggagcgatcctagctcgctgcggccttgaactcctaggctcaagccatcctcctaccttagacccccgggtaagttggcctacaggtgag

SEQ ID NO: 46874 - DNA, 462 bp, Homo sapiens
  misc_feature (1)...(462): n = a,t,c or g
gnanctacagnntgacntnattacgaatttaatacgactcactatagggaatttggccctcgaggccaagaattcggcacgagctcggtggcggagtgctaaagaccctagcggttcaggcgttcggcgagcggggccgctgcttgttgcgctcctggctctcccggggcgggcgcagatgggcgccgctcccgggatgtagttggtgttggtgcaaggcggaagcgagcggcggtcggggttcccgctcttgggagcggatggtcactcccccgcggggagggcgagccgaccagattttcctggggccggggacccggcgggctcggggcagggactcacctgtcgcacccacactcattcgggttggacttgccggcgtcaccgccgcggacttcgctttgggccatgaccagatataattggtgattacaactttcctctataaattaactcttgaca

SEQ ID NO: 46875 - DNA, 963 bp, Homo sapiens
  misc_feature (1)...(963): n = a,t,c or g
ggactgccagcctcaccctctgcagttagcatggttggcctgatgcagggatcccgagggattactttttagaccttctttcacattcagaaaagtagtatagattcaggagaggcaagaaaattatgctgtccatagaagtcacccatgaagactgatgccaccacctgaaggctcatgattgttaaaaatgtccacgggaacctctcgtccacaggaggtttgtctcaacacttcccatttttacggcattggcattgccaagcatggggaagtatctgctcttctcatgttaaaagtgggcccagcttttcttaactcagtccaagctgacttgtttagctgcactggaatttcttaccaaccaaatatttgcatcgagcaaagggggctgtgtgcacctccctaatggcagcgatgatggctgctgtcattcaagcccatcttcagacgtcacagtctggaagtgaaatgtccacaaacatctgtggcagaaaaggctatacggaccacccagttgtgctgcagctttacagagcaaggaagggttgtggcaaataaatgattaacctgcctcgactgtgctgagggcaacaaaggccatctcaccaaaggattattcgatgccattaaatcatcccgtgaccttcctgcttccgagtccatggcctttgcccagggcatgtactcccctgagaggccttctgcctagaaagatctatgactgggttccaaagttgaggcctaggtttttgctgggatttagatattttcaggcaccattttgacagcattcaggaaaacggttattgaccccatagactagggtaagaataaaggcaataaatttggtctgactcagaatataggagatccatatatttctctggaaaccacagtgtacactaaaatgtgaaattgaaggttttgttaaaaagnaaaagataatgagcttcatgcttt

SEQ ID NO: 46876 - DNA, 891 bp, Homo sapiens
gggctcctccggcagccttggccgcctctcccccttcctggtcctgctgctccgggggtcttttttgccaaactgaaatccttctcctgaagttgattttgcaacatctgcaaatgtaaaagtgctacttgtttggccaaaaatcacaccacggccattcttctggccactaatatcctgagcctggaagccagtatcattttcaagaggcttttcacttttcttttcttgatttcctggttccgaaatgccaaatttaaatccatcagcagacacagggatggaaaatccttctttggttgacttaaattctgtattagaagaaccctttgtgggagtaacattagctgctggtctgagaagatactgggaattatatgctggtgactgactataatatactgaagggccagtagttgcaactgttagtggagccccatgaaatgtctgtgacccctgatatccatcaggcaccgagtctggtccataattctctgtgggccaacgatgacgggatgctgacttactgctatttagtttcgtaatggcctttacttcttggcaaatcattttcccgtaaagaattctgatcttctgcccatcgaggtggtgttttgggagaatactaaaaaaaaaaataaaaataacaaaagagcatttaaaacacttagaaacaatttcacaatgaaatgattcccattctttcctgtttaccttgtaacttttacttggtgatagtgaatatttggtaggagatggtgtagaatgttttatttctgaatctgcatttcgcaaagaaccatttttatagagaggacctccttcactatagtcttcgagttcctgcatgactgacttaagcatctcttttacagactccaggggcacagg

SEQ ID NO: 46877 - DNA, 5356 bp, Homo sapiens
  misc_feature (1)...(5356): n = a,t,c or g
gctttgatagctagttgtctaaaagtactgtttattaaataatccacctntttccccacttaaaacatccctcttaccatatactaaattcctgtagccctgggtctgtttctggactctcccgtctgtctgaccccctccaggtcacactgagtgaggtaatggtggcgtgagaatcctctgggaatctggcaggatcacccccgagcagtccaccccccaactcattatcatcgttcagagtggtcttagtgttctcacacattcactctcccaaatgcactttagaactgtcaattccaaagtttcaatctcattggaattacactgaatttatcagctgatttggggaaaaccagtatgtggacaggaacatgatgtgtatcattgggttgacttacagaatactcttaacaggtcttcagttgattcttaggttttacaggtaggcagttttattgtctacaaataatgacaattataattcttccttatgttcctcatctggcttgttgcaggggttagtagtgccgggacactgctgaataatagcttgcccttggctagtttctgactttaatgggaatgcctgtggcgtctgactctttagaatgccatcactgttggtttctgaaacagacctttatctagattagggtgtttctttccagacttaatttactaagagttttaataagggatggattttaaatcttacgaaataccttttcagcatctatagagctatcataaattcttccctattaattgaagctgaaatgaaggctcctgcacagccatactgcctcctcatatactctacatgcccctagtcccctgtgccaggaactgaatacctctgcagatagactaaaggtgaggcttcaaggtctgcctgctaggcgtggtgctgaacgccttctcaagctgcccaagcacatggagtcttggaggctttcctttccagagaaagaaagtaggaccaatcccccactccctgccataataagaaagagctcttggggacagcagcatacagagcacagaagccaaagagaattcaggcagggtgaaggaccccacacccctgccaccatcccacaaatcagtacataggccaagtgcccagtttgccaggggtcttgctacctgaagtgacctatgatctctggccatgacaatctctagcgagtccttcctgccattctgcagcctgttagccaatgcatgcaggccaggcggcacttactgcaaagccatcacagaaagcagcgaggccttcagactcctaggagaaacagtgattccttctactgctccatccccactgctaactctgggtccccacccctgtcctcccagagtcactctgatcctgctcatcacaccaggacatggagtctctacataaccacaggattcccctagagcctgctgttgccacagtgaccctgatgctgggctgttacccacttagcctcccttacctcttctgtctgcttccaccacttctatatccctgtttggaaaaaggatgggtgcctgagcctgtgcccagttgggtgtccactcacaacccaaagcagagcctggcactgcccactctgaccaagggccttctctccctgatctcactggcgtctgccctatttacccatcactgggtttgtgggttgcgccgaaaacacagcagcagcaataaacagaaaatgagggcagagcccagtgtgtcacagttctgggaggcagatcgggatgggatacccgtgtggcttgtccaatgatcttcatgttaagaggcagtctctgtgaatgaactttctcttcaggccacaagaagccctaacccaagcggaggcgaaaggtagcaatctccatgggctccaaatagacgtcagtgctgttggacggggaggccagagggtacagtaacgtcaaggaggttggctgaaggaataccacatccaggccatggaaaaggctgcccagggctaccttgccttggcttgtggtgcagttgaagcccaagttcttggcctccaggccgcagtcaaaacccttgcggtgtaagatgagtgcggtctccgccgagggtagggtgtcctcctcagcctggagcgtacgtaggttgagcaggtggaagtcacagggcagtgaggaagccagaggatgaaatgagcgcagaccagggcctgggagctgcatcctggctacaggcagagcgagcgccggggcgttcaggtacatggaggtcaggtggctgaggagggatgggtagctggtagagtggctatcttggacctcactgcccacggttcgccgctctagcaggaggcggaaacggttgcaggttctcttgttgtccttgagcccttggcctaggccccggttgtcatcctgcatcagccgccggtccaagatcacctccagctggccatctttgaggctagagacacccagggcctgggcagtgtgcagcgtgaggcgcttctgtgcgtcctggatataggccatgactggcatggggtagaagttggcctggagggggagcttcttcagataccgtcggggctgcaccctggctgtcgatgtctgtatggatgtgcagggccagctccttgttgacgtagtcccggatgtccaccagggatgatatgtccagagacagcccctccacccctggcagattgtaaagccggaccgcctggtgaatgtgctcatagtacgcaaccacctctgagaagaaagggccttcagtgacacgcagcacggggggctccttggggacgtagggcttgcctcgccatcgggcaggaagaggtaggctccactcttgtctttggacgtacgggtgccatagacaaggacctgcatgtccacctgctgctcgtgctcctcatccacccttcggatgctctgccaaaaaacacagccctgaccccttgaggagcccagtaaggcctgagaaccagacctgcatgtagcggttgctgagggcgaagtcgctggtgccagagtcaatgacacggagaggaaacgcttcgtgcctgctgacggacagctgccggccgtgcaggtagatgcgcacagaggagggcagcgtgcggtgcccatccaggcccagctgtagctgcagcacgcccaggcccagggctggcaggcggacaggcacagacacctggtagacgtcagggaccgcctcggtggcagagctccagtgtgcgctgatctgcacggccaggggctgaccctcctccgaaaggacacgcacgcggggagagttgaccagcagggacaccatgctgaatcgctcctgttccagtgggttgaataggaccacaaacctgggcgaggaatccagctggatcaccgtgcgctctgggagggcgtcgtgacttaagcgagtgtcatccacttggaggaagggcgcctcagggtcaaagtggtaggtctccttgtcccccagcaccagatagtgggctgcatgaatgatgacctgcttcaggttgacaagggagcgcagaagcctgaccccatagtccaccaccacagcctccttggccgtgccagtgatggcatcgtgatgctggaagagccccaatgtgcgccgagcttccgtcaggagggtgaaatcagacagtgggtaccggccagccagaccagagcggcgagcgtgagctgcagccaggctgtacagaacctctgccccccgcaggtgggcttccaggactcggtctaagctcttgtagaagggccgggaagtgtaatagcctgtccagtaatgatcctcccggtccgcataggagaagaaatccccgctcagcacaggaaaccctggaggccgggcccctggctccacccctgtcctcttgtacagggcatcaaaatagtcagaaagagtgccaaactgggcctgcacatggaggttaggcctgctgttgaagaagtcaaagagccgttggtagttgaagaactgggcatcccactcctggggcttgtcatatcggaagtcatctccaagaggcaccaggaggacgttgcttcggaacagctgggacttcttccggtattggtccagaagcagggctgccctctctgccacgttggcctctgtgatggcccggggtggcaccttccaagggcagttgatgcgcccaccaggcaggcgtttgaaatcaaattggcagcagatcttgggatctgggccacaggtatgggggacgtcatagctgtagaagggcatcatgtgacagaagatgtctgtgctggagtccgagtcccatgtctgcctccacatgaactctaggctgtgggtggcagcaaagtgcttcttgatggcatagtgcactctctgaatcagcatgctggtgaggttggcacggcgcagcaggtaaggcatggtggagctgtatccaaaggggtccactgcccagccagagcggggggttgcacccaagatttctctccagccactggtgtccttcgatgagctggtcaatcaatgcaaagtagtgggaattggcctcatctggcatcacccagcctcctgtcgcaatctccagctgcccgtttcccaccagccttcggactgccgctctcttttggacattgatgttgtcccaccacttggcgaagaaggagacctctgcccagaggaagcgccgccgggggtcctcctgcagcttagacaccatgctattgaggatgtgttgggtctgctctgtgtagtacttgtcaaaggtcttgatccagcctgggtcattgtgagagtggggcaccacaaacacctgcaggtcttcagcatcccagtcgtgcgggtcgtaggagatgtcgaagccttgcctccacacaccaccatccacgttgtcaaacggcagctcctccgacacagtgagcatctgcagctctggcttctgaccccggccccccaaagcaaactggcagtcctgcggggagatggagaagaagctgggccggggctccggtggcaccacccaggagccattgaccgtgtagtagggcagcatggcgggcgggccctctgcgttggctgtcagctccagcacggagtccttgatatggctgataatctcatggttctcctccaaaagctgctccagctgctcaatgcggttctgcagcacagaaatttggctccgggggaagttcccaccattctggtgtcgggtgggatcgtgttgcactcggtccagcatgaggtagagcgagaagactgccacacagaagatggcagccccacacactgtcacctgctttttcagcttcatactggcctccacacacaccgtcagcgcccggcctccgcgccgctccgggcccagtcggccgagctgcc

SEQ ID NO: 46878 - DNA, 736 bp, Homo sapiens
atttttttttttttttttgtattgcaaaatgtacagcatttattcacatacagacaaaaaggcacaattctactaaatagttcaacaaaaaaatacagctgtcctcaactagttttataaatactttcaaaaagggggtagaaataaatacaggattgggtcatgtaatataaaatagtcatctctacatatactttaatttgatttttaactcttcatgcacctttttttttttttcaattttagctgaatggacaccaagctaggcacatagtgaaaaatcctctgtacaaggttacaaatgtaatgacaagtttgtccatttcaaaataagatttgtacacaacacataaaacccttcatttagatcttgtgtttataacctaacaaatgacattccaggcaactttacaaaagtttaactagcctacattttgacataatacattaatcataatcaaagatatttcttggtcaggatgcacaaggaaagataaagcttaaaaaaaacaaatgcaaatggttccatactaatagaacgcaagtgggtgtttgggctggttgctgcttatggccacctcatagagagttcccagcatgacatgaaactaactcacaaagctatcattatactgtcagagaaaccgtgctctatccatttgcatttcgaagcaggaataaaaagtgtggggccttttaatttttgtgtggtttggtttttggtgtggggtttttt

SEQ ID NO: 46879 - DNA, 770 bp, Homo sapiens
  misc_feature (1)...(770): n = a,t,c or g
ctcaaaataagttgtccattgcttatcctattatactgggatattccgtttacccttggcattgctgatcttcagtactgactccttgaccattttcagttaatgcatacaatcccatttgtctgtgatctcaggacaaagaatttccttactcggtacgttgaagttagggaatgtcaattgagagctttctatcagagcattattgcccacaatttgagttacttatcattttctcgatcccctgcccttaaaggagaaaccatttctctgtcattgcttctgtagtcacagtccccaatttttgagtagtgatcttttcttgtgtactgtgttggccacctaaaactctttgcattgagtaaaattctaattgccaataatcctacccattggattagacagcactctgaaccccatttgcattcagcagggggtcgcagacaacccgtcttttgttggacagttaaaatgctcagtcccaattgtcatagctttgcctattaaacaaaggcaccctactgcgctttttgctgtgcttctggagaatcctgctgttcttggacaattaaagaacaaagtagtaattgctaattgctcacccattaatcatgaaggactaccagtcgcccttgcatttgccntgaggcagcgctgactacctgagatttaagagttcctaaattattgagtaaaatccaattaccanaantcggtagttaacaatgggcctttgcaaaaaccttgcataaaacnagtggacngaccaa

SEQ ID NO: 46880 - DNA, 842 bp, Homo sapiens
gctggaggagtgatgacagctcagcgtccccactcagtgtatctgaccatgtgtgtaagtgcacaaaaatgtggttgtagatgttgctctacattcaaaccttccaggctacactcttccatcagcatgagtcctggagagctgggggaaggtaggaagaggagccttgccttgagttcctaaaccgacccactgcagacacaggctctgattctcttacccagagatgcccatgagctgacattttactcatccctctgcctccaagaaggcctgtattatacgtgtcctcctgggggttggagatgatccctcaagtacacaaaggtcccctggcccttcatctgggaatcatatactccactctagctcccagaatctacagacctggctcctcggatctgaagcccagcacaaaataatctccccgtccaaggagcttgtggaacttgaattgggaactttggagtcttgtctcccatcccagcacattgaggatgtagttggtgaatggactcttccaggcatggagatcctcccatcctaaaagtacctgcctccttcccagccatccctgacacattccagccagttggatctcacagcacagctatccacagggagactgggatgttcacgcagcacttccattactcagtacctccatacccagccctatacgcagacccacaggtggggaaactgaggcaggaacagggttctgccctcccagagcctccactctggggatgccagaatggaaagccagagggaacctggagaatcatccagtcttactgtctcaatgtacatacggggaaactgaagccaggagaagaaga

SEQ ID NO: 46881 - DNA, 1655 bp, Homo sapiens
gcggcgcgccgccgcagacagctggtgtcccgccggagaacggccgagatatccccgccggcggaggagcagccccagcgccaggcctcccgacgtccccgggcagcagccccaggccgcgaagtccccgtctccagttcagggcaagaagagtccgcgactcctatgcatagaaaaagtaacaactgataaagatcccaaggaagaaaaagaggaagaagacgattctgccctccctcaggaagtttccattgctgcatctagacctagccggggctggcgtagtagtaggacatctgtttctcgccatcgtgatacagagaacacccgaagctctcggtccaagaccggttcattgcagctcatttgcaagtcagaaccaaatacagaccaacttgattatgatgttggagaagagcatcagtctccaggtggcattagtagtgaagaggaagaggaggaggaagaagagatgttaatcagtgaagaggagataccattcaaagatgatccaagagatgagacctacaaaccccacttagaaagggaaaccccaaagccacggagaaaatcagggaaggtataagaagagaaggagaagaaggagattttagtggaagtagaggtggaggtgaaagaagaggagaatgaaattagagaggatgaggaacctccaaggaagagaggaagaagacgaaaagatgacaaaagtccacgtttacccaaaaggagaaaaaagcctccaatccagtatgtccgttgtgagatggaaggatgtggaactgtccttgcccatcctcgctatttgcagcaccacattaaataccagcatttgctgaagaagaaatatgtatgtccccatccctcctgtggacgactcttcaggcttcagaagcaacttctgcgacatgccaaacatcatacagatcaaagggattatatctgtgaatattgtgctcgggccttcaagagttcccacaatctggcagtgcaccggatgattcacactggcgagaagcatctacaatgtgagatctgtggatttacttgtcgacaaaaggcatctcttaattggcacatgaagaaacatgatgcagactccttctaccagttttcttgcaatatctgtggcaaaaaatttgagaagaaggacagcgtagtggcacacaaggcaaaaagccaccctgaggtgctgattgcagaagctctggctgccaatgcaggcgccctcatcaccagcacagatatcttgggcactaacccagagtccctgacgcagccttcagatggtcagggtcttcctcttcttcctgagcccttgggaaactcaacctctggagagtgcctactgttagaagctgaagggatgtcaaagtcatactgcagtgggacggaacgggtgagcctgatggctgatgggaagatctttgtgggaagcggcagcagtggaggcactgaagggctggttatgaactcagatatactcggtgctaccacagaggttctgattgaagattcagactctgccggaccttagtggacaggaagacttggggcatgggacagctcagactttgtatttaaaagttaaaaaggacaaaaaaaaaatctaaagcatttaaaatctagtgaaataaaaaaaaaaaaaaaaaaaa

SEQ ID NO: 46882 - DNA, 1786 bp, Homo sapiens
cgtcgacgcattattttcttttgcttttgtttatggacaatgttcagctgacataagcagaagttggccaaaatactgcctgtactgttaatttcctgtataattcacttaaacaaatatacaaataccataagcattatcaaataaaataactggcactagtgttataagcatattaatggacctggtagggaaaagtgatggaagaagactgcagcccatggcatttttctttttaccaaaagaaaacgctcagtagcaccataatggtaatacttaaaagaaatacataagatagaacattttaactgctatcattgaggttaacctgcttttatttaagtgaattatacaggaaattaacagtacaggcagtattttggccaacttctgcttatgtcagctgaacattgtccataaacaaaagcaaaagaaaataatgctaatcatacatggaccttttgtacttggtacaagttctgcaccgtgctttgatttcatggttggagaagatatgcatgtgttaaaaactgaggttatgtaaagttattcactaaagcctgagtgtgtctttggtaggctaatactttttcagcattattaatcacattcatgtttatctatttcctgtatttttatatataatccaaggtgaccagagaagacatggaaaacaacacagcaaaatcctcaaataactaggccattaaaacccagtcgatcccaaaggcaccaagaatcaatggggtacaaacttccccttagagaaaggtggattttttgtaatacttataacctaatgggactttattttgtagttttatgtatcttatttgttgctgtcatatgcttaattacttacctttacattttttcctctaagatggcatcaacaataaacaagatagagtaccaggtatttctatttcaaagttgtgcaaaaactgccacaatcttgctcaaagtgtctaagtatccaaatggtagcaaatgagctgcattaagctttatataaccacattgcatatgaaaaaaaaaaatgaaatttatgccgatataaatagaaatgttacagagtatcatatactgagagtaacctatgcagttcttttaaacttatctctttagtggtttcaataaaatatcactaaccacttatccctaaagcctcaagttttcttcatttgaatgctgtagaattgcattagtattttatattgattatataaattaagaccaatttctatctaagtatgtgcttcaagcaatgttttgtggcaaacacacaaaacatgccttgctcctccaatttattatccctaaaataatgccctttaaagccttcacttcatagtttggtaactaagatccacatgacacacaatgccttgctgaacacagaaaatgtatctgcattatgataatgaaacccggcttttgctggtaacctgaaacttaagtagtcacatgtagttcaaccagctccaaacacggttgtacagtggtaattattctgcagcatttatgggcctaaatttcagtctgaattgcaacttttaattccattgtctgatgtgagtggttgttatttgtttcttttagtgcatcgccaaaatataaatcaacattaggttttattccattgttaccatgttcttcagcaatatgattcaactgtgaaacttctgaacaggaagcagtttgggtaaccacagaaatgctacactgatgtggggaattttccagacggtcattttctacctcaggaagaatgttaacagtagca

SEQ ID NO: 46883 - DNA, 1392 bp, Homo sapiens
aaaattccctataaaccaatgaaaagaaacttgtctggcaataatttccaacattttaaattctaatttttagttacaaagaaaaaggatagaatgaggcttttcaaggaattcttgctcatcccttcaattatttggcaggtaaaacagtcctagaattcagcttcctttttggttttattactattaaatagatactttcatataaatggaaacacttttcctcaaaacattaattcaaaacatactccttatattaaggattatagcaccatattttttgtatattccctatgtgtaactttttcctgttggtatgtgatatttttcatttaatatgactatctgctggtgttggggccaatagatttgtgaatattctgtgggatgtgtctatggtataggtgtatatatatatatatatattttttttttttttcccagctaattacctcaaatgtgtgattgtttaatatataccacactatgtttgcacagagcagggcttccattagcagtggatatttttatgtctgactttgaaaatcagtcaacacaatttcattggtgtgaattatttgttgctctttttcatattttaatggagagattcctattataaggcccatgcttcaaacataattatatctttctatatccagccatctggaaatacataggggtaagaagtatttcttgaaatgtccttgtttagtaagttagtaaaaactgggatgactagttgccaagatgtcttgtaactgcatagcagatgacacctggcatggcaagtctcattcacttcagcacaacactctgtacatttcagtctgatattctactttgccatttaaggacaccattaaaatcatagagattttcagtgacattggagtattgtaattattactttcaaaaaattatttttaataggatgattaaaccaatgagaagaaacacacataaatgatattttgcagtttatctgtattaagaaatgcttcttgccaatttctagttttagtttttggattgctacataagactttctttccatttactttatgtgtttttaaaagctgcaggtaatttttaaggtttgatggaattataatggaagccttgtataagttaaatgaaattggtaaaggagagcttactttgtctataatgcattcaggattaaaaattagatttcaaaatgaaatgtctgatttgtaaaatatttaatgttatatcagacttacataaaattttctgtgagaactcaaatgcatttgatttttaatgaatgttctgaatgaaatatgaatttttgtctttcagtctctgtagtttatctcaatatattaataaaaaggtctgttctcactgtaaaaaaaaaaaaaaaaa

SEQ ID NO: 46884 - DNA, 873 bp, Homo sapiens
tttttttcccaggtcaatagcaaggccaaggccaaggttattatttagctctgaactggtggtatcttgaatcccgagcaacgccgaacactggccactcctgggcagcagaggggggaatcccagacctcggggtatggaggaggggcccagaatcaccaggcctggggtcagcagtcctgctctggcgatggagagctcctcagcaggcggccggggagaagtcagccccacagcggggccatctcagatggtctcatcatcgctcatgtcccagatctcagcagcttgggtttcttgatgcagcaatgtaagaccagtcaagtcttctaagaaggaatgtgaagaattaaacaccttggctaggaagttaaatccttctcgttcatattgatcaagaactttggaagaacaagctgtacatttgtcaaatgccaggctgacgggaaggacattatcaaaccgtgaaagaaatccccggatctggtgaggcacaagcccaagagaggttggaggctcattcatccgatcgtcactgctgctggcaatggcatagcccccttctggatgctgcaaaacagataccatcaattccacggccagggctcctgcaatcacggccagtcctggacgactcacagtgcactgctggtccaaggtccggtctctggttgaatctcctggggccaccacatcattgcagaagtagcagccaagcttgtaaccagggatgttggcaaaaagcgatgagcccaggaggtcagcagatgccacagggtggtttggacacaagtccccagctccttgctgctttggtttcttcagaccatgtctcatgacaacaaatgtgtcaaatcccaaagcagcattgat

SEQ ID NO: 46885 - DNA, 1697 bp, Homo sapiens
ccccgcgtccgttcttttctgccgggtaatggctgcttccaagacccagggggctgtcgcccgaatgcaggaagaccgtgatgggagctgcagcacagtcgggggtgtaggttatggggacagtaaggattgtatcctggagccgctttccctgccagaaagtccaggtggcaccaccactttagaaggttctccatctgtgccttgtattttctgtgaagaacattttcctgtggctgaacaagacaaacttctgaagcacatgattattgagcataagattgtcatagctgatgtcaagttggttgctgatttccaaaggtacattttatattggaggaaaaggttcactgaacagcccatcacagatttttgtagtgtaataagaattaattccactgctccatttgaagaacaagagaattattttttgttatgtgacgttttaccagaagatagaattcttagagaagagcttcagaaacagagactgagagaaattctggaacaacagcagcaagaacgaaatgataccaattttcatggcgtttgtatgttttgcaatgaagaattccttggaaacagatctgttattttgaaccacatggccagagaacatgctttcaacattggattgccagaccaacattgtaaaatgcaatgaatttttgtgtacattacagaaaaagcttgacaatttgcagtgcttgtactgtgagaagaccttcagggacaaaaatacacttaaagatcccatgaggaaaaaacagcatcgtaagattaatcctaagaacagagaatatgacagattttatgtcatcaattatttggaacttggaaaatcgtgggaagaagttcagttggaagatgatcgggagttgctggaccatcaggaagatgactggtctgattgggaagaacaccctgcctctgcagtctgcttattttgtgaaaagcaagcagaaacaattgagaagttgtatgtccacatggaggatgcacacgaatttgatcttctcaaaataaagtcagaacttggattaaatttctatcagcaagtgaaactggtcaattttattcggaggcaagttcaccaatgcagatgttatggctgccatgtgaagttcaaatccaaagcagacttaagaactcacatggaagaaactaaacacacttcgctgctccccgatagaaagacgtgggatcaactggagtattattttccaacctatgaaaatgacactctcctgtgtacactatctgacagtgaaagtgacctgacagctcaggaacaaaatgaaaatgttcccatcatcagtgaagatacatctaaactgtatgctttgaaacaaagcagtattttgaaccagttgctactataagagtacttgaaaacctagaagaaactaccacagaagcaatttttcatgtttttctcctatgagacagatatgaaagaacaatttaaatttgaacatcaacaaaagattggtccttggtgaaataaacttttcaaaaatgaatgttcttttcaaaaaataaagtagaaaaatgcacttactaagaacatgaaaaaaaatgaagtaggaaaataagatgaagactttgtattttggctgtaaagttttattgtgtgatcatcttaaattatctcacttcattaaactcataattatatatagaagtatatgtcaatt

SEQ ID NO: 46886 - DNA, 2704 bp, Homo sapiens
  misc_feature (1)...(2704): n = a,t,c or g
ctaatagtagcaaattcatctttatgctaagtaccagggctggaggtctcggaattaacctggcaagtgctgatgtggttatactatatgattcagactggaacccacaggttgatctacaagctatggntcgagcacatcgtattggtcagaagaaaccagtacgtgtattccgtctcatcactgacaacactgttgaagagaggattgtagaacgtgctgagatgaaactcagactggattcaatagtcattcaacaagggaggcttgtggatcagaatctgaacaaaattgggaaagatgaaatgcttcaaatgattagacatggagcaacacatgtgtttgcttcaaaggaaagtgagatcactgatgaagatatcgatggtattttggaaagaggtgcaaagaagactgcagagatgaatgaaaagctctccaagatgggcgaaagttcacttagaaactttacaatggatacagagtcaagtgtttataacttcgaaggagaagactatagagaaaaacaaaagattgcattcacagagtggattgaaccacctaaacgagaaagaaaagccaactatgccgttgatgcatatttcagggaagctcttcgtgttagtgaacctaaagcacccaaggctcctcgacctccaaaacaacccaatgttcaggatttccagttctttcctccacgtttatttgaattactggaaaaagaaattctgttttacagaaaaactattgggtacaaggtacctcgaaatcctgagctgcctaacgcagcacaggcacaaaaagaagaacagcttaaaattgatgaagctgaatcccttaatgatgaagagttagaggaaaaagagaagcttctaacacagggatttaccaattggaataagagagattttaaccagtttatcaaagctaatgagaagtggggtcgtgatgatattgaaaatatagcaagagaagtagaaggcaaaactccagaagaagtcattgaatattcagctgtgttttgggaaaggtgcaacgagctccaggacatagagaagattatggctcagattgaaaggggagaggcgagaattcaaagaagaataagcatcaagaaagcacttgacacaaagattggacggtacaaagcaccttttcatcagctgagaatatcatatggtactaacaaaggaaaaaactatactgaagaagaagatcgttttctgatttgtatgcttcacaaacttggatttgacaaagaaaatgtttatgatgaattgcgacagtgtattcgcaactctcctcagttcagatttgactggtttcttaagtccagaactgcaatggagctccagaggagatgtaataccttaattactttgattgaaagagaaaacatggaactagaagaaaaggagaaggcagagaaaaagaaacgaggaccaaagccttcaacacagaaacgtaaaatggatggcgcacctgatggtcgaggaagaaaaaagaagctgaaactatgaatatgtttttgtttcataatcactaactttaaaccagtagttctttaatttacgggtcttcataagatgtactgtacaatgctcaattgttatgtcatttaaagacatcaggttcatctgtttactgagctagaaacatagtatgtagtttcacttttttaaatgcaacagctgtgctgaaatttttttatcattaacacttgaagtaataaaataggcttcatttattactaagtgtttcatttgatttatttttctattgtagttccatttgtgaagattgtgactttttgtttattagctataatttctacacttgtaaggcttacaaacaagttaaaaagaaaattgcaaataacatttgtccctttcagtcttcacctagttgtgtaattattttaattcactttgcctttgcagaaatttgggtattttctttgtagtgctattgagtctcatctggaaagattatataaattgcattctccttgcttatgtgggtagaatgggaaaagaaggcaagacaaagtatacttaaattctatgcatatttctgttatgctttctgttttttttagttgattctgaaatgaatatgccctattcttttgaaagaatggccttttagttgtatagccaaagacatttagtattttccggttccttaaggtattactgtacccattttgtaaaaggaatattattattattatttttaattatttggtaaatattttgtcatatgaccttctgaagcagccacaacttagataatgtcagaactaaggtgatttttttttttttaattttgaaagcccagccaaaatgaggtgtgaatttgtcatactgttacattgaaattggtaacaaaatatatcccctcccatttggacttttagggtaaatgaaaattttattgtattttaaagtagtttctaagtgttagcaagactgactataattccagtttctgttttctatggacagacctgataaactggagaccctaaagcaggaatacccaaattatagtgtcaggattttagctgtaccagaggcctttatgtgctacacataatttgtataaaattttatatgtgcagattgggtacataaacagttctccatttttctaagggaatgcaataaatgtagcatcgtgaataaatataacttttataatccgt

SEQ ID NO: 46887 - DNA, 484 bp, Homo sapiens
ctcaccatcgtcagtgcgcaaccgttcgctaactgaaatgatggcgactggaacgccagagtctcaagcgcggttcggtcagtccgtgaaggggcttctcacggagaaggtgaccacctgtggtactgacgtaatcgcgctcaccaagcaggtgctgaaaggctcccggagctccgagctgctaggtcaggcagctcgaaacatggtactccaggaagatgccatcttgcactcagaagatagtttaaggaagatggcaataataacaacacatcttcaataccagcaagaagctattcagaagaatgttgaacagtcatcggatctacaggaccagttgaatcatctgttgaaatagaatgacatgtaagagtgctgtaggactcctttgcctaatgctgaggagtaaataccttacacagctgtcctttgggtctggttttctattttcttctccaaaagttaagttagaaaagttctgtgt

SEQ ID NO: 46888 - DNA, 1351 bp, Homo sapiens
atcccttgaggtgatggatatatttaatatcttgactgtgccagtgatatcatgggtgtatgcatatttccaaaatcatgaaatcgtatatgttaaacactttgtatgacagatgcatccgacagcattaactcaagcataccctgagaatgactgtatggtctaagaagaatatgtgttcagagtctaagctaaggaatccgggaatggccaacccagagagattcacttcttatctgtgaaggacacttgaactccctgcctgtccgttggaactcaggatgtgcaaggaaccaaggccttttattttgggttaaatggaggttgctaagtggagagtgctaagtagaaatgttatattaaactacatactctttacaaatagtagcggtccctgtcccagccccactgccactggaccacatctgtatttaagtcctaaataaaccctatgtcccattcactgggctctgggtctcttcttggacaaggcgccatccctgttggaatcaatagggctccagccatgacacatgtgcaggattttttaaattatatcaattatatctcaataaagctgttgaaatttttaaagggcctgacctgtcctggaatggggaaaaacttaatgtgacaaaaatgtaggttatagtgaagggaacaggaaatggtactgggaccatttttactccagctaaaaaatttgaatttaagaaatttggatatagataggaaggagcctaatgttaagccggaaagtaagttgataagagttttctgttaaatgtgattgccaagccggtaggtgagtatgggctccagtggggacagaacttgtggcagagaaaccaggtcaaaagttaaagttggatttggtgagtaattaaagagagtagtagcatttccaagacagaaattaatgagctttgcttacatgaaaagattaagaggataagcttaagaacaataagtaccataaaaatgggtggcaatgatgatacattaggggtggaggacctagggtcataaggttgcccgtggcgacttggagtgaagtgttgagatgatatgcccatttcatggggagaagtagaaagaacagaaaaaccacttttactttagttctggtgtaactatgaagaaaaaaaagcctaattgaggacaagaatagacctcgtttctatgggcaacaggcatattctgctccctatttcattatttcgcttaaaaaacacttggtgaagacttgatgcagattgtcctcttggaatctctgatcctggatgtttattttaagtgggcagagtggtgggcttttccatggtatatagtcagaatccttttttttttt

SEQ ID NO: 46889 - DNA, 717 bp, Homo sapiens
gtaaaagaggtctagatgtggatggcatttatcgggtgagcgggaacttggcagtggtccagaagcttcgctttctggtggacagagagcgtgcggtcacctccgatgggaggtatgtgttcccagaacagccaggacaagaaggtcggttagatttggacagtactgagtgggatgacattcatgtggtcaccggagccctgaagctttttctccgggagctgccccagcctctggtgccaccactgctgctgccccatttccgtgctgcccttgggtgatagcacactcagataagaatcgcatgacaccccacaacctgggaattgtgtttggaccaaccctgtttcggccagagcaggagacatctgacccagcagcccatgctctctacccagggcagctggtccagctgatgctcaccaacttcaccagcctcttcccctgatgcagggaaggaagaagagaaaacatatttccggtcatctctggtggtgagaggctggtgttctgttttgaggatatccctttaaatctcccaaatgactgtctctatcttcatgagtgtgacttgaggtgttgggatgggtgagggagcttctctaaagaggaaagtgagtggattaacccctgcttctcttcttgttccctgttatcattcctccccaacataataatacataaagtggcatggtattttttcaaaaaaaaaaaaaa

SEQ ID NO: 46890 - DNA, 2149 bp, Homo sapiens
gggggcgtgcagcaaagtgcgttcctcgtctgccagccggcttggctagcgcgcggcggccgtggctaaggctgctacgaagcgagcttgggaggagcagcggcctgcggggcaaaggagcatcccgtctaccaggtcccaagcggcgtggcccgcgggtcatggccaaaggagaaggcgccgagagcggctccgcggcggggctgctacccaccagcatcctccaaagcactgaacgcccggcccagaaagaaccgaaaaagaaaaaacaacagttgtctgtttgcaacaagctttgctatgcacttgggggagccccctaccaggtgacgggctgtgccctgggtttcttccttcagatctacctattggatgtggctcaggtgggccctttctctgcctccatcatcctgtttgtgggccgagcctgggatgccatcacagaccccctggtgggcctctgcatcagcaaatccccctggacctgcctgggtcgccttatgccctgggatcatcttctccacgcccctggccgtcattgcctacttcctcatctggttcgtgcccgacttcccacacggccagacctattggtacctgcttttctattgcctctttgaaacaatggtcacgtgtttccatgttccctactcggctctcaccatgttcatcagcaccgagcagactgagcgggattctgccaccgcctatcggatgactgtggaagtgctgggcacagtgctgggcacggcgatccagggacaaatcgtgggccaagcagacacgccttgtttccaggacctcaatagctctacagtagcttcacaaagtgccaaccatacacatggcaccacctcacacagggaaacgcaaaaggcatacctgctggcagcgggggtcattgtctgtatctatataatctgtgctgtcatcctgatcctgggcgtgcgggagcagagagaaccctatgaagcccagcagtctgagccaatcgcctacttccggggcctacggctggtcatgagccacggcccatacatcaaacttattactggcttcctcttcacctccttggctttcatgctggtggaggggaactttgtcttgttttgcacctacaccttgggcttccgcaatgaattccagaatctactcctgggccatcatgctctcggccactttaaccattcccatctgggcagtggttcttgacccggtttgggcaagaagacagctgtatatgttgggatctcatcaggcagtgccatttctcatcttgggtggccctcatggagagtaacctcatcattacatatggcggtagctgtggcagctggcatcagtgtggcagctgccttcttactaccctggtccatgctgcctgatgtcattgacgacttccatctgaagcagccccacttccatggaaccgagcccatcttcttctccttctatgtcttcttcaccaagtttgcctctggagtgtcactgggcatttctaccctcagtctggactttgcagggtaccagacccgtggctggctcgcagccggaacgtgtcaagtttacactgaacatgctcgtgaccatggctcccatagttctcatcctgctgggcctgctgctcttcaaaatgtaccccattgatgaggagaggcggcggcagaataagaagggccctggcaggcactgagggacgaggcccaacagctctggctgctcagaaacagactccacagagctggctagcatcctctagggcccgccacgttgcccgaagccaccatgcagaaggccacagaagggatcaggacctgtctgccggcttgctgagcagctggactgcaggtgctaggaagggaactgaagactcaaggaggtggcccaggacacttgctgtgctcactgtggggccggctgctctgtggcctcctgcctcccctcatgcctgcctgtgtgcccaagccctggggctgccactgtgaatatgccaaggactgattcggcctagcccggaacactaatgtagaaaccttttttttacagagcctaattaataacttaatgactgtgtacatagcaatgtgtgtgtatgtatatgtctgtgagctattaatgttattaattttcataaaagctggaaagcaaa

SEQ ID NO: 46891 - DNA, 1271 bp, Homo sapiens
cgtcgacaaacttttttttttttattctttttttttttcacaagcagccgtgcaagagtagttaaaatgtgtttattcatttacaaacccagtaacatgagaagaaactcagtggaaaccttgcttggtggagacagtgcacagtgttagtgccacattcacaggggcagaaatgctcggtcaccctgtgcacccaaagtcacccaggatctctagaaaagatcccacttactgaagtgcctcggatgtcttcagggccagattgtaactacacaggaacagggaagggctaagctgaactgcacactgacaaacacaaacgatgagtcacaggactctacagtagttacaatggcatttttatatgtcccaagtgttgactggagagtaaagtgttaactgagctgctagaacacccttcactgaaagagctttctaccccacgcccattgttccgaagaaggagaggctatgtggggcggatgggaacccacacaccgagatgaacttttctctttcttccaatctgcacccaccatctgacattctggagtgtaaggcactagaacctggcttagagaatagtggggctctaagctccagttcttggtgtgcaaaggaaattctgacatacatcttttgaaagagatgctaaaaaaccctccctatctcctgtaatttctgtctttgacagacaggaaaataagaaggcagaagatggtctgcaaaggataaaaacaggtgcatctaagaatgagaaaaatggctcatgaagaaatgtgtaactctccaagagatgcagacactctgctcagagaagtcaagaaccataaacaactcttcatgtttcatggacaaagggaaggcaaaggcatacaaaaatactcagttgtcttgaaaagtgtactggtagtgatcagggctacaaaggcgagccctgtactgacaatggaggagccttacaactcagcaccttaaattgttggcctgaagtggtggcggggagggaggcgctgacggagagacccatggctcaccacttattgcgtgtacacaaggcctggggcaagcctcacaagtctaccatttcttccactcaactgtgcttctcctgaatccatgtgcctgaaatgacatatgcaaggtgaacattctttatactgtgttaatactgcttatatcaatgttcgtgaggggtgtgtgggggatggggtgcagcaggaaaattagaatggcaggaggttcttatttattattaagcacttgttgac

SEQ ID NO: 46892 - DNA, 2278 bp, Homo sapiens
ttttaagagaaatggtcttttattcatttattgagcaaaacacaagtaggatgatacaatgaggcactgacgcagtacagaaagcaatcggtgcttttaatcgaaacttctttcaaatctgtgaacatgctagctgtgaagtacatgcttttattctttccataggacatatttccaaataatgatcacagtattatggttaataagatgctgggacagatgcgtagccaaagaatattacataacaacaaaatctcatcaatgatatatcaaatgcaaatttactaaggacatcaagagaatatctgtttgtagttacatggctaaaaacaagacattattacagtaatcaagtccataaaactagaaaaaaagcactgtataacaaaaaggcctttttagaagctattaaatgaacaaacattatagataaaccaattttatatctgaagcagcttatagcaccaacacgttggcaggaccagcagaggggtggggtctttggaccaaggcatctgggaacaggaagggctctcagccatcatctactgcagccacttgttttacaaatggagaaatagaggcccagagagatgaagcgccttgtccaaggtcacacagcacaggacagactgggaaatgatccagggctatgatccaggccactgacttccaggtaagtgctctattttaacatacagatataagattcctatttgatttgatgtattttttccccattaacaggtctaccataaaagaaagcaataaaacccataatgtactctggtattgtatttatttcactgagaaatgactggcatgtactacgatcattttgggggccctataatagatcttacatccaaaattccagaggaattaagtccagataacactattttagttataaattgagaaggtggcatttgaagagaatatttggcacatcctcccactacgtaagctaccctatgcctcaaaattactaaatcattggtataaagttttggtttttttcctgatagtttaaagattagtaaagtacaaaaacagtctaaatagagaaaaagcaagtcaggtctttcctttaaaagttaagtatggcacttttcattttaataaggtaaatgattttaaaaacctgacattttttagaagaaaaaaaaaactagctatgagccatcacttgtgaaccatctggtatataaaatatttcccttatttaaaaaatgtttctgtaaaatacttcggagtcatgaaatcatgccgtggtcctgaggcctcaactggacagatttatgatgaactaatgaagatataagaatgaaaaaaagaaagagatcactgttaacagaagcagcattaaggacaaagtatactgaatatattgaaacagcttcatggaaatgaagccaagaagttgcatgtatatacgtgagaaagattatcattacagtggtagttggaaaaagtaacaaacactgggtatttgtctatcattaacataaaccaactgttgcagacagttaaactgtggctttgtaaggagaataaagcctgataaaaaaagtgacttctgcatatcatatatatgtatacatatattttctcacatagacgtctagttataagtaaatcaacatttagctacaacttttcctctcttgggtccagcatcaaaagatttgatattcatgaacatgccctacacctggttaggaagttatgtatttatactcatagcctttattgtatctgaccagggtgaataaaatgaaatctcctgggacctcaagtccatttcttaccactataagcatattaacagatatatatcaaaacatacttgtttactgttaggtaaaagagcatgtttcagtactaaataataaactatgcctgctaccaataacatgcacataatggtataataaaagtaatttttcatgaaaatattttgaaagaagctacattataaatatttaaagaaacgttaaaaatcagagtgaaaatcagattagtgttctgaaactgagtagaaaaatagacttataaaaaaagaatgtctcattaagtgaagcattaaatgtaaagttgtctttttagtgtaaatttcaaatctcaccctttgagaggtaaaatcttcctctctcctaaacaggtacctataattgatttgggaactgggcatatcgcagaacgaaaaagcagatgacacaaggctaaggcagtgccgtgattttcacatggccttagaaaagcgaggggcattcat

SEQ ID NO: 46893 - DNA, 744 bp, Homo sapiens
acaaaacaaaacaccctgcaagactgggatagagggcaatggatattcccacaatgcacttttcctaaccctatgagaaacaaaccaaagacatttttggagaaagctgctttctggagcagtttcagttttatttttgtatttaaggctgaaggacagtttcaataaacatgtcttcttcccagagggatttcaaagaaagatcgtttttgcatgtcatataggggagaatgaggacatgagacaccaagaagatgaagttttcaggagcagaggagaaactttacaccaacatgtctgaacttcattgactcactacctggagccattttttagctgttgagttaagaaacagaaaaaggagcctggggcttctgactctttcaccaggcttaggggagtgagaggagggtttagacacgggtagggcctcttggccccttggtgcagccccgctgagccatctcctcctttggctgggtgactcctttctgctgccttgacaactcctggaggagaaacagatggggcctctgggctcctcccagccctgtagggtggggctcctgccctccttcttgaagtttacctgttgctgccacaagttctgctcccttcgtctttcctttgaatcctgggtggtgcaggaactagccttgttcagtggacttggggagaacttctcatgaatcagattctgcaaacagatgttcaccttttgaatctgggctaacggggggcgac

SEQ ID NO: 46894 - DNA, 2140 bp, Homo sapiens
accaggtacagttaaatgacacaggacacacatccaatgtaaaatcaagttttatatgattcaaagagaaaagttacattacacatgctcgtttaaataatgtcaaagtctgttacataaaacataattatgaaacattttaagtcttatcattcaaactacttaaaaggctcaaagtcacaaaagatcaagcaaaactgcccaggcaataaagtgcacgaggggagcccacctctccagcggccgtcagcacccagagccgccagctgagggctccatgccgaatccatacacaaggtttgtggttctcagaagagttttcagacaggaactgtttccaacttaaaatctttcaacagacaaatggaggtggaagggggatggtttacacaaagtatttccaaatgtaatcaggaaatggaagtgtaaattaaaaccgttttcaacatgtatctcctctttagaaatatcactgcttggagaatgttgtgacaagcaaccaaatactcaaaagaccttatccaccagaatactggcaggactcacattactttgcatgtcataattaagaaaaatatccaaatttgatgccatttatagtgtgtacagtcaaaaatgtgtatgctgattttgatgagcaggagaaaggactgggtggtgaggaaacatgaactatgcacaacatgagacaactgtgctgtctcacgaagacacgacactcacctatggagtgtccagactgaaaacctctgaataacacacacatttgtgtcaagtaacagctgatactaaggggcaagttaacgggtatcaagtcacacacaatgaatgaccaggtggagattttatcagactacaaagaacaaaacacaaaacctaattttattcaatattccaccttaccatcatttaaataaaggtaaatgctggtaattaacatagacaaaatttaaatacatactgcacaataaaaaaaattcccaggctaccaaattagtgcaacattctgtatgttcctacatttattccattgcctgaacttccaatgtttaacaaaaaccagtatcagtggcttcttgaacacaggtggcccacattctctcggttatctacgtgctcatacagttgaaaaatattgtcccatctatttcctaggtagactgtaaaacacaccattccaagtaattttctgtttggtcaaaacaatttccttcaaacaaaatgaacagaaaggcagttgggtagtattactgccatttagcgtaacttgcatttccttgtgtttctagtatttggcaaacaaaggaagcggaatcttggcactgcctgccttcacatgcatctcgcccccagctaagctgtgctctggtggagtttcatccaaccaatacagacatttcctttttttctgagaagttactctacccacaatatagtacggataaggccacagcaaaaggagtcagaactgacaattgacaaagcagctggatttgagtgtttcttttttggtgttttaggtacaaacaagaaactgaatggcttgctttcagcagagccatggccaagactattacagactagatcctgcagcaagtactggtccctgggatctgcccagtggctcatgttactctctggggtacatccttcatgacacaccatggacacagctcactagttccagtcaaccaaaattttagttctttggtgacaggaatgattgcctagaatttccttgaaaacgttatgaagaagctgacggcaaaatttatttttcccttttaagaggtccttactcaaccaggtccgattccaaaaagatctaaaaggccagataacttgtggtttttgtagtggaataacatgtccagtttactaaaagaagggccattaggaaaaactttgttattaaacactgaaaagaaggctgcaaaatgatctagctagaaattggtgatttgagcaccaacaatataaatatttttctaaaaaccagtataaaaattagtaccctgtcttatttctacaaaacatcaatagaaaaggttgtaaaaatccagattttgtaaactttattgccgaaatatttgtttgaatgctggtgattcagattatcaaattttctaccatttcttta

SEQ ID NO: 46895 - DNA, 535 bp, Homo sapiens
gttcccgtagctcctcctcccatcccccttacccggcacattggtcagtctctgctgattctctggtcttgccagtttgagctggcactgagcctgtaaagatgttctgctttttaaaaaacaaatggtgttgaggctgcagccctgtgcgccctccagtctctgattttgagcagttccattggaatcaaacccgactggatcgcagcatatgctatgcctcgagagagccttttcaaacaaagctcgaggtgaaagactggaatgtatcttattaagaaaacttaatcctcttctttattttaatataaacttctacatatacagggagagaatggatgagtcacggggggcatggactggaaaggtctcacctaagtaagctctgctaaatgaaaactaaatcagtctcccctttgcactctgtttggataacctaaaggcttattaaacaacaccaaataattttagtaatggcattttttttttcatttctctcaaaaatatttttggcaagctggcccgttgctcaagt

SEQ ID NO: 46896 - DNA, 1464 bp, Homo sapiens
  misc_feature (1)...(1464): n = a,t,c or g
agcagatcacttttttgataatgaaagttaagcatactgaatgctacttttgattgacaaactggctataatagtctaggggaaaaatccctaaacagataaagattcctaaagtaatggtggcagctgatgtttcagtgaacttttatcttgatgcgtttaaatggaagtaatgccagacctgagatttttaaggcatttttacagcttgtattgaaatgattggagacatggtttctttattagctattttgagacctgtggagttaagcaagacttttaaaaattggcaccatatacatctagttagttcctttactcttatttttttaaataaaagtagtacacatcatttccagggttgtaaatatatttggggcttgtttttggtatggatttaaaaggaggatattaagtattcattctaattttgttatttttctagttgccagagatggttgcactgaaatagaacagggagttgcatacaaagcctaaatgtgtattggatttcgaaaatactaggttggtgcaattggttttgtaccaacctaacatgtctttaggaaagtaccatcatgtggaaggaaacaacaggtgttaaaaggttcaaaggaatgagaaataggaagttactagaacctaactgatgttgaccttagaggtaagattattcaggtatattagtggacctccagtccaatggtatagcaaattccagggatctcaggtgcatgcaattttactttctaaagtaaacacttagaaaatagattataacccagacgttttggattatactgagacaaatatgtaaataagttttagcaagtctgaacatgtaccagcgagatcttcaggttaactaagaaaagcccagaaacttcattatttactgtgctttgtatggcataactggtaacaaggcagtaaaatgttacatatttgaactggaccatagtaattaaatgatttatcaatatcatttgcaagataattgtcaggttgagttaatagtaagtggcagcttcccagaaatttgggttatttggcctaggctgtgccctgggattacctcttcatcttccttgacttttaagttcaaatttggaggttatgtgaagtgattgaaataaatctttcaggctgaggaagtcggtaatttcaagaatatagtgaaaacaaggttgtaatctaaacatgagaagcttaagtttaggaaatggttagaatataaattgctaaagccatcatgattttggccacagatgaaaatatgaacactggaaatgagcgccatttaaatgagatgctgtatgtaagccaggggtcagcaaagttcagcctgtgaccnnnnnnnnnnnnnnnnnnnnnnnnnnnnnnnnnnnnnnnnnnnnccgtgtccctgagttaagaatggtttttaggcttgtataggattaaaaaaaaaaaaaaagtcgaagc

SEQ ID NO: 46897 - DNA, 648 bp, Homo sapiens
  misc_feature (1)...(648): n = a,t,c or g
gccccattttgtttattcacacatcatttggacatttggattatttctggtttttggctattatgaacaatggtgctatgaacagttgcgtacaagtttttgtgtgaacatatgttttcaattctctcattatatacctaggagtagaattactgggtcatatggtaactgtatatttttgaggaactgccaaactattttcccacgtccatgcaccatttcacattcccaccagtaagtaagagggttccaatttctgcggcattcttgccaacactagttattatctgactttctggttataatcattctaatgagtgtgaagtagcctctggtgtcatttggatttgcatttctctgatgagtgatgctatcaagcacctttgctggtgctgttggccatatgtgtatgttccctggagaagtgtctgtgctgagccttggcccactttttaattaggcnnnnnnnnnnnnnnnnnnnnnnnnnnnnnnnnnnnnnnnnnnnnnnnnntctagacccttatcagatacatggtttgcaaatattttctcccattctgtgggttgtgttttcactttatcgataatgtccttagacatataataaatttgtattttaaaagtgacttgatttggctgtgcaaggtg

SEQ ID NO: 46898 - DNA, 1709 bp, Homo sapiens
gactctcaagaagaggaagaagtcatgcctacccaaacgaggaagaccacaagttagattgccagttaaaacaagagggaaacttagctcttctttctcaagtcgtggccaacaacaagaacctggaagatacccttcaaggagtcagcagagcacacccaaaacaactgtttcttctaaaactggtagaagcctaagaaagataaactctgctcctcctacagaaacaaaatctttaagaattgccagtcgttctactcgccacagtcatggcccactgcaagcagatgtatttgtggaattgcttagtcctcgtagaaaacgcagaggcaggaaaagtgctaataatacaccaggaaaatagtcccaacttccctaacttcagagtcattgccacaaagtcaagtgaacagtcaagatctgtaaatattgcttcaaaactttctctccaagagagtgaatccaaaagaagatgcagaaaaagacaatctccagagccatcgcctgtgacactgggtcgaaggagttctggccgacagggaggagttcatgaattgtctgcttttgaacaacttgttgtagaattggtacgacatgatgacagctggccttttttgaaacttgtttctaaaatccaggtcccagactactatgacatcatcaaaaagcccattgccttaaatataattcgtgaaaaagtgaataagtgtgaatataaaattaggcatctgagtttattgatgacattgagttaatgttttcgaactgctttgaatacaaccctcgtaacacaagtgaaggcaaaagctggaactaggcttcaagcattttttcatattcaggctcaaaagcttggactccacgtcacacccagtaatgtggaccaagttagcacaccaccggctgcgaaaaagtcacgaatctgactttgtccttctaaaggatatatttgaagaaaaacaaattgttcatgaaaatggaaccattaaatcatgctgtataaagcaataacaaacaattgattgaccacatgaaagtgtggcctgcactatattctcaattttaatattaagcactcaggagaatgtaggaaagatatcctttgctacagttttgttcagtatctaataagtttgatagatgtattggatacagtactggtttacagaggtttttgtacatttttgagatcattcatgtgtccagagatcttggaaaatattttttcacccacgatttattttgttattgatgatttttttttaaagtggtggtattaagggagagttatctacatggatgagtcttccgctatagcacagtttagaaaaggtgtttatgtcttaattaattgtttgagtacattctttcaacactacacatgaatgaatccaatcttataaccttgaagtgctgtaccagtgctggctgcaggtattaagtccaagtttattaactagatatttatttagtattgagagtaatttgtgaatttgttttgtatttataaaatttatacctgaaaaatgttccttaatgttttaaaccttttactgtgtttttattcctctaacttccttaatgatcaatcaaaaaaagtaacaccctccctttttcctgacagttctttcagctttacagaactgtattataagtttctatgtataactttttaactgtacaaataaaataacattttttcaaataaa

SEQ ID NO: 46899 - DNA, 1770 bp, Homo sapiens
gctctctcgcctccagagggttaagttctgcctcctgggggcattgctggcccccatccgagtgcttctggcctttatcgtcctctttctcctctggccctttgcctggcttcaagtggccggtcttagtgaggagcagcttcaggagccaattacaggatggaggaagactgtgtgccacaacggggtgctaggcctgagccgcctgctgtttttcctgctgggcttcctccggattcgcgttcgtggccagcgagcctctcgccttcaagcccctgtccttgttgctgccccacactccactttctttgaccccattgttctgctgccctgtgacctgcccaaagttgtgtcccgagctgagaacctttccgttcctgtcattgggagcccttcttcgattcaaccaagccatgcctgggtatcccggcatgacccggcttctcgacgcagagtggtggaggaggtccgaaggcggggccacctcaggagggcaagtggccgcaggtggttattctttcctgagggcacctgttccaacaagaaggctttgcttaagttcaaaccaggagccttcatcgcaggggtgcctgtgcagcctgtcctcatccgctaccccaacagtctggacaccaccagctgggcatggaggggtcctggagtactcaaagtcctctggctcacagcctctcagccctgcagcattgtggatgtggagttccttcctgtgtatcaccccagccctgaggagagcagggaccccaccctctatgccaacaatgttcagagggtcatggcacaggctctgggcattccagccaccgaatgtgagtttgtagggagcttacctgtgattgtggtgggccggctgaaggtggcgttggaaccacagctctgggaactgggaaaagtgcttcggaaggctgggctgtccgctggctatgtggacgctggggcagagccaggccggagtcgaatgatcagccaggaagagtttgccaggcagctacagctctctgatcctcagacggtggctggtgcctttggctacttccagcaggataccaagggtttggtggacttcccagatgtggcccttgcactagcagctctggatgggggcaggagcctggaagagctaactcgtctggcctttgagctctttgctgaagagcaagcagagggtcccaaccgcctgctgtacaaagacggcttcagcaccatcctgcacctgctgctgggttcaccccaccctgctgccacagctttgcatgctgagctgtgccaggcaggatccagccaaggcctctccctctgtcagttccagaacttctccctccatgacccactctatgggaaactcttcagcacctacctgcgccccccacacacctctcgaggcacctcccagacaccaaatgcctcatccccaggcaaccccactgctctggccaatgggactgtgcaagcacccaagcagaagggagactgagtgcctcagcctctcaccccctcctcctcagggcagcgctaggggcctcccctatgcctcagccccatctctgctcctgtttgaattttgttattgttgtttggttgttgtttttttaagttgattttaattttttgtttggttgatttttttgtaaaaaactattttatatataaatataaatctatatctatatctattaaaaaaaatgaagtccagtcatattgatgttaccattaattggggagggaaggggtgaatggttgtaggacggccgt

SEQ ID NO: 46900 - DNA, 3193 bp, Homo sapiens
accagctggcccccctggtggcccaggagacaaaggggacccaggagaagatgggcaacctggtccagatggcccccctggtccagctggaacgaccgggcagagaggaattgttggcatgcctgggcaacgtggagagagaggcatgcccggcctaccaggcgcagcgggaacaccaggaaaagtaggaccaactggtgcaacaggagataaaggtccacctggacctgtggggcccccaggctccaatggtcctgtaggggaacctggaccagaaggtccagctggcaatgatggtaccccaggacgggatggtgctgttggagaacgtggtgatcgtggagaccctgggcctgcaggtctgccaggctctcagggtgcccctggaactcctggccctgtgggtgctccaggagatgcaggacaaagaggagatccgggttctcggggtcctataggacaccctggtcgagctgggaaacgtggattacctggaccccaaggacctcgtggtgacaaaggtgatcatggagaccgaggcgacagaggtcagaagggccacagaggctttactggtcttcagggtcttcctggccctcctggtccaaatggtgaacaaggaagtgctggaatccctggaccatttggcccaagaggtcctccaggcccagttggtccttcaggtaaagaaggaaaccctgggccacttgggccaattggacctccaggtgtacgaggcagtgtaggagaagcaggacctgagggccctcctggtgagcctggcccacctggccctccgggtccccctggccaccttacagctgctcttggggatatcatggggcactatgatgaaagcatgccagatccacttcctgagtttactgaagatcaggcggctcctgatgacaaaaacaaaacggacccaggggttcatgctaccctgaagtcactcagtagtcagattgaaaccatgcgcagccccgatggctcgaaaaagcacccagcccgcacgtgtgatgacctaaagctttgccattccgcaaagcagagtggtgaatactggattgatcctaaccaaggatctgttgaagatgccatcaaagtttactgcaacatggaaacaggagaaacatgtatttcagcaaacccatccagtgtaccacgtaaaacctggtgggccagtaaatctcctgacaataaacctgtttggtatggtcttgatatgaacagagggtctcagttcgcttatggagaccaccaatcacctaatacagccattactccagatgacttttttgcgccttttatcaaaagaagcctcccaggaacatcacttacatctgtaaaaacagtgtaggatacatggacgatcaagctaagaacctcaaaaaagctgtggttctcaaaggggcaaatgacttagatatcaaagcagagggaaatattagattccggtatatcgttcttcaagacacttgctctaagcggaatggaaatgtgggcaagactgtctttgaatatagaacacagaatgtggcacgcttgccccatcatagatcttgctcctgtggatgttggcggcacagaccagggaattcggcgttgaaattgggccagtttgttttgtgtaaagtaagccaagacacatcgacaatgagcaccaccatcaatgaccaccgccattcacaagaactttgactgtttgaagttgatcctgagactccttgaagtaatggctgatcctgcatcagcattgtatatatggtcttaagtgcctggcctccttatccttcagaatatttattttacttacaatcctcaagttttaattgattttaaatatttttcaatacaacagtttaggtttaagatgaccaatgacaatgaccacctttgcagaaagtaaactgattgaataaataaatctccgttttcttcaatttatttcagtgtaatgaaaaagttgcttagtatttatgaggaaattcttcttcctggcaggtagcttaaagagtggggtatatagagccacaacacatgtttattttgcttggctgcagttgaaaaatagaaattagtgcccttttgtgacctctcattccaagattgtcaattaaaaatgagtttaaaatgtttaacttgtgatcgagacctacatgcatgtcttgatattgtgtaactataatagagactctttaaggagaatcttaaaaaaaaaaaaacgtttctcactgtcttaaatagaatttttaaatagtatatattcagtgggcattttggagaacaaagtgaatttacttcgacttcttaaatttttgtaaaagactataagtttagacatctttctcattcaaatttaaagatatctttctcctcttgatcaatctatcaatattgatagaagtcacactagtatataccatttaatacatttacactttcttatttaagaagatattgaatgcaaaataattgacatatagaactttacaaacatatgtccaaggactctaaattgagactcttccacatgtacaatctcatcatcctgaagcctataatgaagaaaaagatctagaaactgagttgtggagctgactctaatcaaatgtgatgattggaattagaccatttggcctttgaactttcataggaaaaatgacccaacatttcttagcatgagctacctcatctctagaagctgggatggacttactattcttgtttatattttagatactgaaaggtgctatgcttctgttattattccaagactggagatagggcagggctaaaaaggtattattatttttcctttaatgatggtgctaaaattcttcctataaaattccttaaaaataaagatggtttaatcactaccattgtgaaaacataactgttagacttcccgtttctgaaagaaagagcatcgttccaatgcttgttcactgttcctctgtcatactgtatctggaatgctttgtaatacttgcatgcttcttagaccagaacatgtaggtccccttgtgtctcaatacttttttttcttaattgcatttgttggctctattttaatttttttcttttaaaataaacagctggggaccatcccaaaagacaagccatgcatacaactttggtcatgtatctctgcaaagcatcaaattaaatgcacgcttttgtcatgtca

SEQ ID NO: 46901 - DNA, 985 bp, Homo sapiens
ccagcctggtctggacatcctgggtcacgcgattctcccacctctgcctcccaaattgctgggggattacaggcgtgagtcaccatgcccagcctaggatgagtttagtaagatttggttatgctggggagatgggaaaagccaggttaggggcacgcaggctggaggaacggggtctgtgggggtggatggatagccatggaggcagaaaggagcctctgcaggaagagtctggaagagcgaggaggaagcggtgaggcaggggagcactgtggaatggccctgaggccaggaggggctcaggatgaccaggcagaaacagagcgggtccagggtggaggggaggcccgtgcagcatgagcaggaggctagaggagacagaccatgaggcccagggagacccctcactggagactctcccgtagccttcttttcagaagtcgaaagttggtttttaatcccttccaaggcttgaatggctcattatcattgtacacaaagttttccccagcaatatttaaaatcttcatagtccatgatctccacagcgaccccttcctgactcaggctgcggagcccctccctggtaacatggatactggaagtagtagaggcgggcggtgaagatggtgagattcacgttgctgtgcctggccaggaactcggccacctcccctgcacagtctgggcaagggctccaagatgtgtaccaggtgacctggtactttgtgttaggagacagtatgtcgtcgcagaaccaagagaggaagcacatttctgcgtggtactgaggctcgaaatacacctggcctcgaaagacccctgtgtcccaaaggagatttgagcggcccctctttattttcacttcatagcacagccaagtgtagctccgaccatagaggatgggttcgttttcaaagttgtcgtagaatgtgtctcgatacatccgctccatcggatttctgatctgtggattcatgttcac

SEQ ID NO: 46902 - DNA, 2321 bp, Homo sapiens
ggggtttggagactgcgtcaccattctttattgcgctctaaagaacagctcgagacacacagagacagtggattttcaaagaggtgttttcttgacccagttaaatttttattcagtgaaaaaagttgacattgagacaaaaattatcttaaagttgtgcaacaatacagtaaaaccttcagcagatttcagtgacttggaaacttatcgaggcaattgaaattataaatacttaatttcgctttggagagaaacaagtatacagtgtttcactttaaataagagtagaataggcctttattttgccgcaaatacttttgattttgcctaaagtttctaatagttcataacaagagtctttaaatgagaagtgacatagaatatttgaggataatggtccactccagcattcatgcttattccatttgagctattacacatgaaactcataccattcttgggttattacttggctgtgacgatttaattcataatatggctgctcaaaattagtgggcagaaacatacatacaacccatcctccctcaacccattttcggtgctggtactccatctgaaaacacacttactgtccatgtacccagcagtacatatctcttcctatctattccatatctcagtcttgcatagaaagtagtctatataaacttaatgcactggcttttattacacaaaaattgtacctgaaaggcagcacacactccagttaagaaaaataacacaacaggaatgtcaagatacaattcccaacacaagattcttgcacagagttttagagtcaaattcctaaaatcaatatgggatgatattcagtttagttatgtctctggatgccttctctaagggactcatccaactgtctgcaagaaggaagaaaattttcaggaattccccatgacttcccttcattgaagaagggactgaccaaacctgataggatggtgtttctgcccttaaggaagtgtacttggaaatataatcttactagatgcagtgaccacttggtaagcatctgaaggcagcattcgcccaaataaggagtaggcgctcatctctaaggggctcaccatactattgctctctccaagcttcccctgaaaatggccagttctgagaagggttacattccctaaattgctgagtacagcttcatctagtgggccaaacatgatgggcaggagagaacaggcagctgtgtgtcttctgtctgtcccacccaaatatccctggtgatgctaccaaagacagaaccccaggaattacttgtccaaaagtcagagtttcaaccagttacccagaatgataactatttacccagcttgtcaaggtagccagtagttcctggagcttctcacctgtctggaactaggactgcacagacatggcctcttcctggaatcctctgtagaactccactctctaacattttatccatgtggactcgtatctcataaagctcaaggggcattcaatacatcccaggagtaaaatcggtttccagagaaaactcataagcaaaccccctgcccaccaatttttagaggcccatcgtggtccacatggatgcaagcatcctgacattctaatgtatgccaggagagaataaaacctttttcctgcacagtgtgaacttctgaggtggcatctccaacaaggtacaaaagccccttcttcacaagcaagcagggactccgactggtcacagtgaagacagttatctggtcaccttcagaggctgcctgtagtacaaggcatttgttttcattttctattggcactccaacctctggattctttcagacagcatatatacatgaaatccccacaaagctacacagagggaaacaggagtgtgtgcttcaaaagttcataaaaatatacaatttacatatagctgcagcctatctagcttagtcttcaggaacttagctcttctgtttatataaaatactctagccctaaaaggctgctttttttcaaacagcacagtggcattttccaaggagaggggtgatggccagtctacagtactgtgcactaagcattgggaggcactggtagctagaaccggatgctcggaaatatctcaagctgccaactggagacatatgctctgtaaaaaggcttgcctatggaataactgaaaataacatctcagagccttttatatcagcttttacaaatgccaccaaaaagttggcagaaaaaaaaaaggaaatacacttcctagtggttcaattaaatgacttgcctcccaccaggttgttaatgattcaactatttaaagagcttattaaagg

SEQ ID NO: 46903 - DNA, 317 bp, Homo sapiens
gagtagcatttagcctatgttagaaagttggttagggtcatcttctccaaatctatggcttcagccatctttgttaatgcctctgccatccattcagttgctcaggccagaaacgaagagtcattttagaatcctcttcttctgtatctttagttgatcaaccgatcaaccaactcttgccttcctgctacttaactctctttctgatctctcttttcactctatccccaccattatactttagactttgtcacttttctcctaaattaactcataatggcctcccgttcttcttgacactgttttgccttccttaa

SEQ ID NO: 46904 - DNA, 406 bp, Homo sapiens
aataaataaagctgggacaatggcataaatgaatctcacaaacataatattgagcaaaagaagccagactcaagggtatatactctgtgattctattcataggacttaaacaggcacaatcaaaaccatctcagtcagaagtcagagcgtggtacctgggagagaaccccgaggggcatctggagtgttggggccatgttggtgatatggacgtacttcacttgtgaaaattctcaccaaaatgttcacaagttcttttgaaggagaggggatgtggggagggagaagaggttatatgagattgtctttaatgttttgtactttttgcatttttaagctttttgacaacatgtattttataatcagagaaaaatgctgacttttataaagtgccattattatgatt

SEQ ID NO: 46905 - DNA, 915 bp, Homo sapiens
ttttttttttttttttttttggcaggtgaatatggttttattcagcaacagctctcatcaacagcttacactagctctctcacactgtccacctgccttggctgcttgagcccgtggcttccacacacagctgtgcagcctgctctcccttgccttcagggtcagcagcttaactttttctctctctgggcgtgagcaagctgagctgtgtcctggctccttcctgtccatctgcaaaacggacagctttggctctctctctctcttactgggcgccagtgtgcccaccatgtcaagccatgttgagctgagccgaaccccaagagcccctgtacagcattagcaggacaattaccttttacagacaacagtggctcagaccaagtatgaacttacacaaacaggttatataacaagtggaggtgtgtgcctgtgcaccaaacccactgagtcatgcaggcatggatctctgccttggcctattccttgaccaaagcacatccatgtaccttacacctgggtctgaagtagggttgccagatgaaatacaggacacccagctaaatttgaatttcaggtgaacaacaaatcattgtttagattaagcatgttccatgcagttctggggacatacttaaccttatagatttatttcatttatctaaaattcaatgaactggggcagtctgtatttgctaaatctgctggccttagtctagaggcagtggtatgttccagctgactccaatcagctcatgagagtcaactgtaaaatatttaggagatttatgagctggttattaaaccactggtggcttgaaatcaaccatggtgggagtatttacaccacagaaattggtgactaccacacactcagtgcttttcctttacagagctggttatagaacattcccc

SEQ ID NO: 46906 - DNA, 2276 bp, Homo sapiens
ttttttcacacatcaacagttgttcagaaagggaccagcagatagctgccccggctcctctaaggaagagcaggcagcttccccccgaatctacatgtgcgtgtgctcggggagaggaaggctggcggtcaggaaggcccatctcccagcctgatcccaggcagcagggctcgaggagctgggcaggaaggctctgggccggccatagccacctgccagcaagggcaggcttctcttctcatggctggggcagctcggcacagctgacctctgctggccaagtgaagcactgcatgcagccacagagccaggcacagctgtcttccgaagtttcccgactcctgatgttttggggattcaaatagtccttttcatatgctggaggcacaaactggggcagctaaaatttttattctgttgtcaaggggcaagatgccagcttggaagtgccaaggagctaaagggcccagcactgccggccccagaactgtctgttcaggctgtgcagtaagcaccagagcctcgcctgtccacgaagggtgtaagcctgtgctccacaatgtgctcagctccagagaggcccaacaacctcaggagggcttggctgtgggtctgaatttctttcctttgtgcttgaagctgcgcagtgggttctgggactttgctctcttggccttcctacaagaggaagacagcttcttccgcttcttgtgagggcgtaccaggccacggagagcaggaggaaccaggtagtcaggaacatggcccaggtggggcttcaccactgcggggtgcaaaggtaggtcatgccgcagcagctggaggtccctagggttgtcttcaaagtatgtcttaagcttctcagaatgcagaagctcttccttgatctccttcaatcttgcctcccgaatggcctgcttagtcactgagcgcatggcatccctgcagcgatagcggaagccctcgatctcctccatccggaactggtaggggagcagaatggggcccctgttctctccactgagaagctcctcaatcttgcctaagtggaactgctccgtgggaagcacaaaggttaagactatgcctgggttgttagcgcgtgctgtcctgcccagctcgatggatgtaggcctcaggggttgggggaagatcaaagttgagcacagcagacacatggtggaagtctatgccccgggccacacctgcttccggatcagaggccttgtcccctttgggcccgtcggccccgacgcttgcccttgactggggcccccaggacttcagcatcagttgctatgacacagtcgtagaagccttggttgaactgtgagatgatgtggcacctggagcgcagtggaagctctccattgagcacacaggtggggatgctgaactgttccaagaacaggcgtagccggtaactccgttctagagtgttgacaaagagcagagacttgccccgaatcaatgacagcttgagcagggcatacagcaggaggaatttgtcttcctcagtctcacagaccacctgaaactgctgtaactggtctggcccaggcagctgggactcctgtaacttaagggtaaccgggttatgtaatatcagctccttgagtgcttgtacgtcctcgttaaaagtagctgacatgagaaaagcctggtaaatccggggcaagtgactctgccttaccagaggagactcttgagctcttcttcaaagccaaagggaaaaaagaaggtcagcttcgttccaccaccaaaaagctccagggagtcacgaaagtttcaggctgtcttgctgcaaagtggcttaatatgcgagatggggtccctactaccacatctggcttctccatcaagcacagctctctgagagactgagtctttcagcaagctgagacattggccaactcggacatccccgagcaacagtaggtagccagctgctgaatcatggactgtgcttgccgtgccaagctccttggtaggaacaagaacaaggccttctcactgcctgttctaccaccggacctgtcgccttcctatggagcaacagctgcagcatcggaatagcataagcggccgtcttcccggagcccgtgcgggcccgagccaggaggtccttcccttctagggccagtgggatggccttctcctggatcagcgtaggtcgcgaccagcccagatcggtgacagcctgaaggagccggggatcgaggcccatgtgttcgaagcccagtgcttcagagtcctccatggcgctgctcagtagc

SEQ ID NO: 46907 - DNA, 1150 bp, Homo sapiens
cttgcacagccccacagcatgcctgagacaagactccaacaagtaataattagctttttttctcctgccgcctacagtacctgtctaactaaagagcttcccaaagtggagggaaaggccatagaatccaggtgtcattcagagccagtccttgctgaaatgtggtcttccagtggaagcacctgtattattgagaggaaaaagtgttggatgcaaagtaacaccaggactagagagaaagagaaaggtgaaccatcctaaggagctttggatacttttttagaaggataaatattatgcttactgaggagaaaaaaaaaagcgatcacagaaaaatttcacagctaatatttttacaaaagttgtgccagacattacagagtgaaaacgtctctcaaggtggaatgctttagagagcaaaggcttagcattagacctagacccttgtgtgggtatgacatgacatgacatgtccatgtcaaaattcactttagtcagaaccagagtattgataaacaaaatgtcagttacctggagcagtcctggagaggttaagacattctatactgttctacgtcaaccatttctacaaagttgtccagacacctaaaagcagctttcttggttatccagatgccagaatcaaccttgtatctgacaatgcacatctgttgattctaaagtatatttatgtgtgtgtgtatgtgtgtgtatacagcacatatttacatctatgaagacatagacacttacagagacccacatgagctggcactttctgagcctttacagcctttaagactcggaggttgagaattagagacacaagagaggctgtggatggcctattaaaatgattaaagatgtaaattcagtgccattttaaaactgttcatatttatcaaacaattactgtctacagctacattttttgttaacttacttaaagtcatgtcgcaagaaagatcaaacccatgaatgcttagtagctaaggctagtgttcaaaagcactctaaaagacattttgtccacattttggaaaagaaaatatttgcatgtttaattcataatttaggctatctttgagtatactgtaaagtgctgtgtgatataatatcaataaagtacttattaaatggcaaaaaaaaa

SEQ ID NO: 46908 - DNA, 2655 bp, Homo sapiens
gaagctgccgctgtcgctgctgctcgttcgagtcgcagatccttgccagcacattacagaatatttttgttgaaccttcttgagaattcagagaaactgctgagtgaccactgaacgaaaagatctaatcttaaggcttacgcgtgttccatccaccacatcagaacaatgtcgtatgtttttgtaaatgattcttctcagactaacggtgcccttgctgcaagcctgtattgatggggactttaattattccaagcggcttttggaaagtggctttgacccaaatattcgtgacagcaggggcagaacaggccttcaccttgcagcagctcgagggaatgtagacatctgccagttactggcataaattcggtgccgatcttctggccacagattatcaaggaaacacagctcttcacctctgtggccatgtgggatactatccaatttttggtttccaatgggactcaaaattgatatttgcaatcatcaaggtgctacccctttagttctgggcaaagcgcagaggagtaaataaagatgtcatccgattgctggaatctttggaagaacaggaggtgaaaggatttaacagaggaacccactcgaaactggagaccatgcaaacagctgagagtgaaagtgccatggaaagccattcactcctcaatcccaacctgcagcaaggtgaaggagtcctctccagcttccgaaccacgtggcaggagtttgtggaggatctgggcttctggagagtattgctgttgatcttcgtcattgctttgctgtctcttggcattgcttattatgtgagtggggtgctacccttcgtggaaaaccagcctgaactggtgcattaaaggagctcatggaagatgaggcaattaattgcctgtttcctggcttccaatgtttgttctcagtttctcagaatttttcttagcgcaaagcagtgagggcagtacatgttctttttgcatttttaattattgtaatccttttagataatgatgtgttcatttgaactaactacatactatgatcaagtatattgcatcctaacgctacctctgactcaacctgactttgtaggaaagcctacacgtagccttgtttgataaaaacacggaagtgactagagaatggaagataaaggaagaagctaggaagtccttgctatcaaaaccttatcctaatataggaccaattgaagtattcaaaaagaaaaacagtatcttatatgattagtttttgttggtggttttgttttcatttatttttgcaagagccactttttatttactttctctagggataagagataaaacttgaagtacttttttcaaatcttgtgtgcaaattagtattgttagcatctatttggcttattttagtatttttaagtctagtcacaaaccaaacaaaacttttgaaaatgagctatattttgttcaaagataattgatttgatcttatatttatttgtttttaggataatttttgatctttttgtaaactgctttgcttgttaatatctgtgaaaaataaatgagttcattttgttcactttccaattttcccgagtatcctagtcatcaaagataacagttcatcagaattacagtcagaaaatcctttttctactgaatagttagcagggaaaaataattctgatatttaactgtcataattctgtagtgctattatagtgaaaaactcagttctataagctaggctgtgttgtcacagttttatcatagttcataattatttcatgtgcaatcctatttggaggccctgttagacttttaacaatcccatccatatctgtaattctctgatggcaagaatggatggagcatttctgagttaacagtgctgggacagtatcgtactgggtgtcataaactctttatgaatggtaatattatgtaaattgaaatctggccctcaaactatattgcaggctttcagcagtatgtttgaaggcctcttttgttaatgattctgtaatgtatgaattatgttcttgagtggttaaaaaagaatatgaaggcttgataattatttattgggtaaagtcaggaaaattgtagtgaaagaactaatggttttgttttttggaataaaggcacctaagctattgctaattgaatttgctgctagaattagaaattatgctttagaatagaattggtatttctgtgattctttttgcttcttggtattttctcttgtatctatgtatctagtattgaggcttgctctttcatgtggctttatcctctctttaatagctgttgtaaaattcctgagtaactggctgcttcaggatcagcttgcagagtcttgcttttaggttagatacaaacaaagtaaatcatagttggtgtaaatccagcaaaaaacagctggctttggaatggagaacactacaattcaaatttgaagtatattcagaagaaaactttggaattagctttacatttgtttgtaaatctaaacaaatatgcaaaattggtcaaaatgtaagtatatagcatttttaaagattaatggttccttttatgtgctgatttctttgtattctgttctctgcattcatcattcaggaataccaccaataaatgtatttatatatcccttaaaaaaaaa

SEQ ID NO: 46909 - DNA, 905 bp, Homo sapiens
gccttaagttaccattaattgtcgtgaataaaaagttggtctcagtgagttttgcagttgacaacgaaagatgggtgttcgtgtgtgacagcgactcctggtttctcctccactttacctgccgctccacatcaagttttcttctgctggtgccactttctctgctttaccttcaaggttggcatcctccaagtaatggcgattctcattccctatctacgctcttcctatggtctttgctgaattcttggctttaaatatccctgtgccccagcaccgccccccccgccccttatttcactaattcatgttttcagctctgagctcaggatctgtaattcagacacctgcttgatttctccagacgcatgtctaatagtcacgtcaaacttgccctgcttctcaaacctgttcttcttccagtccttcctccttatttgtggccccatcttgcagggcctctcatgcttgaaacctgtgaccatcttctattcttccctctcttttgtccggtaatctgtctagcagcagccattgactctggccaaagcatcttgatctcaccttgctctccatctcttctgccgatgttctctctcgcttgggtgtctccctaagggactggctgctcagatctcaccaccctgcattcatcccattttcagccaagagaccaaagttttttaatttattgaaacactttagcaagtacttcgtataaagtagtatgtgtaacgtatgtatcagtggcaaaagagaaagacagagtggacggtggcgtgcccctgcctgtctcaggtatccacccattctcccaaagccggaacagctgcctctggggcttcagccatttgcccctcccacaggtaaccccctcctgagtgtcagctttcatgcccttattt

SEQ ID NO: 46910 - DNA, 392 bp, Homo sapiens; identical to SEQ ID NO: 18542

SEQ ID NO: 46911 - DNA, 552 bp, Homo sapiens
  misc_feature (1)...(552): n = a,t,c or g
gccgactgtgtggcagctgagaagagttttgcacgtggatcgccgttcgggtgggcgagatggagacagcccccaagccgggcaaggatgtcccgcccaagaaagacaaacttcagaccaagagaaagaaaccgcggcgatactgggaggaagagaccgttccgaccacagccggagcctctccagggcctcctcgtaacaagaagaatcgggagctccgtcctcagagaccaaaaaatgcttacatcttaaagaagtctcggatctctaagaagcctcaggtcccgaagaaaccccgagaatggaagaacccggagtcccagcgcggcttgtccggggcccaagatccattcccaggccccgcccccgtccctgtggaagtggtccagaagttctgtcgcattgacaaatcccgaaagctaccacattctaaagccaaaactcgaagccgacttgaggtggctgaagctgaggaagaggaaacaagtatcaaagctgctcgttctgagctgctgcttgctgaagaacctgggtttctggaangggaggatg

SEQ ID NO: 46912 - DNA, 328 bp, Homo sapiens
ggttgtataacgttccattttgtagatatattgtcattgtatgtatgtgtaagaattcctttagtgatcaatatttgtttttcatcttttcactgcagtgaatattcttgtatggtaggtgttttgctcatagatgaatatatctgtaagataaatcccttcagtagaattgctgagccaatgtgtatatgaattcaaaattttgataggcattgccaaactgactcccaaaaaggttgctcaggtaaaattttacaagctcatgctcagcaacttaaaaattatccacttgtgtttgaacctgtttcttaactagatgccagaggac

SEQ ID NO: 46913 - DNA, 860 bp, Homo sapiens
caacataaggaggagtgccccagggggctgaccttagcgggaggaacgacaggctctccaccgatcccattcttaccctggaccaggtctcacctgcggcttggggaagtcacagaaagacaagtttcgtacaaccccagaccttttcttttggtagtcaacaattggtcacattgcacatttcaaggttacagaggcccaccatacacatgcggggcaggaggagataaatcttgcttggggctaaacaataaagctacagcgagtgttccagaagttgaccacatctggaagcaagaagacagactctggaagaagcaccctagagactccaggaacccccttcactcctgggctttcgggactctacagcgtggggcctctttctcagacatcgaaaggcctccttttctggaccacagtggagcgatgtgcaggtcatcggctaagctgggcgggtcggggagggcagggggagtacagttccttcggatcccagcaaaaggtagactatcaacggccaagggttcagaggcaggaaaaaaaggccgtttctgggggggttgggcttgggggacactccccttcccttctctctccgattaaatataaaagccgatgatgatgaagattgaaaagatgaggaaaatggcagccgtgtctcgggtatcctcccagcggaggcctttcatggaccgatactcctgccgtttgcgaaggcctcccgccggccctcaggcgccgttcccgctccagttgttccccgtagtgggcctggtagaaggcgtcaaagttgaacatcgtgcggttggcgccgggggaggcccgagaaccgtcgtgggtccgcctcgttccgaatc

SEQ ID NO: 46914 - DNA, 1489 bp, Homo sapiens
tgttattttaggcaacctttattacagaagtccactattttaagtgactttttgccaattttagatttgaagggaaggtctcaagttaagcttggaaccacttagaatccaagagggtagcaggaagatccaacccctcaaagcaggtggcatgggtgccacttgggaggggatctggggcctgtcttgagccgtaaatcttcctccacctgagacgtgcaccccactgtaccagagatgcctaagactccaatccctgggttctggctgtgtggaaaatgtctctacacagtcaagcttcagctgactacatgtcaaagagagacaaagttaagagcagcctttcatggtgtcaagaagcagttagcatcttgacttcccctccactcactcgctgacctgctgcagcctccccgggcacctcaggcatagaaaatgagctcagggatctgcccaccctggaccccagtcccgttggtgctgtccgaggagcactggaactggaaggccacctttccacactgcacttccgtcatcccctcctgcccaaagtagctgagttcgctgccgtccaggacggcactggccgtgtagaaggtgtcttgttcaacctggaccgggtgttcaaaccagaccgggaaggtgttactggatccgtctgacatgaacttggtcaagttctgagccagaaccaccccgagccgcttgagctcaatcttcacgctgtactcagccttcccagagctggagccatacaggcccagccctgcaataaatacccttctgtccactgcaaactggatgctgtcgcagcgcccgcggtaccgccactggttgctgcggtaggcagaagactggaatcggtggcacctctgcggggcgaggcccttcctcttggtcaggggaaagtccaggcggggcttgttggtggccgtgtaccacaggaagatgctgtgggtctcctccagagtcaggatgtctgactgggcagcgccgttggcaaactcctctagggtcatggttggaattcggaccagatagagggctcgccccagaacatgcctcttgtttcgtggggtgattggcagcccctgcctcttgcactccgcctcggcccagttcaggacggcctcgaagaccaccgcctctttggtgttgagggcctcccgagtgacaatgatctccagcgtctgccggtctatctcacagaagccttcggaccgtagggccatctcggcctgtgcgtcaatgacctcccagcagcgctgcgtcagctcgggctcctcaaacagccggctctgggacagcaggacgcaggcgttcttggcttccaaacttgtctccagaaagttgacacaggcttttgccaatgctgggacgatgtacttcttagcagcgtacagagtgccagcaccgtgtcggcttccagatcgatctcatcactgtacatgtactttaagaggatcagaaaggctgcgggctccacgtc

SEQ ID NO: 46915 - DNA, 948 bp, Homo sapiens
cttatttttctctctggactgtgcatagcagtagctgttgtttgggctgtgtttcgaaatgaagacaggtgggcttggattttacaggatatcttggggattgctttctgtctgaatttaattaaaacactgaagttgcccaacttcaagtcatgtgtgatacttctaggccttctcctcctctatgatgtattttttgttttcataacaccattcatcacaaagaatggtgagagtatcatggttgaactcgcagctggaccttttggaaataatgaaaagttgccagtagtcatcagagtaccaaaactgatctatttctcagtaatgagtgtgtgcctcatgcctgtttcaatattgggttttggagacattattgtaccaggcctgttgattgcatactgtagaagatttgatgttcagactggttcttcttacatatactatgtttcgtctacagttgcctatgctattggcatgatacttacatttgttgttctggtgctgatgaaaaaggggcaacctgctctcctctatttagtaccttgcacacttattactgcctcagttgttgcctggagacgtaaggaaatgaaaaagttctggaaaggtaacagctatcagatgatggaccatttgggattgtgcaacaaatgaagaaaaccctgtgatatctggtgaacagattgtccagcaataatattatgtggaactgctataatgtgtcattgattttctacaaatagacttcgactttttaaattgacttttgaattgacaatctgaaagagtcttcaatgatatgcttgcaaaaatatatttttatgagctggtactgacagttacatcataaataactaaaacgctttgcttttaatgttaaagttgtgccttcacattaaataaaacatatggtctgtgtagtttccgagatgtactataaaaaaa

SEQ ID NO: 46916 - DNA, 842 bp, Homo sapiens
taacagctatgacatgattacgaatttaatacgactcactatagggaatttggccctcgaggccaagaattcggcacgagcggcacgagttccaacttgactgtagccatgctagcaaacttgataccattcactctgaccctgatatcttttctgctggtaatctactctctgtgtaaacatctgaagaagatgcagctccatggcaaaggatctcaagatcccagcaccaagatccacataaaagctctgcaaactgtgacctccttcctcatattacttgccatttactttctgtgtctaatcatatcgttttggaattttaagatgcgaccaaaagaaattgtcttaatgctttgccaagcttttggaatcatatatccatcattccactcattcattctgatttgggggaacaagacgctaaagcagacctttctttcagttttgtggcaggtgacgtgctgggtgaaataacagaaaccctcaactccatagattcacaaggggagcatggtgtgtcttttagcagaaaagaaactgatggtgtctagaacgttttatatttctgtcagtttgttgtagtgtatgtatttgagtaatttcaaaacagattcctaggatagtcttttatatatatataatatatataaaattcatatatatataaaatacgtatgggtgtatatgtgtgcatgtgtgtgaataataacattgaccataaattatgaagcctagtatatttcatatatataagtatgtgtattttatgatagctaattgtatgatatttcatttgaagaatttatctctctttgtaattaagaaattacagcatttat

SEQ ID NO: 46917 - DNA, 1413 bp, Homo sapiens
aaataatttcaagtttacatatgagtaactgaaatatttgagtaaaaaaggcaaaagtttaaatttggaatgctgtatatattagagaatatggggaatcatggtgtgaccaactgtacaaggaagattcatatgaaggtcttaggggaaaaagataattctgaagggtgaaaaaaaaatctctcccatggagattcttcacattatatggtttgacataagggtttataaggttgtttgtccaactaatgaaaatgcgcttaataaaaaattctgaccttgggtaagaattcgctttttaccgcattgccgctttcatgtacatacatgagtgcatgcacctatcaatgtgttttcttcccaacacttattaaatataaaacaacctgattttgtgctcgtttctcgtttttcttgaggccctgaagcttccaagataaatataagactaaaatttgcttgttccttcacacctgatttctcctagaaccataaatacctcctatggggaactaagaaatcatgaatactgggattttcttattgggattttttacttttgttttgtggggataacgaggacagaagtgaaagggaaactgggtgcccggtatttactgtttggaaattaatgttacagtggaatgtttttaaagtattaattttaaaaaaccatgttctctagaaacaagttttaaaaatctatatgaaagttttaaaatgttccagctaactaatggataagcataccagtaaagccaaagtaaaggttagtgcctttaaaactaacctgtgttagagttacatgaatctggctctaaagtatctattttgcatccatttatatatagatcttaaacagaaatactcctaggttgccacaccacagttttaagaagttatgctgctgctgttactctcttctaggattctggtggtaagtagagaaactcggacactatattaaccttactgaaacatgctttaaatcgtgtctaaaatctgatttgagcaagtcactgccgagctttctgagtctgcattgacactgctactgactcacctctccttccctggaataaggcttcagcttccctatgctgtgaagacaccatttgtaagcactttgaacataagcactgtgtgacagcgctggatatcatgcttgggggggggcctctccctgactcccatccccataataatgagttttgtttggaattgtaataagtaatgaactgcatggtttagaaaattataaatatttgatcagctgtcctctctgaaaaaaattgcacccctttttcttttttaaaattttgttgcatcttcgtagtaatgtaattgtattttatgcctgcttttttataaaaaaataaaataaaataaatggagacataagcaaaaaaaaaa

SEQ ID NO: 46918 - DNA, 1663 bp, Homo sapiens
  misc_feature (1)...(1663): n = a,t,c or g
aattaaaaaaaatttccctangacactaaatcctcaatctggaatgtagattctgagcacaaagcagctcagttaacctaaaaaataaagaaaaaattcccatcacctgtctcagtagggcctgaaaggagagaagtagtgtggggaacccctgctttggtatggagagtcacggccccttgacccagaccgagaccgtgagtagccatagctggtgcttctctcaggataaactcggatgtaggaagtttcaccctgaaatgcaaacaaaaacaaaaagagtaaaggggaaaaaaatcagagccagaagaataagcaaaccaacatctaacaataatagttaagtattgagcacttactgtgtactctgtgcctggcatgaggctatctcattaaaccttcataacattatgaggtaggtactcttactatcccatttcaagaatgaagaaaattaagacttaagttatatcatttgcccaaggtaacacaataaatgccaatttgacatgttgatactcaattaactatgataaacaatatatctgaattactgccattgacccccctcaaagctaagaactggaaaggatctcaggggtcatatagtttaatcccctgccacctcatgtatgcatctttggatgggcatctatggaaggagctagcctgtatttaataccttccagatgtgaggacctgagctagatgctttagacgttatcctcttgctctagattcctggcaagtcttgtgatggtgctattatgtgaccattttgcccatgaaggaatcgaggtcccaagagtagttcaggtaaggaattaataagcagcagaggaggcatgtccaggctggcttgtccccaggccctctgccttcagccaccattctcagaagatccaaagatgccaaggggaaagaagccggatgctttttcaccttaggtgaaagtcagtaattggagttaccctttctgaggccctgctttgcagtataactgaggatcaggtgctgttctgtttctgcttcaaattcaagtcctagaggacagtctgaacaaaagcatcattaaaccagggaaggaccaacctctaagccaaaaactaggcaattatatgaatcctcagaaaaagaaatgagcccagagacctgtgtccccaaacatccgtaaatctcatagtaaggcaggacaggataaccagaaaaaaacaatgtccaactggtggtctggtttctggtctcaatggtaccaaagggatagtcaccacctcaatcaaactgagatccaaaacagcagctgctttcctacaaggaaagacatcaagaactactgagtctgaagggtgacataatcaaccacaagaaaatgttacggtttagcctgggcacagtgggttnnnnnnnnnnnnnnnnnnnnnnnnnnnnnnnnnnnnnnnnnnnnnnnnnnnnnnnnnnnnnnnnnnnnnnnnnnnnnnnnnnnnatgngactctgtctctaaaatcaaaaattagagaaatataaaaattataaaattaaaaaagaaaatgtcatgatagcttaggtttcagagaggatgctgcactactctgggaaaaaagtgaagtgacagctcagccctgacagcaggacctagaagggctgagatgaagaggctgacct

SEQ ID NO: 46919 - DNA, 842 bp, Homo sapiens
tgagtcccggattctggtgggttcttccgctcaggctgggtgaagcgcttccgggtcgccgccggcagcagcctcccggcgcgatgaagacactgaggctcagagaggttaagtgactcagccaaggtcaaacagctagtaagtggtggagccaggactcaaagccagtctaggagccatgtccactttgttcccctcactcttccctcgtgtgactgagactctgtggtttaatctggatcgaccctgtgtggaagagacagagctgcagcagcagggaacagcagcatcaggcctggctccaaagcatcgcggagaaagacaacaacctgggttcctattggcaagccagcctcagagcactatgatgacgaggaagaagaggatgatgaagatgatgaggatagtgaagaggactcagaggatgatgaggatatgcaggacatggacgagatgaatgactacaatgagtcaccggatgatggagaggtcaatgaggtggacatggaaggcaacgaacaggatcaggaccagtggatgatctaggtagacaaggcagggtggcctcagggagattccaggccagcccaaactaccctgcatcccaacccccaacccctgcccacagaaccagctgatggccccagtgcctgaaagtgcccttgggcacctcctcagctgctgccaggatctggtctctttggcccctcccaggccatcagtctgcacttgaaatccccagggcctgaaacctactccaccttcctggccagtacctcaccccttgattgccaggtctggtctaagtttctttaataaagacaaaggagtgattttccaaa

SEQ ID NO: 46920 - DNA, 454 bp, Homo sapiens; identical to SEQ ID NO: 1685

SEQ ID NO: 46921 - DNA, 344 bp, Homo sapiens
gaaagaacctaacaccggtgcctggggctccttcgcagacctgcttcgtgacctctttcgaatggtgctccaagaggcagcttgtggacctggtgatggaaggggtgtggcaggagctgctggacagcgcccagattgagatctgtgtggctgactggtggggcgctcgagagaactgcggctgcgtctaccagctccgggtccgccttctggatgtgtatgaaaaggaagtggtcaagttctcagcctcacctgacccggtccttcagtggactgagaggggctgccgacaggtctcccacgtcttcaccaactttggcaagggcatccgctacgtatctttt

SEQ ID NO: 46922 - DNA, 746 bp, Homo sapiens
tttatttttttttttttagtcttctctaattttattacagggcatgttggggacaggggagggaagtgttagaggagtgacagggcagcccggggccctctcccaccctgagcctcgaggcctggtgggggacatgaactgcagaggcatcagataaggcctcagaaagcccaggccatcattttccatgggaccaggctggctcaatgtggaactggccctcccagagcagcaggagaagggctcgcatgggctgcccccgtcacctgtgcctgacaggatggggggggaggcagagagagagcatcagacgccctccctccccataaggggcatgggggatggggacacttcctcccaggacacagggagcctggctgaagctggctggctcatgccccatctggtctggaggtcagaggggagtgagacactctggtttgaaaggccttcctttccactttggggaaaacaggcagggagagaggtgagggtgccatgccaaaaaacacccccaaatccagatgcagactttggagccacatgtgggtttgaatctcaactctacctgagtgaccctgggcaagtcacttcacttccctgagactcaagtttcatcaagatgggaacaatgagcatctgcctcacaggcttgtcgtgaggattaagtgagaaggtgcgtgtaatattagcgatgactggatgatacaaaattaagaacaaggctgggcacgattgtcacgcct

SEQ ID NO: 46923 - DNA, 334 bp, Homo sapiens
gtacacttagaaagtttagtgttcagaaagttttttagggagtactttgggaccagtactcatggaagaggaaagagagtaagcaaggttgggcagagggctaagctgggctatggtacagcctcaacaatatttcagctgtctcctttgggtgctctgaagatagagtggcctttcagagtctttcctagtggagatgaggggctgggtcattatacattagtgatgatctgtcactaggttctgttgaccctaggaagggggtgtgcccttgggcaagatgctttctacagtagacagttccataagagggcagacagttgagggctattta

SEQ ID NO: 46924 - DNA, 2157 bp, Homo sapiens
gttttcttcattgggtatgtgttgatgttcacagacagtacttgggcccattaggttttcgcgtctggtcttagagcatgtgtattcatctcagcgtgaatacctcagccagtcttatgaataggaggctatgtatgggcagggaatagattagattagaacactcgcacaagatgaccacatatagaagcagaaagccccaaattccctgggaactgttttttctctagtagctgaatataaggaaatatgtctaatggacaccagttaatactttttaaaactactctttaaaaaaaaaatacgttccccttggttaactgattttttaatccagggtggacattttttcaacctttattaaaaagacaaataaactattttgtagaagatcagactcctacttaactggaagagaaatgtctattaaatgtctctcctctttctctgggtcaagaccatgtaattttatgcttcagagatgaagatactgtttgtttacaaagagtttagtttttaagacatccaaaactctatgctagagcaaaaatcaaatagcaaaggacactagccagaaaatacagtgtgtgtgtgtgcacctgtgtgcctgctgaacaacttgacagtgtaacagataaggtaactgaagatggtggatatttgaattgtattagcttaatgtctacatatctttggccaaaactctattgtcatattagaaacatgttatctttttcatgtttattagtaatttatttttgattctttgttttctttttcgtccaactaaaacaactgtaatgtacttgatacatttatatcaagttctaaagtatttagacaaatccaaatactttgtttttagttttttcctcctttccatcctgttaaccacagtgaaacgctgcagtattttgatttggtcagtgctacggaggaagaccatgaaagctgaattggtctgtgccacccagagtaaacctcttctcttcttctggaaagatggcgtgatgtttttcaaggattctaataaatatcccgcagtcatctcctgagcagctttcctctgtttcacttcggaactccttcccccactttcttcactccagtttcttcacttgcagcgttttctgctaagaaagacttatcatcttgtatctgtttatgcctctcttctttggggcccctggatgtttttgtggatttttacagagtatttatatctgcacagcgtgtattttgttatacattcttacaagcattgatattggggggtacattcataatagtgagaatatctggcagaatgtgtgaatgccatatctgtagatgacgatgaatgtgaagggttaatgtagaaatgtttgtttattctgttacagctcaaaatggaggctgagaatctctaccaccattcccttctctatttgagaatctctaccaccattcccttctctatttgggaaacaatactctcttattttgctatttttaccttcccattaactggcttcactcaacagtgccagatacctatggagaggggaagtaaaacaccttaggtcaggaataataaaccaatgagttagctcagggccggtggacatgttcactggtggaccagttggcattgacctaaacggacagagaaatgcacatggaggagaactacgttgaaatcaagatcctatgtctgttgtattttctctttgcctggagtaaatagcattataagtcattccacccttattagataaccaaagcatattggtctcaatagctttctcctgaaaaatgtgattgaatcttacctgtagcagttcactcttaaggttgaaagaactgtcaatatagataaaatccattccttattattattgattggtgtgacatttgaaaatgtgtctaaacaatatttgtaagtaaaagaaccagtcataagcctcaaatgtgttcagtgtgtaccaagctggaatgggagactggcccctcttggctttaaagtagcatgttgtctttttctagcagcttcttcctagtagacattccagggatgggaggggccagggatcatgtcttactcatttctgtatcgccagcccctggcatagtgtctggcttatgttacgtgaataaatgaatgcttgccaagaaaaa

SEQ ID NO: 46925 - DNA, 2007 bp, Homo sapiens
tttttgttttttttgctgttttgtaatcaggaaatatatttgtcattgactcacaaaacaaaatgtgctttcaaaatcttttgaaacaatttttctgaaatttatttctaaaagtcagagacaaaactttagaagtgacacatttatactaagcatacatgcgtgagcaaaaaaaataagcacagaatacaaaaatgaaatagtaaaattttaatacagtattctgaatacaagtagaataccactagataagaattgtatttacctaagaaatctatgatagtgtgggtggagataaaccagtttaggatagccacttcactattcacattttaatcagtgctgaccagaagctaaagcaatttcttttaggctaagattggcaaaaaatcatagacccaattttccttgttatgaatcaaatgaacatgttttaaggtgatttgccctcatttaacggtagctggagtaagtcaaaccacagagagcccttacaaagactaagcaccaaatgatgaactgtttgtggcttttgttttgggccatcttaagttttgtgttttccattaacattcatgtgcaaattcttacaggcaaaagttttaacgtgtaagtttcagcttggagatcttgccaactgtacttacaacagttttaaagcaattgatactttcagaacaatctcaagcttaattggttaccattataagatgcagaactttttaatgttttctggtccctgaaaattcaatagggccaaatgcattaactggaaatagcatttttttaaagtcttaatcaaagatgataatggataaaacaactatataggctctcatacacaatctttcttaattttcaccttgtaagaaatgattacaatgtccttcaggcttgttatacacccccacagaatcaagaagaaagccaacaaagaattgaacatttcaacaagctaggaaatatttactgtaagcatattgtgaaattctggaagacatactatcaatactttgagaaaacactattaacatgtgttgaagaaggcagtttataaatgaaacattacaaatcttatgtttatgcatacaacttataaaatagaaaaaagctgctatttttccaatagtatagcatcacactaacactatatagttaagattgaaaacttctgtacacacgttcactacacctccaaagcagcatatgcctcttagacatcctcatttgttatctaacatatgccaatcatggtttcagggatttgtatcagttcgagcaggctaaaacaatcattctgctgtatttatttaactttagacacagttaactagcttcagggaacaaaagttccataatcaatgaagaaacattaataccaaatccccacaacaggatggaaaacatttctaaggagaggatataatcctaacagaatggactatgcccctagttacagtgaatgtgggaattaattaggagtctgaaaaaatacattaagatatataaaatttaagtgattatcaaatcagtagtaactactaaaacttaaatatgaattattgatgtttttctaatgcaacatcatccagtttactgcttaggaccactctcaaagctgatctgccattacattttgctattagtgcaaattaatacccaaataatagggaacagtttgaatcacatggaatttcaaaaaacagaatgattgtgtatctttttgtattctgaaaatagtgctataaaactcaattattcctagcttctaaaatctaccatcttagatagttcaaattaaacatggttgcctgcaaattcttttctagaggaagtaaacgcaaaacacatatggttatgttttgctgctggtctcctcatacatgtgcttcatcaacgagagcactactctaggcatgcatttatcatactactttaacataactgaacatgaggaaaacagttcacattttgataagtgatttattttggcggcaggcttatttt

SEQ ID NO: 46926 - DNA, 1021 bp, Homo sapiens
  misc_feature (1)...(1021): n = a,t,c or g
aaagttgaccttgactctctgaggaagattttgctgcttttgcctgaagaaaacagacccatctctggaggtctcaggaagggcccagcgaacacactctcttggataattaccacgatggcgtcanaanacactccaccctgtgcctttttagtccttcccgccctcctgcctctcccttacacccctcttaacgactttcaaactaaaggatacatcatatactgacaaactcaatgtggtcctttcaagaattagccatgagtctcaaaaaggcaataaatggctctaagtggacaggtttgcttcaaacaagtaacatctacattttgtcttttttttttcagttctccctgttatgttctggttgaaatccacctgtgtgtcttaatttctccaattcctttttggcaagaatatcaagcaaggtgaatttaacattatgtttatgttttgttttgttgctgtaactaatagttaattggactgattcttacccagccctggtcaagaatctgtgaggcatgtgactgaagtactaaattaaacttattttgaaaccaaacctaatttttaagccaaaaggtgtaatagtgatttaatacaggatgaaaaacactgaatttttaagactgtaggtggactatgttagtagttttcaagcaggatgtctgtattcagcattcaataatgctaaaatccctttcagcatgaaatttgtatgtttttatcctttgctgactaaaataaaataactggtggtttgctaactatttaccatatgggttggctggtttttattaataattgtttagggtatcataagatctgtaagtacaaaggatattctgtttctatctgcaatgcatttgataatcatttctatgaaatgtattttatttaatcagataagctaataagcgaattggttacatcgtttgtatctgttggcctagtggacagctgtgcctggtgcacctctggcttttaataaatactcattggttgaaacaccctgcta

SEQ ID NO: 46927 - DNA, 264 bp, Homo sapiens
gctgaaatcgagaaatatgccagcaaagtggaccatgtaatgcagttagcaaggaaagaggcattcgcccgggctggtttctttggagcaactgggctctccggaaacctgatcgtgctttctgtcctgtacaaaggagggctgctgatgggcagtgcccacatgaccgtgggtgaactctcttccttcctaatgtatgctttctgggttggaataagcattggaggtctgagctctttctactcggagctgatgaaaggactg

SEQ ID NO: 46928 - DNA, 469 bp, Homo sapiens
gaggacaatgttgggcttttctccatgttataagccactactcagcaatgcatcagtaaatacctattcacccactgtatgccagccactgtgcttatatgcaggggatgcaaaggtgcatgagacctgccctctacctttaagaacagtataatggagaaggggagacaaaccttgtgacagattccttatgtactgtgataatacacagtggcagcagctaaaatgtctaggtttgcttagctttgtattcagtaataataagttgatctaagagttcagcataaactgaatgaaatgccatttaatggtagaggaaccaagcattaaggcagtactacacttaattttttaagcaaatatgtaaagtatattttcaaacttttctaatgttatggccccaaatttcttagttttggcctttttactacctatactatttttactgttttgttttgtctccatgtgg

SEQ ID NO: 46929 - DNA, 946 bp, Homo sapiens
gagccgcaagcgctcaagagccgcattgctctcaactccgccaagctgatacaggagcagcgggtcaccaacctgcatgtgaaggagatcgcacagcacctggaacagcagaacgacctactgcagatgatccgccgctcccaggaagtgcaggcctgtgcccaggagcgccaggcccaggccatggagggcacacaggctgccctgagcgtcctcatccaggtcctccggcctatgatcaaagatttccgccgctacctgcagagcaacacagctaacccggcccccgcctctgaccctgggcaggtggccagaatgggcagccagacagcatcatccagtgagggcaggggtcaggccagccttctgccatgatgggatgaaaactccatggacttactcaccatcaattaccaaggcccttgcctcagccacatatgaccaatggttacaactcagggctccagacctcagctaaaaagagaagacgctgccctcctgggcacgaacgtttagaatgctcaactcctctattgtgaccacaggaaggtggccctgaagatgcaccgaagacagctgggaggtgactgctgtactgtcagcctctctgtggaggcattcgtgcagtgccagctaaaagggaggtgaagggggatatcggacccagcgagggagttgctggtagaaggaaagctcttctcagtgtggctggattaagagcagcctagcagcttgggcacctccactctgtgcggtctgatggccccagcaaggtcgctgcagggacttcctgaggacttggtttggtttttttctggggttggaaatctgagccaatattgtgtctgttccatttgggtatgaagaggaagtctggatcacttaaactgactagttatttccgggtcataattttaaattaaagacatatcacttttttatacac

SEQ ID NO: 46930 - DNA, 618 bp, Homo sapiens; identical to SEQ ID NO: 1705

SEQ ID NO: 46931 - DNA, 681 bp, Homo sapiens
ggggggccgctggagccgagtagcgtacagagcggcgtgtgacgcggggacgccgcgtgctcccaacgtcgccccggtttgacgcacacggcaccaaactgtttgatttaattttggatgagatcgttcttgcagcaagatgttaataagacaaaatctagactaaatgtgttaaatgggcttgccaacaatatggatgatttgaagataaacaccgatattactggtgctaaagaagaactcctagatgacaacaattttatctcagacaaagagagcggagttcataagccaaaagattgtcaaacatcatttcagaaaaataatacgttgactctgcctgaagaactgtcaaaggacaaatctgaaaacgccttaagtggaggccagtctagtctatttatacatgctggtgctcctactgtttctagtgaaaactttatcttgcctaaaggagctgctgttaatggaccagtttcacactcctccttaactaagacttccaatatgaataaaggcagtgtttcattaaccactggacagcctgtggatcagccaacaacagaatcttgttcaactttgaaggtagcagctgatcttcagctgtctacaccacagaaagcaagtcaacaccaagttttatttttgttatcagatgtagcacatgctaagaatcccacg

SEQ ID NO: 46932 - DNA, 503 bp, Homo sapiens; identical to SEQ ID NO: 1709

SEQ ID NO: 46933 - DNA, 439 bp, Homo sapiens
tagatttcgtcttagcacatcaggcctttcccttaaagaacctgaatttcccgtgcccggcacgactgcccagcccagaactgaacacttatctcaaattaatcttccaaccacacaccaaggaaagaaaatggattactgccacgtagagatttaatttgggtatttcacgaattctgaactacgatttgaaatgtaaccactgtccaaccagaaacagtaaaaacaaagtgcttccctatgaaaagtattcacaggacattttattaaatgccaaagcattccaggtaagacacactgcccgttttataggaagttgttgagattctgctcctaagaatacagtagtcctttctctctccactgctagtgccctgataagctcagccaaccaaggccattcgcttttccatttgcaagcaaacacaccaaactaccc

SEQ ID NO: 46934 - DNA, 1321 bp, Homo sapiens
ccattttatgacctgattacgaatttaatacgactcactatagggaatttggccctcgaggccaagaattcggcacgagggggccagttagaacagataactggcaaaggtgcttcggggacattccagctgaagaaatcaggggagaaacccctgcttggtggaagcctgatggaatatgcaatcttgtctgccattgctgccatgaatgagccgaaggacctgctctaccactgctctgaagaagtatgtcctagagaatcacccaggaaccaattctaactatcaaatggcatttgctgaaaaaaaccctgcagaaatgcgaaaagaatgggtggatggaacagatctctgggaaagggttcagtggcaccttccagctctgttttccctattatcccagcccaggagttctgtttccgaagaaagagccagatgattctagagatgaggatgaagatgaagatgagtcatcagaagaagactctgaggatgaagagccgccacctaagagaaggttgcagaagaaaaccccagccaagtccccagggaaggccgcatctgtgaagcagagagggtccaaacctgcacctaaagtctcagctgcccagcgggggaaagctaggcccttgcctaagaaagcacctcctaaggccaaaacgcctgccaagaagaccagaccctcatccacagtcatcaagaaacctagtggtggctcctcaaagaagcctgcaaccagtgcaagaaaggaagtaaaattgccgggcaagggcaaatccaccatgaagaagtctttcagagtgaaaaagtaaattttataggaaaaaagggtatcatgatgaaattcaaaatcttattttctaaggtcagtgtgcatttgtttagttttgatgcttttcaaattacattattttcctcccctatgaacattgtggggagggactctaaataaaccagtttaggcatttgctagctttaggtgcttttattggtgcctgcccttttccttggtcattttaatttctgcaataatcctggactttcctaaactatgtaatgtatacttgtcctttttctctgcctcccccaaccccctgttgtttttatggtcagctttgccttttttttttcttccaattttatctaaacagttgcagagatttttatatttgtagaaagcatcaagaacggtatgccagtcaggtcctggaagtaaaatggaggcacaatatagcactgactgagttgtaaagcctcctgcctggagacttcagttatagctgtaataaataagttttttttttttttttgcagtaagtaa

SEQ ID NO: 46935 - DNA, 1211 bp, Homo sapiens
tgtttgaagttgttacttttgtttacagcaaagtttgatgtagtgtgcagtagtgagctctagactgatctttttctaaatcagaaagtgattaaagtatgcacaaccaaaggcaggtttttctttttcatttattcagcaactatttattaagcatcaactctgtgccaggcacgttactagctgctacatactgtctgaacatgacatacggttaagtaactttacaattattatcaaatacttcaatgtagatatttcttaagttgaaatagcattaactaggataatgctttcatgttattttattgtcttgtgatagaaattcaacttgtaccatctaaaactaggttgctataaaaataggaggatgaagtcaataaagtttatgccagtttaaaaactggaaggaaaaggtaagagctctccattataaaatagttgcattcggttaatttttacacattagtgcattgcgtatatcaactggccctcaatgaagcatttaagtgcttggaattttactaaactgacttttttgcaactttgggagatttttgaggggagtgttgaaaattgccaaacactcacctcttactcaaaacttcaaataaaatacacattttcaagagggagcaccttttatatttgataagttttcattataaaccttataataccagtcacaaagaggttgtctgtctatggtttagcaaacatttgcttttctttttggaagtgtgattgcaattgcagaacagaaagtgagaaaacactgccagcggtgattgctacttgaggtagttttttacaactaccatttcccctccatgaaattatgtgaaatttattttatctttgggaaaagttgagaagatagtaaaagaattaggaatttaaaattacagggaaaaatatgtaagtgaaaagcaataaatattttgttcactttgctatcaagatgttcactatcagatatttattatatggcagcaatttatatttttaatcattgcccattaatagacgcagtaaaatatttttgaatcagacatttggggtttgtatgtgcattaaaattgtcttttgtactgtaagttactgttaatttgaatattttattgaactgtctccctgtgcctttataatataaagttgtttctacaacttttaatgatcttaataaagaatactttaagaatcaaaaaaaa

SEQ ID NO: 46936 - DNA, 894 bp, Homo sapiens
  misc_feature (1)...(894): n = a,t,c or g
tttttttttttttttttttgaatataaattaactttattacaaaaagcaaaatgttagtttctcattgtgagtgattcaagaaaacaacggtaacagccctggcaggagctgggaccaggataccagtatgcaggctgaggggtcaaaggccaggctcaggagcgggctgacaggcactgattcacaacctccaagaggtgggtgttctccagggcagctgccacccgctccttatctgcaagttgcttgttcactgcatgctctgaggcatgggtccccggagtaatgtgcacgtccatcttgaaacgctgaggaagggagcgcagaagcttgaccttgatggacagaccaataagggtggccatgctgcagtgcggaatggttggtgtgaaagccacagccactgtactctcggggtcgctaacctgaacccgcacctgctctactacgttcaactcctctagcgtcagtggatgctccgggtcattgatggagcgaatcagatgtgggaagtgaaggaaaagggactctgcgcccttgcccacttagaaccctctgccaggaacgccctgctgggatgcggctccaccagctgctcgatatcactgctccccccaccgcaagcccccggaacccgcccgcgcccagcagcggcggatatcgaagatctcgcgtgcgtcgatgctgtcgggaacctgctcgtcctcctcgcctgccgtcacaggccgctccccagagcgctggtagatgagggggttggcattctccaggaggccgccgccgaccccgccgccgcctactcgtgccgctcgtgccgaattcttggcctcgagggccaaattccctatagtgagtcgtattaaattcgtnatcatgtcataagggtttcnaag

SEQ ID NO: 46937 - DNA, 450 bp, Homo sapiens
ggaccaacagtgtgcaagtaataacccacgtgaaggaaaagctgcacttcatggacatggagaacgcgtgcaaaaagacacagctggcagaaatcgaggcccaggccgccctaggaagagacatcctgaccaagacgaagcaagcccgagaggggctgcggacggacaacatcagactgaatcagaagtgcggccttctaggcaaggactcacttcttcgggacttggaagaaaaggtggacaagaccgaactgcttcaccggcgcctggaatccctgaagcgccaccacgctagcctcactttgtcctgcagaggcgtgaggcagaagatcagggaggccaaagcctttctcccttcttgaccagatcgatgagaagagtctgcaaaacacttcatcctcaggacgtgctgtcctgctttattttaccttcgtgctattaaaaaggccg

SEQ ID NO: 46938 - DNA, 1700 bp, Homo sapiens
aatcaaaaccctgctttttacatgctaaatatcttggcaagtaggccattaaacatagtaatgaacttaagacagcaagagtgaggagttaacaaaagctaaacattgcagcctaaacaaaattcatacaaaaaaataaactatcactagttacataaaattttcctgactggttaaaacttagtataaaatatgcattttagaatctttagctatcaagttcaaaaagtaccaatcaatgtctatttaaaataatttgttattaatatacaaagacaacaaacttttaaaacattacatttactaagattctggcaataagacacagcataccaggcttgccactcaacttgttattgtaagtctcagcttcaatatgaagccgttttttttttttaatcaaaaccctgctttttacatgctaaatatcttggcaagtaggccattaaacatagtaatgaacttaagacagcaagagtgaggagttaacaaaagctaaacattgcagcctaaacaaaattcatacaaaaaaataaactatcactagttacataaaattttcctgactggttaaaacttagtataaaacatgcattttagaatctttagctatcaagttcaaaaagtaccaatgtctatttaaaataattcctctcccaagccaaagtgtagtcaaaattaattcaaatgacataacacattctaatgctaaaaaatattcattattactaaagtggaggtaaatcccagagcttttggggctttctcatgctgcaaatggctgtttctctggttcactcaaagcagcatatgacagcatccaaagatgacactaagctcagtaaagggcaagactgctggtagccagctctgacctccccgtgaagcatggctactgtgtccataatacaggatgtgtgaggatcaaaggcacactattctgctagctaaagagatagcaaaccaccccccaaccctaaaagctccttccccaggtaaataaaagtatacgaggggaaaaaattaaaatacacttatctacagagtaagggttttgaaatattaatgtaatccctccttcaaaaattctaactagagtcatctggtcatttctgattacatcttaaagatgtatccagattcaatttctgttggtttatccttagacgcttctagtcaaaagtattaattttattcccaaatatcttaaccactagtacgactgcagtgtattatctcccagagttatcaagcactggaagagaaaaaaatagatgttcaagcagcaggcaacatttatggccctttcacacagtggcatctgagtggctactgaatagtccaggaataattccaaaaacaagaaaattcatgcattttagtaaatatgttgtagttttcacagttgaaatttcctcagacattgcactttctttataagggaatcctgatttttcttaatgttatggtgagtcaggacttgaactagcagccttctttttcttcttcttactgtgtttcttatgcttctttttcttttttgttttttctgttgctttttctcgttcttcactgcttttcttcttttttgctcgcacctcctcaatatactctgattctgacaaggactcagatgataaaggtttatcttcagaatacatctttctctttttgctgagtcctttaatatccttttcttt

SEQ ID NO: 46939 - DNA, 828 bp, Homo sapiens
acgaatttaatacgactcactatagggaatttggccctcgaggccaagaattcggcacgagcacaaacatatacatttttcttgagtctcaaggtattttatatttttagtcagaaaaaataatttttcatttcagttttccataaactgttacacaaaatataaacctaacgtgtatttttcaggactgcgtgatcgtgcactttgtgtggtaagaggtttgagtagtcctgtatgtcacctagggaacagacattatagcttcctagcaaatgaatattcatgccttgtttttgatacctcctggcagcttccatgtcaccacttgttcatacctgcccagagctagttttagacatggcaaaatagaaatcatctgtaatttattagctaacaatgtaaaaccatcttttaaagccttcagactgtcaagacgacatgagcagctcaccatatgataaaaatacataaatttgacattcccttttccataaacctttgtttgtagatttaatgttgaacagtacttttccataaagttctagtcacttctgttggcctgagccaccagattatgatgttgccagaattcactcaatttgaataaagatgaacagtatttgttttcttgtttccatgaattatatcagtattctaaaacatcgcttcagaaagagaactgtttatttctgcaggcttcctgtccttttgtggtatggttttttggccttattttcactggcttttccttctccaaactttgaggcgtgatttcattcattgaagaatcaatacatattttgtttcaaaatgtttgaaacaaaagac

SEQ ID NO: 46940 - DNA, 1283 bp, Homo sapiens
gcagcccagccctcattctttcatggtcagcaaccccatagccaggtatagccaggctggagaaaagaagctgccaccatggttgcactttcactgaagatcagcattgggaatgtggtgaagacgatgcagtttgagccgtctaccatggtgtacgacgcctgccgcatcattcgtgagcggatcccagaggccccagctggtcctcccagcgactttgggctctttctgtcaaatgatgaccccaaaaagggtatatggctggaggctgggaaagctttggactactacatgctccgaaatggggacactatggagtacaggaagaaacagagacccctgaagatccgtatgctggatggaactgtgaagacgatcatggtggatgactctaaactgcactgacatgctcatgaccatctgtgcccgcattggcatcaccaatcatgatgaatattcattggttcgagagctgatggaagagaaaaaggaggaaataacagggaccttaagaaaggacaagacattgctgcgagatgaaaagaagatggagaaactaaagcagaaattgcacacagatgatgagttgaactggctggaccatggtcggacactgagggagcagggtgtagaggagcacgagacgctgctgctgcggaggaagttcttttactcagaccagaatgtggattcccgggaccctgtacagctgaacctcaagtaagtgcaggcacgagatgacatcctgaatggctcccaacctgtctcctttgacaaggcctgtgagtttgctggcttccaatgccagatccagtttgggccccacaatgagcagaagcacaaggctggcttccttgacctgaaggacttcctgcccaaggagtatgtgaagcagaagggagagcgtaagatcttccaggcacacaagaattgtgggcagatgagtgagattgaggccaaggtccgctacgtgaagctagcccgttctctcaagacttacggtgtctccttcttcctggtgaaggaaaaaatgaaagggaagaacaagctagctcccaggcttctgggcatcaccaaggagtgtgtgatgcgagtggatgagaagaccaaggaagtgatccaggagtggaacctcaccaacatcaaacgctgggctgcgtctcccaaaagcttcaccctaggattttggagattaccaagatggctattactcagtacagacaactgaaggggagcagattgcacagctcattgccggctacatcgatatcatcctgaagaag

SEQ ID NO: 46941 - DNA, 2418 bp, Homo sapiens
tgagattatgacaaggatacactcatgttccaggagcaggaagtgaacctgggtctcctgtaagacagaagatgaagatgagcccaggctaacttagcacagatcttggctgagatcatcaatgtgacgtctaatgtacctgcactagacagagaataaagttcaccagacattactctggtcagctaaccagataaagaattgttgaaggaccccaactgtgcctcctgccacaggacaaccagcaagttctatgctgagccttagcctcccaggttataagctccctgcaggctcctcctctccagagccaggatggagaggcactgggctgtcccaaagcaggcttggatgtgccaacgtacagttgctccttctgtaattcttgcactaaaactccattaaagaccatcaatgagccaaatagtgtgctagccattgaggatggagttcttagctacttaatgattcttttcttctgggaaaatcttctagtgaataatttttaaaagcttcttttaaactgctcagtaaaacattgccatacattaactctccatttctgcattaacttcatttgctggaaagaaattattttgttaatgaaccaaacccagccattaagttatgtgaattcaccttctctagacacattgaggtatggcagagaagacacatattccctggcctagagtgggctgacaatattgctgcctcccctaaattgactcaatcttgagaaccacatactgcagtgacagttgatcatggatcagaaatattcctttttctcctagaggaaatccctcatggcattatcattccctaaggacaatgagatgtccctccgctcaaatcctaaagccccctgatgaaagatttggctctgatttgctgccaacttattggtaagtgctgaatgagttactgtgctttggcatagcttctacatcacagcaagtgacttctcagaggggaaaagccaagctccagacaaggagtgctgttagcccaaggggaagagctaatagatacataggccgtaagcacagggctgtacacagatcctttattggcatctgcatgagaggcctagaaatcggatgttagaagctaggaatcatggctctgagcgccttgcatacaggagatactcactgatactaaatcaaggcatgtaaacaatactgggtaaatcatacctaccagaataaagagtaacattcagagcttttcttttagctgttattttaaatgttactccatatttcaaaagtctgcacgtatgaaattgtgtcttatttctggtttttagagcctaagaaagatactcattcttaattcctatttatcatctgaaaaccaaatgaatttttgaaataaatgttttaccagcatttctgacctggtctggcctgatctctgtgttgggcaagagagggtacaatttgagcagttctcctgagttagactcggctcaaagtctctcttttaaagtgaaaagccacctttctcattgcttttttcataggtggaagaatcagatttcaagagactgaagttcattctgtttcattagggattagactaaaatggacaaacagtggaagaaatccattttccagaagcagctctgccctgtatgtcccagtcaaccacatggatggtctttgtgaaagttttaacttcctgcagagttaccgagtgctcagcgattgagctttgaccacacccgtgtttgttcctagtctgttccccagccataagcatctccacaagccctctgtggcttgtgtggcctgatgtccatggccaccaagggcctctcaccatacgcttctccactcaacctttggagagacacggaccaccaaaggcttgatttttcttcatcctacattatattcaaaacaaacaggctgggtgccgtagctcacacctgtgatcccagcaccttgggaggatgagctgggaagatcgtttgaggctaggagtttgagaccagcccgtgcaaaaaacgagacctcgtgtctaaaataatttttaaaaaagagcaaaaaaaaaagcaatttcaaggagactgaagagacatgacaattggacacaacatctgattctgaattggatgtttttgttataaaagacattgttgagacaatttgcacaacttgaatgaggtctgaagattagctgggagtaagatgccactgttaattttctgatttcagtggttgtactgggaagaagtaagagagtgtccttgtttgtactggagacactgaggtatctgggggtgaggggcatcatgtctgtttactgtcagatggttgaggggaaaataatgttctttgtacttgcagattttttggaagtttgagatgttttagaatttgtaaaaataattatttttaaaacccc

SEQ ID NO: 46942 - DNA, 491 bp, Homo sapiens
gtagagaaaaggggcctctggtgaccgcccctacctggcatccctctaacccaggaggagcgtggggaaaggggctgtgggcctctcggggagcgagctgcggggtagcgcgcactgggtacaggcgcgcgcttggctgtcgcctctgccgctgtgtttgggaggactcgaactggcgccaggaaatattaggaagctgtgattttcaaagctaattatgaaaacatttatcattggaatcagtggtgtgacaaacagtggcaaaacaacactggctaagaatttgcagaaacacctcccaaattgcagtgtcatatctcaggatgatttcttcaagccagagtctgagatagagacagataaaaatggatttttgcagtacgatgtgcttgaagcacttaacatggaaaaaatgatgtcagccatttcctgctggatggaaagcgcaagacactctgtggtatcaacagaccaggaaagtgctgaggaaa

SEQ ID NO: 46943 - DNA, 620 bp, Homo sapiens
ggtggaaatcagttccctatgaggagggtgcaaagttatactgattggtgagtcactcccagaataaacaaataatggtttcacacctcattgcttcattcagtgtggaaggaacattctaggtttgtgtgtaagtttggggagaaggagacagagccagagggcagagcagccctgcagccctcagttggcctccattttcttcccggtctgaagaaaatgaaacagaggatttaaagtgttgcttgaagaatttaagttagacttaaaggagagatgctggtctttactctcctttcggcaaggagagtttagtcatcagaatggtctatttagtgagactgtagcttgttcttctgaagtggtctttttaaaaactagagaactctcacctctctgaagtggttgtgtatgaaactgtttaaagccgaggatgcactcagtgacctcttcaggcaaccccagatttactcagtcagccatggcacacatgctagagaagtaaaaaaatgaattgagacttgttctgaaaactcttgagcaggggctcttaaaagttttttgtttaggaattatgtcagggttggggtctggagagcagataagtgttttgtgtgaag

SEQ ID NO: 46944 - DNA, 558 bp, Homo sapiens
aagtttgtcggcccttgccttggagagctgagtttctggaggctgctcacattccttggcttatggcctccttcttccaacgtcaaagccagcaacattgcagcaatctgacttattttgttgtcatgtctcctgaccacatctggaagggttatctacttttgaagacacatccagataattcaggacaatctgtccattttgaggttcttcattgaatcatgtctgcaaagtcccttctgcaatctaagtaagaaaaatcaccaagaatattatttttggtatttgggaattgaatttgccagggaattgcaaggcactgctgacctaacttaaagaccttggctttggaaacatcttaccccttgggcagctctccagagtttagacttggcagcatcaaagacacaacgcaaggcattttggagatcaaagatgggtagaaaagatgctgctactataaaacttcctgttgatcagtacagaaaacaaattggtaaacaggattataaaaaaactaaacctattttacgagcaaccaaatttaaagcggaagca

SEQ ID NO: 46945 - DNA, 1736 bp, Homo sapiens
ttttttttttttttcttaaaaagaaatggtttaatttcatttttatctgggaaaaaaaccacaaatacgagtttaaaatgaaatgacaaatacattgacatgtcaagtgtcattttttatggtattatgcttattcaaggtgtgaagatacagaacctctttataaatttctggcatcaaagattcccaccgtagataaaaacaggttggttataaaatgtcaattcattaaatattcaatttttgttctttgtttttataaggaatattttgtagaaacagtataaaatagagtagacttttggaaattgaattataaaattttagaaaaaagtgttaagtcctaacttttctttgcgaaccaacaagagagtctagttttaccttggggagttacctgtgaagtgcattaggcggctagagctgtttcagagccctgggttctatacagtagaagcagccttctttagcacttagaatacgaccccagctttttccagttagcctcaatcagaaaagtttaacatacatgaatatttctatagtgcagtaaaagtgtcattttattaatttgcattatgaaaataagtctgtataccaagtaatgcataatgaatatgaatcatgtaaatttggtcacggtatttgaagttggctttggctctgaagtatttttgaattcatagaaaatattgagcttttaataaaataaataaaacattttaattgatattaataatcaagttcaaattttaatttttcatctgctactcaattttaaaagagaagtcactctcagtagtgttcccaagtgagcgattgcaccttctatgatgtgaaaaagttgctaaagatcctattgccattagccgttcttaagtgctgaacgtaactgagagaattgtttgcaatagacatgctctgtcactggcaggaagtccatcaataccctttgcaggggcactccagaccttgtgttttaccagaaactgaggcaaaccgtggtcctcatgtgcctttctgaagagctcctgcagcaggcccaggctacagtggccaagtctcacttgacagtaatggcattggatggtggctgcagaaggttactgatgtccccgtgggctttcacaggctatgcagatcgggggctgttctgcctagtactgaaaggaccaaggagctctggctgccctcaggaattccaaatgaccgaaggaacaaagcttcagggctctgggtggtgtctcccactattcaggaggtggtcgcgaggttccgcagcttcacctcgcccagtccttcccagtatttaaagttgttgtcaagatgctgcattaaatcaggcaggtctacaaaggcatcccaagcatcaaacatgtctgtgatgaagtaatcaatgaaagagatttgggatttggggatgctgcaggtatttctgtcaaacactggcatcaccacaggtaagccctgctgcttctcttcatcagtctgagaaaaatattcttccgaaatgcgtgcagcccactcgatgcagtactgcaggggtcggcagggattggacacatcagcacatttaatcagcattcgtttgattagggtccggttctctggagtcctaagcatagtgtttatcacttcctggtttttatcagtttccccattttcttctagtgttgccaagggtttgttgatgctgttgacaaatttgttgacatgctcaaagtgctttgtcatcc

SEQ ID NO: 46946 - DNA, 796 bp, Homo sapiens
tttttttttcatcttgggaaccagctttatttctgattttttttttttgtcagagtataaaaaagtgagtgcagcaaaacaaggaagacgagacaggcgtgcgtgggccagggcaagacagaggagaagggagggaagcagaggcagaagggccccttgggcgaaggctgatggtgggaggcgggcagaatacttgcgcaccacacaggggcagggatgagggtctccccgtggtgggggcttacaggatgggagcggccaggccagttgtccaaattccacctgggacctgcagtgaccagcctcgagtctggaggctcaaagcacacagaggggactaggggctcagcctcatctgtccctgagattttcagaagccacagggggactgggagagggcagaggcgcaagagggtggaggcggctaggccgccctcactgtccttccgccaggcagcaccagccccaaaccacccagagaggggttgctcaggcctctgggagggtgtaaggggagtggccctgggaaggcctctcccctgaatccaggccttcttgggaaagcagcaatgggaaggcccacgcacaaggcccttgttcttgagggcgagaggggggaagaccataaaagcaagattttcccaaagatagggcagggagcactgctaagcctgggccctgggcgcggagccacctggacagggctggggttctcgttgtgccacattttgtctctggcgcttggtcaatctggtcctttctcagctttacttctcatgaatagagggggtgtggc

SEQ ID NO: 46947 - DNA, 1284 bp, Homo sapiens
ttttttttttagtaataacatgtttattcaaaatactaacactgttacattcttttcattctcagggcatattctactagagatgtactgtcctatgttttgaagtcacctggaagagttcttagtgtggttatatgactacatcaagagttttttacttttgatgattagggactgctttttaaaacttactttactccataatcttaaaatactcatacagttccacagtcacatttacactaacaaggcatatttgaagtccagctttcatccttgatcctgctactctaggctctcctttctcctaaagataagcattttcattatgtatcatgtttatcgtataggcatgaacacacgcgcggccccttccaggcagtcttcagtgatgtcacgtgttcccatggcacctgtattgtactcttatcagtcattatatggactttaacttccccagatattatttgggctcctccataagactgtgagcatctgaccactggagtgttgcttcccattatatccctgttatcaagcacaaggtcaggcacagagtaagactcaaaacatgttttggaatgtatgactggtatgaactacaaaccagtaagctgatgttttcattttgagtctataaatctaattttgtggtggttttgtgtattgctcaaggctcaaattgtaaaatttaatattatgtgaccaaagaaagttatacccagaacctcaatttcctcaccttcaaaatggggcagtttctcactcattggtctgctgtcacgattttaatgagctcatgcacaaacagccctttatataaggtaagtgctggataaatgttggctactataataaaataagcctctaagatacttggtcagcacaagtactacccaagagtatgcactgtaagtaaactgacaaaattgtgtatctaaaactggccaggatgaaagagaaacttttaaggggcccttctgcgtgcccgacacgtgtgctaggcactcacactatcccgacccgagaaaccgatctgcgacccagaggaacttaccaagcctccagcatcttgtgcagccctactcatgggaccatctggatacccacccttgtctttacagggagcagaacacacctcttatgtgtcagaaaacaaagtccaggaagtatatttttacctgaggcaatatctgaaaattgtatgctacagcctccaaagtgagtcttcctctcagtacctctcttctaggcacatggagccctttcttccaagtattatgc

SEQ ID NO: 46948 - DNA, 707 bp, Homo sapiens
ttttttttttcttggtgctggttaggttttattttaacaggatgttttctcttatttttcaaaatatcagttatatcaatattagaagtgtaaacaggtacaaaatatacagtacatagaaacaattttcttaactagtctatcgcctaataaaagtatgcatgagggggctgaatgaatgggcactgccaggtccctccgtctgcaggggaaacaagaggaccagtggctgcttcaacaaaacaggaatggatatttgtgtggtaggaacagcactgtggtcgaatcaagaaatctgggcccacctttatgatgttagatgctggaatgaacaagccacttggcccccaaacccagcctcgcgagctgtgccctctgagagtgcacacattaaggaggctggggcacaggggaggcggctgctacaagcagaagttcctttgaaggcctggtgactggactcttgtcggtgtgggacaaatattttaagagggaaaacctggaaatctctgttcacccacagtgatgttccagtagaatgaggcatctcgcctgttgctcttccccactcatggcacgccacgtgtacccacagtgagaggctgaggtgtgtcccctctgagcagtttgcacctctaaaaagaaatccctgtcctgctgcttcccaaggtcacagtaatgatcaaatgagatgcattttgaaaata

SEQ ID NO: 46949 - DNA, 1116 bp, Homo sapiens; identical to SEQ ID NO: 1763
  misc_feature (1)...(1116): n = a,t,c or g

SEQ ID NO: 46950 - DNA, 538 bp, Homo sapiens
ggcaggaagtggaccccaaacctactcttccaggccccagtgtgaacagctgacctctaggccacagccctggtttggtccgctcccagtttggttctctgctaatagtgttcacatttttactttcagtgttttcataggatcactacattgtcacaaaccactaggagcttcagcttaaggtggcattattatgtttttataaaaggaatcacagaatagtcatttgccattataaatcagtgattcattttctgtgtttaacaggctgtttcctgccgtccttttccctttaaccatgtcccagtaagaaggctaaataaagggcagggacattgccagcagataacccagactgaggtgaggaataaacacatccaaggaaaatgactatgggctattgctcacagtgatcgtttgggtctttcaggtggccatggtgaagtccgatttgagcacgtgcgtgtgcccaaagagaacatggtcctgggccctggccgaggctttgagatcgcccagggcagactgggccccggcc

SEQ ID NO: 46951 - DNA, 527 bp, Homo sapiens
ggttttaatacaacaacaaatgtcgtcattttggccggcaccaatcgaccagatatcctggaccccgcgctacttaggccggggcgtttcgacaggcagatctttattggaccaccagacataaaaggaagagcttctattttcaaagttcatctccgaccgctaaaactggacagtaccctggagaaggataaattggcaagaaaactggcatctttaactccagggttttcaggtgctgatgttgctaatgtctgtaatgaagctgcgttgattgctgcaaggcatctgtcagattccataaatcagaaacactttgaacaggcaattgagcgagtgattggtggcttagagaagaaaacgcaggttctgcagcctgaggagaagaagactgtggcataccacgaagcaggccatgcggttgccggctggtatctggagcacgcagacccgcttttaaaggtatccatcatcccacgtggcaaaggactaggttatgctcagtatttaccaaaagaacaatacct

SEQ ID NO: 46952 - DNA, 399 bp, Homo sapiens
cagagatggatgtgacaggtcaggcttttgaggacatgcaggaacagaacgggcggctgctacagcagtttgcgggaaaaggatgatgccaactttaagctaatgtcagagcggatcaaggccaaccagattcacaagctgctgcgggaggagaaggatgagttgggcgagcaggtccttggcctcaagtcccaggtggatgcccagctgctgactgtgcagaagctggaggagaaggagcgagccttgcagggcagcctcgggggtgtggagaaggagctgacgctgcgcagccaagccctggagctcaacaagcggaaggctgtagaagccgcccagctggccgaggacctgaaggtgcagctggagcacgtgcagactcggctgcgggagatccat

SEQ ID NO: 46953 - DNA, 462 bp, Homo sapiens
gacttttctttttttttttttttttcactgttaaaaacatttattctgatacattctatcataagttagtacaagttccactctgctacagatgcgtctgtgaagagccttgtgccatccaactagtgactgaatgatgtcccatctcttatccgagccagagcacacatcttccatgctgtccgctgattgcctccaaatccagaagaccaaataatcctttatccccaaagtaggctcaaaacagttggttcaggcattccgggatctgcacccctcttaaatcccaggtaaatcacaagagggataaagccccagcgaatggcaaactggctccccttgaagagctgctgtagtctctgcttggcctctttgctcagcttcaccatggcgacggccgtgtggcgcagggaggaccccttacagcaaccacagcgtcgggaatccgaaagggaaaggagg

SEQ ID NO: 46954 - DNA, 2352 bp, Homo sapiens
  misc_feature (1)...(2352): n = a,t,c or g
aactgcccaggagtgagtagctgctttcggtccgccggacacaccggacagatagacgtgcggacggcccaccaccccagcccgccaactagtcagcctgcgcctggcgcctcccctctccaggtccatccgccatgtggcccctgtggcgcctcgtgtctctgctggccctgagccaggccctgccctttgagcagagaggcttctgggacttcaccctggacgatgggccattcatgatgaacgatgaggaagcttcgggcgctgacacctcaggcgtcctgggacccggactctgtcacacccacctacagcgccatgtgtcctttcggctgccactgccacctgcgggtggttcagtgctccgacctgggtctgaagtctgtgcccaaagagatctcccctgacaccacgctgctggacctgcagaacaacgacatctccgagctccgcaaggatgacttcaagggtctccagcacctctacgccctcgtcctggtgaacaacaagatctccaagatccatgagaaggccttcagcccactgcggaagctgcagaagctctacatctccaagaaccacctggtggagatcccgcccaacctacccagctccctggtggagctccgcatccacgacaaccgcatccgcaaggtgcccaagggagtgttcagcgggctccggaacatgaactgcatcgagatgggcgggaacccactggagaacagtggctttgaacctggagccttcgatggcctgaagctcaactacctgcgcatctgcagaggccaagctgactggcatccccaaagacctccctgagaccctgaatgaactccacctagaccacaacaaaatccagggccatcgaactggaggacctgcttcgctactccaagctgtacaggctgggcctaggccacaaccagatcaggatgatcgagaacgggagcctgagcttcctgcccaccctccgggagctccacttggacaacaacaagttggccaggggtgccctcagggttcccaggacctcaagctcctccaggtggtctatctgcactccaacaacatcaccaaagtgggtgtcaacgacttctgtcccatgggcttcggggtgaagcggggcctactacaacgggcatcagcctcttcaacaaccccgtgccctactgggaggtgcagccggccactttccgctgcgtcactgaccgcctggccatccagtttggcaactacaaaaagtagaggcagctgcagccaccgcgggggcctcagtgggggtctctggggaacacagccagacatcctgatggggaggcagagccaggaagctaagccagggcccagctgcgtccaacccagccccccacctcgggtccctgaccccagctcgatgccccatcaccgcctctccctggctcccaagggtgcaggtgggcgcaaggcccggcccccatcacatgttcccttggcctcagagctgcccctgctctcccaccacagccacccagaggcaccccatgaagcttttttctcgttcactcccaaacccaagtgtccaagtctccagtcctaggagaacagtccctgggtcagcagccaggaggcggtccataagaatggggacagtggggctctggccagggctgccgcacctgtccagacacacatgttctgttcctcctcctcatgcatttccagcctttcaaccctccccgactctgcggctcccctcagcccccttgcaagttcatggcctgtccctcccagacccctgctccactggcccttcgaccagtcctcccttctgttctctctttccccgtccttcctctctctctctctctctcnnnnnnnnnnnnnnnnnnnnnnnnnnnnnnnnnnnnnnnnnnnnnnnnnngcttcctcagacctttctcgcttctgagcttggtggcctgttccctccatctctccgaacctggcttcgcctgtccctttcactccacaccctctggccttctgccttgagctgggactgctttctgtctgtccggcctgcacccagcccctgcccacaaaaccccagggacagcggtctccccagcctgccctgctcaggccttgcccccaaacctgtactgtcccggaggaggttgggaggtggaggcccagcatcccgcgcagatgacaccatcaaccgccagagtcccagacaccggttttcctagaagcccctcacccccactggcccactggtggctaggtctccccttatccttctggtccagcgcaaggaggggctgcttctgaggtcggtggctgtctttccattaaagaaacaccgtgcaacgtgaaaaaaaaaaaaaa

SEQ ID NO: 46955 - DNA, 1546 bp, Homo sapiens
  misc_feature (1)...(1546): n = a,t,c or g
cccttgctttgacatgattacgaatttaatacgactcactatagggaatttggccctcgaggccaagaattcggcacgagcgaagactgcgagagccccgcgccggaggccgaccgtccgcaccagcggcccttcctgataggggtgagcggcggcactgccagcgggaagtcgaccgtgtgtgagaagatcatggagttgctgggacagaacgaggtggaacagcggcagcggaaggtggtcatcctgagccaggacaggttctacaaggtcctgacggcagagcagaaggccaaggccttgaaaggacagtacaattttgaccatccagatgcctttgataatgatttgatgcacaggcactctgaagaacatcgtggagggcaaaacggtggaggtgccgacctatgattttgtgacacactcaaggttaccagagaccacggtggtctaccctgcggacgtggttctgtttgagggcatcttggtgttctacagccaggagatccggnacatgttccacctgcgcctcttcgtggacaccgactccgacgtcaggctgtctcgaagagttctccgggacgtgcgccgagggagggacctggagcagattctgacgcagtacaccaccttcgtgaagccggccttcgaggagttctgcctgccgacaaagaagtatgccgatgtgatcatcccacgaggagtggacaatatggttgccatcaacctgatcgtgcagcacatccaggacattctgaatggtgacatctgcaaatggcaccgaggagggtccaatgggcggaggttacaagcggaccttttctgagccaggggaccaccctgggatgctgacctctggcaaacggtcacatttggagtccagcagcagaccccactgaggggctgccgagcctcagggcaggtctcccgcccggcatgtgtgttcagggactgagcctggggacgcccacccacacccactgcttcctctcggcgcaccccaggggagtgttagcagcgaggccttcctcactcaggagtggaaactcagatgtgtcactcagactcaacttgctgggacactgacaggcgttcctgaggttttcagccacttaggctcgttgcggtttaaagatccctctaggtcactgagaaatgccacagaatgtgcaggaagcctgggaggcttctgtgaggaatgtgaggcacattattggggaaattgaggagacagcctagacactggctggcctgatgttttgttgacagtgaacccacagtgggagagagttttttccagtctgatctggttcttacacactcacacacataactcaaaagttttgtgaacaagtactttccttttttacatgttacatgtcctcatgttttctgttttctgtttcataacacaaggctggttgtggcctacaaacctaatttcatgacccagtggtttgcagtccagcgtggcctacacggatatggggagccactgagggatgttttccccccttgcttgtgccttaaaggagnagcaagcgag

SEQ ID NO: 46956 - DNA, 5188 bp, Homo sapiens
tgggaacaagactttggccatccagtttctcaagagtcctcttggtcacaggagtatagttttggtccctctgcagttttgggggactttggatcttccaggctgattgagaaagagtgtttggagaaggagagtcgggattatgacgtggaccagcctgtgggggctgactctgtgcttaggggcagcagtcaagtccaggccagaggtcgagctctaaacatcgttgaccaggaaggttccctcctaggaaagggggagactcagggcctgctcacagctaaggggggtgttgggaaacttgtcacattgagaaatgtgagcacaaaaaaaatacccaccgtgaatcgtattactcccaaaactcagggcactaaccaaatccagaaaaacactccaagtcctgatgtgaccctggggacaaacccagggacagaagatatccagttccccattcagaagatccctctggggctggatctgaagaatcttcggctccccagaagaaagatgagctttgacatcatagataagtctgatgttttttcaagatttgggatagaaataatcaaatgggcaggattccacaccataaaagatgatattaaattttcccaacttttccagactctctttgaacttgaaacagaaacctgtgctaaaatgcttgcctcattcaaatgttccttaaaaccagagcacagagatttttgcttttttactatcaaatttttaaagcactctgctttgaaaacacccagagttgataatgagtttttaaacatgcttttagacaaaggtgctgtgaagaccaaaaattgcttttttgaaatcataaagccttttgacaagtacataatgagacttcaagaccggcttctgaagagtgtcacacctttgcttatggcctgcaatgcctacgagctaagtgtcaagatgaagaccctcagtaaccccctggacttggctcttgccctagaaaccaccaactctctctgccggaagtctttggcccttttgggacagacattttccttggcctcttctttccggcaggagaaaatcttagaagctgtcggcctgcaagatatagctccctcacctgctgcgtttccaaacttcgaagactccactttgtttgggcgagagtacatagaccacctgaaggcctggctagtcagcagcggatgtcccctccaggttaagaaagccgaaccagagccgatgcgagaggaggagaaaatgattcctcctacgaaacctgaaattcaggccaaggctccaagtagtctgagtgatgctgtcccccagcgagcagatcacagggtagtgggcaccatcgaccagcttgtgaaacgtgtcatcgaaggcagcctgtctcccaaagagagaactcttctcaaagaggaccctgcttactggtttttgtctgatgaaaatagtctggagtataaatattacaagctgaagttggcagaaatgcagcggatgagcgagaacttgcgaggagccgaccagaagccgacctcagcagactgtgcagtgagggccatgctgtactcccgggctgtccgcaacctcaagaagaaactccttccgtgggcagcggcgggggctcctccgtgctcaagggctccggggctggaaggcgaggagagcgaccaccgggacccagaccctcctatcctcaggcaccaggctgaaacaccacggccggcaggctccaggcctctcacaggcaaaaccatccctgccagacagaaatgatgctgccaaggactgcccgccagacccagttggaccttctcctcaggaccccagcttagaagcctcaggcccatcccccaagccagcaggagtggacatctctgaagcacctcagacctcttctccctgcccatctgctgacattgacatgaagacaatggagactgcagagaaactggctagatttgttgctcaggtgggaccagagatcgaacaattcagcatagaaaacagcaccgataaccctgacctgtggtttctacatgaccaaaatagttctgctttcaaattctatcgaaagaaagtgtttgaactatgtccatcaatttgtttcacgtcatctccgcacaaccttcacactggtggtggtgacacccgaggttctcaggagagccccgtggacctcatggaaggggaagcagagtttgaagacgagccccctccgcgggaggctgagctggagagcccagaggtgatgcctgaggaggaggacgaggacgatgaggatgggggagaggaggcccccgctcctggaggggcgggccaagtctgagggcagcacccctgccgacgcctttcccggcgaggcttgccgaggacgacctggctggagcacctgccttgtcacaggcctcctcaggtacctgcttccctcggaagaagatcagcagcaagtcattgaaggttggcatgattccagctcccaagagagtgtgtctcatccaggagccaaaagtccatgaaccagttcgaattgcctatgacaggcctcggggtcgtcccatgtccaaaaagaagaaacccaaggacttggacttcgcccagcagaagctgaccgataagaacctgggcttccagatgctgcagaagatgggctggaaggagggccatggcctgggctccctcggaaagggcatcaggagccggtcagcgtgtacgcagcaggcagcctggggtgggagtgggtggggcctcagtccttccacctgcagcctgccgcttggctccttcacagccaagatggcttacagctggcagttgatttttgttttttaaacagaaggcatcttcagatgagaagctgatcatttacatgtgcaggtgtttacagggctcctttctgtcctggtgtagattttttaaccagcttgttggccctggtcattttggccacatttgtgaccatcataaaagctaagtggtatttctgtgtagtttccgtctggaactgctttcccattcccgggaacccatagccgggccagccagggtcccgaacacaggcccaaagtttattaaaccccgatcataacctccagcaggcatttcatttaatactgagcttagttcctgctgggtaaggcattccgaggtaaccagggccctctgggcaccccctcaaaagccagctcttcgagggtgagtactccttgtttctactgtgagtcgcgtcttgattttccctttctttgatgtctcagtgtgtgtcccaaacacctgcatctcatggactgtttgtgcccatgcccagttcctggcatgccaggccctgggctcaggtgcacaactgactctctttttcactccctaggggaaccccctcggaaggggaagggttgggtgctgacgggcaggagcacaaagaagacacattcgatgtgttccgacagaggatgatgcagatgtacagacacaagcgggccaacaaataggtatgttcacaggccagtgtgtaaggccgtctgccctcgctggcgtgctggtatgcagagaaatttcccccaacaaagttgatgttccctgctcccccaaaaatgccacacacaaaaaaaatcacaaaattctgtgagggaaacaaaagggtctatggatgtggatatgccccattcttaccttccaggtttgctgaaggagcaaacctcacactggccaagggcagatgcgcatggcctgcctggtgccccggctgtgagcccctcaaggcctccaggccagcctccgtggatgtgcgtgtggaaataggccacgcctgtctcttctcttgctcaagttttctctcacagatgacagccacctaccacataacatgaccagcaaacggactgttcctagtccagagggccttgccatcatgcaagtggaagggcgactgtgacagccactgccacagaggatggcagttggctgtgtccctttgtgagggtcttcaaatccttttccttctgcagggccttgggcctgtaaatatcctcatctttctattctttttttttttttagttgccccctcacctaatttccacctcagttttgaacaaaatcgttctcttcctgaatagatcaaaaccactgatgtgaaagataagccttgaagcagcaattgcccttaaaacatcatccctgccctggatcggcctggagccagtgcccaagtacggtttggtgtgtacatgaaaacaaacgtctctgcagtctctggggcggaggtttcgctggcttttctttctctcaaagaaaaaaacatgcaccattttcaatgtgcttttgcctctcctctctgttcacatgcttttagcagcaagtcccctccaaatctgtcttggttccccttcagaaggtggcgctgcccccgaaaggcacctcagcctgtgagtgctgaggaaccagctcctctggctgattttccagttggactggccattgctctccagaagtgctctgttagcaaacgtgatgtggaaacgatcacagatggtgttttctcgttgttcgccagaatttatacgggggagacaaattcccggtaattaccaagtctgcactcgggtaccaaagctctgaagctctctgaacagttgccatacttgagttgatgaatgtgttattcatggtgtctcatctcatcaatgcatcttgagagacttaatgaaattttagcaacagtatagaatagctctatcgggtggggagtaatcattaaacagatgaaatcggccccagatttacatgtctctttagaatccacagtgtaagcaaactacagttacaaagggatgggggttgtaaacgctctgagactctgcacttttcgcacgtatggcatcgtcaagtgctgtcttattacagcctttgtaaggagaggcaggctcctcctggggtgggctctgcagctgctctatttccaggcatgtgatcgcccccgctctccagattccccagcactctgctgcgtgtaactccactcaattctccactcatccttccttgtgaagcaggatcgttgaagttttaagtatgggcaaaaatctggaaaacttaggatccctctgacaccccaggattaggggacacagcagtggctagggcatcagccacagaactgagcgggaaatgccacttgtattggctgtaaagaaatcctg

SEQ ID NO: 46957 - DNA, 665 bp, Homo sapiens
ctatgacatgattacgaatttaatacgactcactatagggaatttggccctcgaggccaagaattcggcacgaggatcgaagccagacagctgggctccagagttcatgctgttagccactacccatgctctgctgggatggtcaggcccatcctgccgtgtgggaacagcctgacaggtgctggggctgctggtgtgggcgctgattgcggacaccccgtaccacctgtatccggcctatggctgggtgatgttcgtcgctgtcttcctctggctggtgacaatcgtcctcttcaacctctacctgtttcagctgcacatgaagttgtacatggttccctggccactgggtgttaatgatctttaacatcagcgccaccgttctctacatcaccgccttcatcgcctgctctgcggcagttgacctgacatccctgagggggcacccgggccttataaccagcgcgcggctgcctcgttcttttgcgtgtttgggtgatgatcggctatggagtgagtgccttcttcagctaccaggcctggcgaggagtaggcagcaatgcggccaccagtcagatggctggcggctatgcctaaaccacctgtgccacggccccctctggggctgaagccgccgctgggtcacagagcagggtcaccctgca

SEQ ID NO: 46958 - DNA, 2618 bp, Homo sapiens
  misc_feature (1)...(2618): n = a,t,c or g
tatgaaaggtgcttacgaacaagtaattaagtactgtactacataccagagcaaagggcagaccttgacacttactcagcagcagagagatgtgtaccaacaagagaaggcacgcatgggctcagcgggactcagagttcttgctttggcttctggtcctgaactgggacagctgacatttcttggcttggtgggaatcattgatccacctagaactggtgtgaaagaagctgttacaacactcattgcctcaggagtatcaataaaaatgattactggagattcacaggagactgcagttgcaatcgccagtcgtctgggattgtattccaaaacttcccagtcagtctcaggagaagaaatagatgcaatggatgttcagcagctttcacaaatagtaccaaaggttgcagtattttacagagctagcccaaggcacaagatgaaaattattaagtcgctacagaagaacggttcagttgtagccatgacaggagatggagtaaatgatgcagttgctctgaaggctgcagacattggagttgcgatgggccagactggtacaggatgtttgcaaagaggcagcagacatgatcctagtggatgatgattttcaaaccataatgtctgcaatcgaagagggtaaagggatttataataacattaaaaatttcgttagattccagctgagcacgagtatagcagcattaactttaatctcattggctacattaatgaactttcctaatcctctcaatgccatgcagattttgtggatcaatattattatggatggacccccagctcagagccttggagtagaaccagtggataaagatgtcattcgtaaacctcctcgcaactggaaagacagcattttgactaaaaacttgatacttaaaatacttgtttcatcaataatcattgtttgtgggactttgtttgtcttctggcgtgagctacgagacaatgtgattacacctcgagacacaacaatgaccttcacatgctttgtgttttttgacatgttcaatgcactaagttccagatcccagaccaagtctgtgtttgagattggactctgcagtaatagaatgttttgctatgcagttcttggatccatcatgggacaattactagttatttactttcctccgcttcagaaggtttttcagactgagagcctaagcatactggatctgttgtttcttttgggtctcacctcatcagtgtgcatagtggcagaaattataaagaaggttgaaaggagcagggaaaagatccagaagcatgttagttcgacatcatcatcttttcttgaagtatgatgcatattgcattattttatttgcaaactaggaattgcagtctgaggatcatttagaagggcaagttcaagaggatatgaagatttgagaactttttaactattcattgactaaaaatgaacattaatgttaaagacttaagactttaacctgctggcagtccccaaatgaaattatgcaactttgatatcatattccttgatttaaattggcttttgtgattgagtgaaactttataaagcatatggtcagttatttaattaaaaaggcaaaacctgaaccaccttctgcacttaaagaagtctaacagtacaaatacactatctatcttagatagatatatttttttttatttttaaatattgtactatttatggtggtggggctttcttactaatacacaaataaatttaatcatttcaaaggcattctatttggtttagaagttgattcccaggagtgccatatttcagctactgtatttcctttttcttgtaatgtaagcagctcagataccatgtgctatcatttttgtatcaagttttttgcacaggatgtgaccactgtcagatcactgttcttttctttctttttgtgattgaaaagcctatactacaatttgaagtaaatttttgtttttcttagtaagtgtaaatggttgctttatttttattttaaaaaggtatgtctttggtttggcagaattcatgcagggctatcaagtggtgttctagggtaacagtgtccataattaacgcttagtcatagagtcaaaaacatttaagactgattgggttgaagtttataataaattatattaacatgtcttcctttttgaggtaaagatatatactttgtcaaatatcattttgtcatcctctaaatataaatccaaatacctcagctaagtaattctattttattatttttactgttatgtatgtttttaatcatatttcttaggaagtataggctactggacttagaataaaaagtccccaaacccaaacaaatggtttatgaaccagagtatatgtggaagattctttgctggtcttgctctgtgtgcatctgaagcttctttggcctagattttagcacaaacctgagtatatctcttctactttcatcatgtgttctgtaccttctttttgtttcattgggcatgctagggaaataggtggattttgtgtgtaatgccatcagtttttatgaaagcttgatgaggtataggtcatttgttttgagtatgtgggccagaaatttaaaattanaaatttgttnttctga

SEQ ID NO: 46959 - DNA, 1180 bp, Homo sapiens
ctgggctgagcacatgacagggagcctggagccccggggcctccagcgaggcctgagaagggtggttcgggtaaccactgtgggctctctcccatcacagaaggtggacagggcctacccaggtggaggggaccaccctgcgatcaagggtttgcgacaggggttgggccagctgaggcaagctgtctttttttccttttctttttaatagatgcaacatttttataataatcctagagaccttttttctaccaaagatcacagaccagaaaaagttccatctaaaatatcatgcccaggaaagcacatgggatcaaaagtaaaatagcatcatgtgtgatctcgtcttccagcgtgccgctcagttccccgaatccgtgtgcacacgtgtgatctcgtcttcagtgtgccgctcagttccctgaatccgtgtgcacactggcgtatgtgtacgcggcagcatggcttattactggaacttcaacaaggatcttgggctgttacattaaatattttgttaaaaggaggacccttttgccacctttttttactggttaatgttggagacttcatttactttaaatgtttctacgggagggtttctgggtgtggttgttgggagccggacggacgcgtgtcaggcacgtgctgaggggcatggggcctgccccctggggacgccattccacaagctggggccacgggagcttccagctttttcagggacaaagccccggggcttggcgcatcctgagggtctctgggggtgtttgccaggctcctgggatgggcccggctttccagaaagccctgcaagtgcctccagatggaaaggcggggccccgggcccccggttggggcctgcattttgggagagtcccacacccacggacccaggttttcccccccaaggcttggctttgtgtagcctacctaacttcttggggcattcctgagagtgtgggcagagagaattatgtggcctcatcctcccccaaggctgtgcttgcagcccgggcaccttccccactttctagctctggagaggttggattttgcttttgtaaacacatgaatccttatgataaaagtctgtcagtcaaaaatacatttataaattatttaatgccagtcctcatgtaaccacaggtatattcagattatagagaataaatatggt

SEQ ID NO: 46960 - DNA, 2134 bp, Homo sapiens
cgggaagtcgctgaagacagagcgatggtagttctggaggcctcgctccggggccgacccgaggccacagtgcctccgcggtagaccggacttgggtgacgggctccgggctcccgaggtgaagagcatcgggggctgagggatggaagggtctaagacgtccaacaacagcaccatgcaggtgagcttcgtgtgccagcgctgcagccagcccctgaaactggacacgagtttcaagatcctggaccgtgtcaccatccaggaactcacagctccattacttaccacagcccaggcgaaaaccagggagagacccaggaggaagagactaactcaggagaggagccatttattgaaactcctcgccaggatggtgtctctcgcagattcatccccccagccaggatgatgtccacagaaagtgccaacagcttcactctgattggggaggcatctgatggcggcaccatggagaacctcagccgaagactgaaggtcactggggacctttttgacatcatgtcgggccagacagatgtggatcacccactctgtgaggaatgcacagatactcttttagaccagctggacactcagctcaacgtcactgaaaatgagtgtcagaactacaaacgctgtttggagatcttagagcaaatgaatgaggatgacagtgaacagttacagatggagctaaaggagctggcactagaggaggagaggctgatccaggagctggaagacgtggaaaagaaccgcaagatagtggcagaaaatctcgagaaggtccaggctgaggctgagagactggatcaggaggaagctcagtatcagagagaatacagtgaatttaaacgacagcagctggagctggatgatgagctgaagagtgttgaaaaccagatgcgttatgcccagacgcagctggataagctgaagaaaaccaacgtctttaatgcaaccttccacatctggcacagtggacagtttggcacaatcaataacttcaggctgggtcgcctgcccagtgttcccgtggaatggaatgagattaatgctgcttggggccagactgtgttgctgctccatgctctggccaataagatgggtctgaaatttcagagataccgacttgttccttacggaaaccattcatatctggagtctctgacagacaaatctaaggagctgccgttatactgttctggggggttgcggtttttctgggacaacaagtttgaccatgcaatggtggctttcctggactgtgtgcagcagttcaaagaagaggttgagaaaggcgagacacgtttttgtcttccctacaggatggatgtggagaaaggcaagattgaagacacaggaggcagtggcggctcctattccatcaaaacccagtttaactctgaggagcagtggacaaaagctctcaagttcatgctgacgaatcttaagtggggtcttgcttgggtgtcctcacaattttataacaaatgacttttttccttagggggaggtttgccttaaaggcttttaattttgttttgtttgcaaacatgttttaaattaaattcgggtaatattaaacagtacatgtttacaataccaaaaaagaaaaaatccacaaaagccactttattttaaaatatcatgtgacagatactttccagagctacaacatgccatctatagttgccagccctggtcagttttgattcttaaccccatggactcctttccctttcttctctgaaaaaaactaattaaaatttgcttttcttttttttaactgagttgaattgagattgatgtgttttcactggatttttatctctctcaacttcctgcacttaacaatatgaaatagaaacttttgtctttactgagatgaggatatgtttgagatgcacagttggataatgtgggaaaatgacatctaagctttacctggtcaccatgtgatgtgatcagatgcttgaaatttaacacttttcacttggttcttatactgaatgccgactctgctctgtgttagagatatgaaatggtgtttgatactgtttgagacattatggagagatttaattatttgtaataaaagatttgctgcagtctgaaaactgaaaaaaaaaaa

SEQ ID NO: 46961 - DNA, 389 bp, Homo sapiens; identical to SEQ ID NO: 18751

SEQ ID NO: 46962 - DNA, 688 bp, Homo sapiens
cccacgcgtccgggattctgtcggatggacttggggctagctgcggcggggctggaggaggccagataaccatgtcagccacagttgtagatgcagttaatgctgcacccctatcggggtccaaagaaatgagtttggaagaaccaaagaagatgaccagagaggactggagaaagaagaaggagctagaagaacagcgaaaattgggcaatgctcctgcagaagttgatgaagaaggaaaagacatcaacccccatattcctcagtatatttcttcagtgccatggtatattgatccttcaaaaagacctactttaaaacaccagagaccataaccagaaaaacaaaagcagttcagctcatctggagaatggtacaagaggggtgtaaaagagaattccataattactaagtaccgcaaaggagcatgtgaaaattgtggggccatgacacacaaaaagaaagactgctttgagagacctaggcgagttggagccaaatttacaggtactaatatagctccagatgaacatgtccagcctcaactgatgtttgactatgatgggaagagggatcggtggaatggctacaatccagaagaacacatgaaaattgttgaagagtatgccaaagttgatttggcaaaaccgaacattgaaagcccagaaactccaagaggaattagcct

SEQ ID NO: 46963 - DNA, 735 bp, Homo sapiens
tttctttctgtggtttcttcctttttaattactggaagggtttttccattttttctcctagtgttcctttgtttgccagggaatgtttcgggaaggctgtggagtgggacggtggggatgaagcggggagtcccacactctctgggtccaggcacaaagctatcctccgttgttctgatctgcagagccagcgccctcagcaggtacctagtggtggcagagccgtggcctacacgttcccaaggaggccgccagccgggctgtacccttaccttgggggtgtgtgcagatggaaggtgggaagagacagaccaacaggaagtgttctcttcaggggttgccagccccaccctgaatctcagagcatcctcctccccggcaaaggccagggcactgtcccgaccatgggctctgtacaagcagagggaggcacccggaggctggtgtgagcagctacgtggggtggtggtccagggaacagaagggagggcactggagccattgcctgcctagttcagtcctcaaatgggtccaagccagctcaggtctgcagcgccaggcccagggtacctggcagcccagccgatggtaccattggctggtgctcccactgaggtcttgagaaggtaatggggagagccacttgcccctgcctctgtccccagtggacttggttttgttcaaggccaaatgccaccccgtcagagagaggaccggttctcctgtcgccccagc

SEQ ID NO: 46964 - DNA, 539 bp, Homo sapiens
  misc_feature (1)...(539): n = a,t,c or g
gnnnnngnnnnnntntttggannccctttgganaccngntatgacatgattacgaatttaatacgactcactatagggaatttggccctcgaggccaagaattcggcacgagcctgagcgctgaggagtatcagcagaagatcatccctgtggtggtcaagatgttctcatccactgaccgggccatgcgcatccgcctcctgcagcagatggagcagttcatccagtaccttgacgagccaacagtcaacacccagatcttcccccacgtcgtacatggcttcctggacaccaaccctgccatccgggagcagacggtcaagtccatgctgctcctggccccaaagctgaacgaggccaacctcaatgtggagctgatgaagcactttgcacggctacaggccaaggatgaacagggccccatccgctgcaacaccacagtctgcctgggcaaaatcggctcctacctcagtgctagcaccagacacagggtccttacctctgcttcagccgaccactagggacccgtttgcaccgtc

SEQ ID NO: 46965 - DNA, 534 bp, Homo sapiens
ttacatgattacgaatttaatacgactcactatagggaatttggccctcgaggccaagaattcggcacgagaaataaaataaaataaaataataaaagaagagaaggaaggaaataggtttacatgtcttaagactggatatttcagtggtagaagaagagggccaatgatacggagggatgttaaccaattctctacacttaataaatttaaaattaatattctgacttttaaaggcaaccctttggtcctccaaaagattaaccataattcataatgctagatgagcatcttggagcaagtacttctctttcactctcataacattcaacatactttggccttgcaaaaaacaaagttcaattaactggatggggtggcatgtacttgtagtcctagctcctcagaagggtgaggtaggaggatcacttgagctcaagttcagggttgcaaagtgatggcactgctgcactccagcatgggtgacagagtaaaactgttgaaaaggaaaataataaataaaggttgactaag

SEQ ID NO: 46966 - DNA, 536 bp, Homo sapiens
ttgaccccccctttggccaccgctttgacatgattacgaatttaatacgactcactatagggaatttggccctcgaggccaagaattcggcacgagagttcctgtgtccacataatttcatccttcgatctcaccccctattctccccacctctccatcctaaggtcggtgaatactgcgtcggggaaattgacctaaaaaaatttgttatggtctatatattctctgatgagggtatttttctaaaagcaatgaagtcttcaggcttttaaaaggaagggattggggggcgaggggagggagagcatcaggacaaatagctaatgcatgtggggcttaaaagctaggtgacgggttgataggtgcagcgaaccaccatggcacacgtatacccgtgtaacaaacctgcacatcctgcacacgtatcccagaatttaaagtaaaagcaaaacaaaacaaaactctttttaacaaaaggtatgttgattgattggagattattatattacgggcacattttccagataatatttgat

SEQ ID NO: 46967 - DNA, 611 bp, Homo sapiens
ttttttttttttttttaacagttaaacttttatatttacaatattctcttcatcttttgccaggtttaaaaatgtgtacagagccgcaaagggttggggtagggataagggattgtcgggattgttttggggagaggagctgggcattggagtccgtggctgaatcatggggtcccccagcccccctcccatgccccaattctgagggcatctgtctacagggttcagggcccaggtctctagcatttggagggcatggctgtttggagaggagctagaccaggcaggggaaaggatcagaaaataactaattttccatggatggaggtaggaagagaagggacagtcaagaggcaaagttctggggactcaagaccagggattctggatttgggtgtcagtggaagacagcaccccagcccctattcaagtttggcactaacaccccacaaaatgccagcagatgaggactctcccctcgtccactgtgtcccttaagcccttccagacatcattcttttcccaaatggcccaagcccaaggccctccggggagtcacctcacacatttcaaattattcctgctggtgtctgcccaagccctgtccccac

SEQ ID NO: 46968 - DNA, 1696 bp, Homo sapiens
  misc_feature (1)...(1696): n = a,t,c or g
acagttatgacatgattacgaatttaatacgactcactatagggaatttggccctcgaggccaagaattcggcacgagggactatgctgctattgtggaacagaacttgcagcattttaaaccagtgtttcagctgctggagaagcagatactgtcccgagtccggaacacagctagctttaggaagactgctgaacgcctgctgagattttcagataagagacagactgaggaggccattgacaggatttttgccatatcacagcaacagcagcagcaaagcaagtcaaagaaaaaccgaagggcaggcaaacgctataaatttgtggatgctgtccctgatatttttgcacagattgaagtcaatgagaaaaagattagacagaaagctcagattttggcacagaaagaactacccatagatgaagatgaagaaatgaaagaccttttagattttgcagatgtaacatacgagaaacataaaaatgggggcttgattaaaggccgggtttggacaggcacggatggtgacaactacacacagcagggccccatcactgtctgcttcctataccaggttgttcctgattctgaacattgctattttctttgtcatgttggcaatgcaactgacttatttccagagggcccagagcctacatggccaaagatgtctttatgcagttcttctcatagatagctgtattttattatggttgtactcttcttgttcccaatcacagtgttagcactgaagctataaattacctggtcattttgtgatcacaagagtctatgcaaaaaaaaaatttctttaccccagattatcagatttttttccctcagattcattttaacaaattaagggaagatattttgacacaagaaagcaggaacgtggagaaattggagcaggaaaagaaattatcaaagcaatagaaatagcttggtggtcctatggtgtttttggaagtatttggcattgctaattgagcagtccatatagtactacttttagaagaaacaaaaagtctgttttttaaagtaatgttttttcttatgagaaaaaggtttagatagaattggggttttattaatattaatttaatgctattagcaatttccatatactatattgtggaaaagactgaagaatacaattctgagaaatataaaannntttnnatggtatactcatgttgaaagataaatntngctaagtcctggtatgatggtgtgagcttccttggggaagtacttcttgagttatgtaactaacaggatgttttactacagatctggatggctattcagataacatggcaaaaaatgatagcagaagatcattaaaaacttaaaatatattttattagaaaacatttatctatgaatgaatatttccttgatgctggtctctgcacacatatgcttggttacttgcatgcattcattggttgttcaataagtgagatgattacagataacttaatactgtattttccttatatggaaaaccgttatagacccaataacaactaaacctttcaaaagaaaatattttctattatgaatgttgattttcataccaaagaagatggagagtctaaaatttggatatgattcttatgtttttttaatagaaaaccttcttcaagtttattttcctaaataaacatcataattgtgaaaaaaaaaa

SEQ ID NO: 46969 - DNA, 445 bp, Homo sapiens
cagactaatatttacttttaatcagactaagatagggttactacttgagttgctatggctccagctgaaagaaagcccgtgcagtcatatcacgcgtaaacatttgctttatgctaaaaatatggtggacctggcattacagctattacaaatctcctaagatgtctcgggtagtgtattagttacttttcatactgctatgaagaaatactggaaactgggtaatttataaagaaaaagaggtttaatgtactcacagttccacaaggctggagaggcctcagaatcatggtggaaggcaaggagcaaaaaggtatgtcttccatggcagcaggcaagagagcacgtgcagggaaactgccctttataaaaccatcagatttagtgagatgtattcactatcacgagaacagtatgggaaaaacctgcccccatgattcgatta

SEQ ID NO: 46970 - DNA, 1234 bp, Homo sapiens
ttttgacttgcttattttttttattaaatgatacattgaaagtataaaaagttgccgcagtacaaacaaattacagaataatgcatataaaagcgctatggactacacgtgacaattctgcttaacttccatcttgatgattttatatcagtatccaaaattatatactccagcattttttccgaatatagtcttacatgattgcaattcctgaggtaaactaagtgtccactgccaacatccttggacgaaaaccaagtcccccgggaggaattcagatattttatattcacacatacaatacaacggaattcatcaatcgtaatcagatattgcagatttaaaaatggaaaatggactcttggcaatactttctgcatccatatataattgttaccagcagggcctcccaaaatgttgtgtaagtatagtttaaatggatttcattaataagtttctgcatttagataaaaattcttggctaatctgtaagaagtgaacactgactagcattgccaaacagaaaatcaaaagtttcaacaatttgcaaagcagcacagaattgacaccctaaagaggatgccaattttgctaactacagctcttaccactcttctccatggaaaacctttaagctaaatgttgtcagtgtttaggtgtgcaggcaaaatttaattctgaatataccatcgaacttttgccaatcaggagctgtctatcatcatagtcagttgttttccaatgaaatggagccctgtggacacctacattaaaaatacttctttaataaatatccgaagtagcgtattagagatagcacatactatttttctatccccaagaataaaaattgatgtttggtaagagtttcggagcccaaacaagtagggggctggccctcttctggctcatctgtgattgcacaaccgagggccacacggagattaaacaatgccatctttgaaaaatccctttctggtatttctcccaaagcctgtctcttcatgcttacttcacattctttatctaataaaataaactctttgttttatttacagcaaaattattacagcaaatttacttctcctctaccttttaattaaatcttccagtaagccaaagtctaaggaaagaaaaagtacattgttgcctattgaaaaggtaatacaaagccctttcatttccttacaaactttaagggcctttataatacttcctaaatggctgggctcag

SEQ ID NO: 46971 - DNA, 1999 bp, Homo sapiens
ttttttttttttttttaaatgtgcagtgttgaatcatttcttcatagtgctcccccgagttgggactagggcttcaatttcacttcttaaaaaaaatcatcatatatttgatatgcccagactgcatacgattttaagcggagtacaactactattgtaaagctaatgtgaagatattattaaaaaggtttttttttccagaaatttggtgtcttcaaattataccttcaccttgacatttgaatatccagccattttgtttcttaatggtataaaattccattttcaataacttattggtgctgaaattgttcactagctgtggtctgacctagttaatttacaaatacagattgaataggacctactagagcagcatttatagagtttgatggcaaatagattaggcagaacttcatctaaaatattcttagtaaataatgttgacacgttttccataccttgtcagtttcattcaacaatttttaaatttttaacaaagctcttaggatttacacatttatatttaaacattgatatatagagtattgattgattgctcataagttaaattggtaaagttagagacaactattctaacacctcaccattgaaatttatatgccaccttgtctttcataaaagctgaaaattgttacctaaaatgaaaatcaacttcatgttttgaagatagttataaatattgttctttgttacaatttcgggcaccgcatattaaaacgtaactttattgttccaatatgtaacatggagggccaggtcataaataatgacattataatgggcttttgcactgttattatttttcctttggaatgtgaaggtctgaatgagggttttgattttgaatgtttcaatgtttttgagaagccttgcttacattttatggtgtagtcattggaaatggaaaaatggcattatatatattatatatataaatatatattatacatactctccttactttatttcagttaccatccccatagaatttgacaagaattgctatgactgaaaggttttcgagtcctaattaaaactttatttatggcagtattcataattagcctgaaatgcattctgtaggtaatctctgagtttctggaatattttcttagactttttggatgtgcagcagcttacatgtctgaagttacttgaaggcatcacttttaagaaagcttacagttgggccctgtaccatcccaagtcctttgtagctcctcttgaacatgtttgccatacttttaaaagggtagttgaataaatagcatcaccattctttgctgtggcacaggttataaacttaagtggagtttaccggcagcatcaaatgtttcagctttaaaaaataaaagtagggtacaagtttaatgtttagttctagaaattttgtgcaatatgttcataacgatggctgtggttgccacaaagtgcctcgtttacctttaaatactgttaatgtgtcatgcatgcagatggaaggggtggaactgtgcactaaagtgggggctttaactgtagtatttggcagagttgccttctacctgccagttcaaaagttcaacctgttttcatatagaatatatatactaaaaaatttcagtctgttaaacagccttactctgattcagcctcttcagatactcttgtgctgtgcagcagtggctctgtgtgtaaatgctatgcactgaggatacacaaaaataccaatatgatgtgtacaggataatgcctcatcccaatcagatgtccatttgttattgtgtttgttaacaaccctttatctcttagtgttataaactccacttaaaactgattaaagtctcattcttgtcattgtgtgggtgttttattaaatgagagtttataattcaaattgcttaagtccattgaagttttaattaatgggcagccaaatgtgaatacaaagttttcagtttttttttttcctgctgtccttcaaagcctactgttt

SEQ ID NO: 46972 - DNA, 2388 bp, Homo sapiens
  misc_feature (1)...(2388): n = a,t,c or g
cagtggaaacacggtattcatttctgaggactgtgctaggttttaaggcaattgtcacatgtacaaaacagtcagatgagcagtatctgaacagatttaccacaacatgttagaaagagaacagcaggggaaatgttttcagacaaggagatgtgagattttccccagtcacgtaacccctggggctaccgactctgtggactgaaaaccaggaagatagacagcacattctctcttctcgcctccaaggggaagggccacctgcacactctcggaagcacccttctccagacccagacacgcttcttactgcagggccaggccaggacacaggatggtcggccaatgagtcttaagtccagctctaatttcacgctttatggctttgtgaaattcatctttagaaatgggaaaatcaagataccacagacatacaacttgtagttaatagttaagttcccctctatccaaacacaaacttgcttggcttggagctaaaactatacacacacgcacacacacacatgcatatacacaacacacacaacacacatgtgtgtatagatatacatatgtgtgtgtgtgttgtgtatatatatatgaaggaagaaaaaaagatttactgaagcctgaagaatagtgagtgttcatttaccatttggaatcaaacaatgtgattgtttcccttgaaaacagaagagtatcagcaacatgctctacccagcggggaaaagtttccagtttcctttgcacggttcctggtcccttttggcttcacaggagactggaatggcttagctggtttaaagagagctgggctttccccctggctgggtcaactctgtgtcccatggctcttcttcaccctttcctgctcaggctcatgtcccccagttttaagaagggggtgtggcttgatggtctccgttcccatctacccattctcatctcaatggtacacacatccataagcgtgtgcccctgtctgtagggcccaggtgacacatagcaacagggaaaacaagggagtgaaggaggctgaacactggggagctttaatggcctgttacagggtggcagaaacagtggctgggtctgggagtcacagcaaaatcaggcgcccagaaccatggtggaaggtggggttgctagttcatgaaaacttgaaggacattaggaagaggcggcatttgatgctgtcaagtaactacacacagaacaagggcatgataaaagtcctaatgcacatagagaacaaagccctgctcagaaatgctgtcctcaccagcagaaaggactctgctccacagagcagtcctttctccaaagctgtcccttacataaaaaagaagaacatactgggttagcacttgatatccaagaagtgaaatggtcgttttcgaagattaacagtttgcttcaccaaatccctctgaggtaggtaagaggcaggtgacattagccccattttacaaatggggtaaagtgaggccccaggacctgttacatcacgaatatgcatcaacagccacaaacagcacgctctcagatcttccccttcacttagcttagaaccgtgtcagcaggtaattggaaaaacatggaccatttcgctgataattttaaacttggatgtactggcaagaaagggctctatattttgaaatcagccaaagcccaggggacctgggaacctgtgaatgggggtaccccactccaattagtacatggttttctctggggtggtggtggttttgttccttctgcagtgcagcattttacagagtgtccagttgaattcaaataatagatgataaatcaacaagggtcctgaatgtgataactacatcacacctccccagggaaggaggcccatctctggccttttgccaaatcagcgtgaatggagaaaaagccaaagtgttatcagaggcccaggcctctggaaggaagcagaaaagtgcccccagggctgggatgcgaactgggacaattgtatgtgaaacctgtcctgtcctgattagattagagaaccctctgccccgcttctcccccacaaggctgcattccctctccttttttctttgacctcagaatctaagttgtttacctaaggctgtggaccagagaccaccacagtgctaacacccacctggagtatttctaacttgacaatgtgcggcacctgcagtctcccagaacccagggatcagaagctatccacacctagctatagcacaaactctttaaacacctgagtcccagctcagcaaaggccagccatggctaagaatttgctcgtgccgaattcttggcctcgagggccaaattccctatagtgagtcgtattaaattcgtaatcngtcaagnantagnncngncaancac

SEQ ID NO: 46973 - DNA, 902 bp, Homo sapiens
ctaatatttgttaacgctgttgcaactgggaaatggtggattaaatggtttccctttgccacattagaaatttcagtgtgtattcacactggcagcctggcaacgtggggaagtatggactgtgttgattcctgctcctctgcttacttgctctctcgctgtcattcatttagtcatcaaatactgatttaaggcatgctagtggacaaagcagccactgccctgccctcatagagcttatagcctaacacaaagcaacagcaaacattaggcatttgttcataaaacctttcccacaaagacttacaggcaggaaaattaggtattaatcaaatcacagaacctcccaaatgctaagtgaggattttaccctttgagcatatcccattaaaagcctcagttttctcatctgtgaaaggggacggtacctgccttttcaggtgaaacctagtgagataatgtgtatgcagctcttagcacagtgtcccccacataattggtgcataagtttccagctgatgtaagaaaaatacagaaaccccaatctaaatctatctctgaaactctaattataacttaagtttttgttatcattaggcagtgtcccccttaatgttgagttcctttgttgtgtaatagtttgatatttgcaattggttttgtacagatagtaaagaaacataccagccagtagaggtttcagtttgagagcattcatcttttttcccttactggaggtaggatggaatcaaaacacacaggccttctgaccaggcctggggagcccagcatggacagaattactattcagtaaagctcctgccccagtgagctgtttttaccccagaccacagcttataggagctgcttttacccacgccgagccctatgctttctcaaaa

SEQ ID NO: 46974 - DNA, 1515 bp, Homo sapiens
tttttttttctcttcaaatatttaatcagtttggagacctctgcattccaatccaattgggtaaaaattctaaagaaagcaagattaaggggtcctcaaagaaaacactgggctaaaatggagaggagactgggtttgggaagacagaacatagcatgtgtctgaaggcctttcgaaggaattctacgacatattttttaaaaatactcaaaatgaacaagacagaattaaaccgttatacaaatttaaggacaactgaaacttcttttatggttgaaaataccaggcatggttttgaaacacattctctaaaaacccttcgatcctgctgtggtttgtttacatagccttctctgtgtacgcaaaaagcaaactagctactcccagggttccccgccagctcccgggtctttgcaaagcagtaacacagtgagagaaggagtggaagaggtgaagaagtgacagcaagctgttcacagtctttgaacatagactcagacccccgcaaacctaatctattttctttgaaaatagtggaaataaactgaaggccttgaaaattcaccaacaatcttctatcaggggagcaatgataatactttttgataactgtgtcataggaactgggggtggcaagtcctgcagggtgacaggtctgcaatagtacaggtgagagtcaggaagtcggggctgactcttcggggaaaccgttcagcaggaaatgcctaacgtctgtgtcgctcctcattctctctgttatttcctctccttctcctgtcccttggtgccaatgagaggcagcgtcggaggctccagcccgaggctcagaatgggtactgcgacacatatatccgcagtcggatcacggagctgcctctgaagttgatgacagtgttgacagtgatcatttccaagtccagctggatttccccggggcccctttgatgcgggcgtgtcatcaccagggtggcactgatggggacccgtttgcccgcatgtcaaaattcctcctgcccctcattccccagatttgatctggaaaatgtaataggcccccagggtagcgggtcgtggcttgcatttggaagatgtcagcgggaacggagcgtcctgacaccacgtccatgtcccggtacaagatggtaaagggctggtctctgcagccagggttctcagcaggacacatacagcggttatcactgatcctcagataaggctcctcacagcggatggggtcgatgcatttgaagcccccttgtaaattgtagcacgtctgctgcaggttgcacgtgtggttcctgtgctcacattcgttgatgtcttggcagcttcggttgtcatccagcaggatgtagcctggagggcaggagcagaagtatgtgccgggctggttcacacactcatgttggcagaggaactcagagaagctgcactcgtccatatcactgcaatgaacgccatcttcctcaagttcatatcctgggtcacagcggcagatgaaagagccgtaggtgt

SEQ ID NO: 46975 - DNA, 1203 bp, Homo sapiens
ttttttacattctggaatcatttattaatccaactgggttacttttgaagagttttatggttagactaatatataacaaattgccaatcgttacaggtattacagagaacccagcaggcccctacgggcagagaacagataaagagcttatagactggttgcggctgcaaggagctgatgcaaagacaattgaaaaggtaaatttacaacaaagaaattcttatgctgttgttacacagctgctcagctcttaaggatctgatctttgtttcagattgttgaagagggttatacactttcggatattcttaatgagatcactaaggaagatctaagataccttcgactacggtaagagcctcaaaacagtttgtataagagaatacaactttttatgtgtgaatatgcttcaagagcagaaaacaaagggctgggcctccccccaaactctggagttctattaggttcaagctgggaaaaagccaaggtggggcagaaactgaaagccaggcaagaagtccagaaataggaatgtgaacagagaagagctggcccaatctcctgcccattaatgccctggctgggagtgggtggaggcacatggccacagtgcctgcacgctggacccacccccttctttaaactgcagcctgccttcttgttcccgagtcatttgaaatagccagctctctgcaggtacgtacctctaaggccatgtcctactactgctgggacacgagcgtcacctccatatgtgaggagaatgtttttattttcattaggtttttaaattagggactgcagttttaagctctgttggcttgaagcactgactctgaagacagctgtgtttgtttcccaggggtggtctcctctgccagactctggagtgcggtctcccagtacagaagggctcaggaggcctcagaaaccaaagacaaggcttgataccaatcagctaagctgtggcagagtgtcccaccacgctacatgttttgttaaagcttctgttagtgtatacacgaattccgctgtgtttacatatttaaaaatgccattgttcaattaatagtttaagaacttgttttaaatactgtcctgagtttcttttgaaacctgttatttataaacatagaactgtgtgtattgtgaaaacagtgagccttggttttgactcccggaatattaggaaattcacttgta

SEQ ID NO: 46976 - DNA, 1762 bp, Homo sapiens
atttttccttaacgttggtgccagtcaagcaaagagtattatgatggaaaagaccagtccaagccccatcgctccggagtgggagccagtgttcttgctaattgtttctttctgcactaaccactcagatgtctaatttaattgttttgcagtcaaatactggatttgtaaccttcagggctgacatgctgcccagtttgcttcatcgggagaatagcaacaggtagacacatctcaaggctaaatctgctcatgtcgccactgctctcataatgacacacatgcagtaagaagacttttgtaaggggatttgagtacacccaaatgaaattgtgacaggatgtttgtatggttaacatctgatatcagaatgttaaaagtgccttctgtcttaaatctcaaaccaaatattttgtgtgttgaccttgggcagaagaagtgtccttccctcctttcttcaccgtcaggtagaaaacctgcactctgcagaagggtcctgtgtgatcacttaatcctctggttgagaagcagcagtaatgtttttgcttccaacctgattaatcattttatgttgaaaatagtcaatgagaccagtatctcttgagtgctttatttgccttctctttgaagggaggggacgggctctgctctgtaaactcaaatgtgtagagtcagcaacaattccgtagcttccaactgactcagaattgatgcaacgtaggtcttctggcccgaggccaggtatcaagtccaaatcataatgaacttttcaccagtttcaaccagtttcttaaaagagagcttaagtcaagatttcatcaagacttgtgttttcccatgaatgtgaatctttcaatggctgttggagtatgtatgtactgttcttgcattctgaagtagttaaagaactctagaaagtactgattggccatctggtgtctatggagaaagaagtcctcacgtttgagggctgtacagtgaggccatcttgtagcagcgcatccagctctaccaaggcagtcctctggttcttttttctaagctacagtggaaatggcctaatggttaaaactgtggtatacatgacatcggttgtgctaaacaagttcctcgtgtcccaatatccaatggtttttcatcctattttgtatcaatcaacagagtatagttaaagcttgtcttgatgttgcattcttgcaaatgtcttcaactcttacctgagaaaacatggcaaaatggtcagccagacccttccagtttttcctttgcttttctaagcctcggggaaaccactgtttcagttgtataaaaacttttgccacattcctatggcccagtcgaattaatacccttttctcactgagagaggaacagtactgcctgtcataacagcattgtaatgccagtgtctcagtaacagaatcctggtgggtgttaattgggtgttttttgccctggagaattcagattcctttctatacctccgattctgcccagaagagggggggaatcaccagtgttacaaaattagaagattgttttgcctgttttagactgaatatttgaacactgcagcattactagccaccagtgttaaaggacagatgaggggaaacatttgtttttagcagtaattccatgcttcatcttttttaagtgatttgttccaaatgaagccatttattgacttgatgttcacaaatatcatttgaaagaaataacaggaattggggttagatgataaattctagggaatctaggg

SEQ ID NO: 46977 - DNA, 418 bp, Homo sapiens
  misc_feature (1)...(418): n = a,t,c or g
ggctgatgaaacaccacaaccccagacccagacccagcaactggaaggaacggatgggcctctagtgacagatccagagatacacaagagcaccaaagcagctcatcccactgatgacaccacgacgctctctgagagcgtcntggtgtcatcagtgggatgaactgctttggtgctcttgtgtanctctggttctgtcactataggcccatccgttccttccagttgctgggtctgggtctggggttgtggggtttcatcancctcgtgnnganattcttggcctcgaggggcaanttccctatnnntgantcgnattnaattcgnaatcatgtcatagctgtttccngtgtgnaattgtnatccgnnaccnnctgggcaactgacgncnatgcccnntgncannttaccgtcccag

SEQ ID NO: 46978 - DNA, 1473 bp, Homo sapiens
  misc_feature (1)...(1473): n = a,t,c or g
ttttttttttttttcacagcaaacggagtgccaggcctgtatttcacacctgctcactcactccatggcttagaaaagaacacgtccaccgcggaggccgcaatgcccacctagagcaggtcgtagaagtagtccaggccctggcccagctcccagatagagaccccaacgcccagctcccgggccagctccagccgcacctgcagggacttcagggttgggtagaagacgacgtgcctcccactgcggctcttcttgtactcgaagaagtgctctgagacctggctgtcccacaccatccggggcctgtggtccttcagtgtctggatgtacctggccccgacaacaggctcacgggcatccttggaggtcgcgtagtccataccatagaagttgagccccaggaggattttgcttcgccacttggacttcgggtccaggacctggacgcaggctcgaacccaggacaggggtgcattagggccaggctgatgcgctgtagagtagtcgtaggtcatgaggctgaaaccatccagcacgggggccagctgctcaaactccttgtgcgtgaacatgcccagctggtcggtcccgggggtgatggcaggcgggatgaccaggagggccagcagccgggcctggtgcagagcctcggccaagtgggtgagcatgtggatgaggcccacgcgcttctggcttagcagctggttccagacctccaccacgaagccatcgaaatgctggttctttgccacctggaccacggtcttgctcagctcctctatctcatcctcactgtctaagacgttccggaaatcatcgtaagtccagtcctcaaacaggagccgatgnactatgtgcaggcccttggcatgcttcctgacagctcgcatccacccttggtccacgtcgtggaggcccgtgacctcaaacatctcacggccacgtctcttcagctgcagccagacgggtgagatctgtgtgaacttgctcccaaagaccttggtgacatcgtagccatggctgttccatggagtgacatagcccagtacatccccagcaaagtgtctgtcccgggcctttgccgagcagtagctgcgatgctcaagaaccacactctcagctttgaggtccgtcaccaccaaaccccggtcttgcaccggcttatctgaaaactgactcttctccagcagcgtctttgaggcggcttttttggcatctgactttgacagggtagtgtgaacagggctgcaggccagggcaagccagaggaggttgaagagtgtccgcatggtaggtgtgtcacagtagggtccaacctcggggtccagagggctggccaggctgaaacggtggctgcctcagctcccaggcacccagtctttgaccccagcccattccatgaccactggctccttctctgtcttctgggtggaaatctgcatgtcagggnagccggacggccacaaacgc

SEQ ID NO: 46979 - DNA, 1090 bp, Homo sapiens
tgggtacatttcaaatatattttattactttccatcttagaaagaatatgaaacctgcatgcaatgctaatggtttctgacatgtacatagcatataacacagcagtacaatgcggcatatactggggggcagtgtgtggagggggcgttcttaagggtatatgtacagaggaaagggcgcatggtcatcttagctttcgaaagaggactgcactgtttaacattgaagaattacatggggaatcacaaatatattgctttagtactgcatgttctgttgtggtgagggaaagaaacatgctttgaaggttttcccttgtcaacagaatgtgtgtctgtagctgtgtattgccgcatgtattcatatatttttaagttttctccctaaggtttttgctgacagtgttgggaacctcacatgcttctgaagcattaaaatattgaacctgtgaacctttcagaaatcctcaggttgggaaagaccccacaccttctttaaggatcatttgtctcgccatcacaggatcttggaaatgtttcctagggtgtgtaaaaattaaccaggggggaatgaagcacatttttctggcaaccaaacttgagttcctcagagaacagatgcagagagacctgctccctgcttgccccggctacaggggcccactgtggaagtcacactgaggctgtgaccggccataagccccaggagagcccgtggcagctgtgccgaggcgcccaggacctctaagcggaagcttcccaagctaggaatggagcaacactgcaatgaaatgtgtccaccaagctcattgttcctcccgggcgcttataaagctcagatgtatagtgacgtatggacaaatacaaaaaagcattttttaaaaaggaaaggcatgagttttcccctttttgataaaaagcagcctgtgatgaagtctggagcacaagagagatgggtctcccatctggaagcctttcgcacgcagctataaaatgtaaaaactgaccgttggtaaaaagtgcttcataacaatatataatttgtgtcttatgcctgtgagaaagaaaggcttttttttttttttttttt

SEQ ID NO: 46980 - DNA, 2057 bp, Homo sapiens
  misc_feature (1)...(2057): n = a,t,c or g
ttttaaataaaaatacatacattttattacctattacagtatttactcttctacacacttctcagttcatgtatatacgggaggtttcttacatcctgcatggatgcctgaggttccaccactaaggagtcttgtccctaagtgaagaagtcattaaagctgtttatgtaaagcctgtgtcttggagacagggtgttatctctttatcagtcacatgcattgggtatgaaatggccgattggattggctggcgtgcctgtcactccacactgccctgggaccagacagctttggtgaccgagctggagaggggctccagagctggactgaccctgagaaggctccacctcagagcagcacagggaggagatgaggccccactggtttccctggggccaggcctcatgtcaaattgcagaaacagcctgaggacagagccatggagagctgaggagagggcaggcttgtccattccaacttccatctctgcctctgacccacatctgtggaatcagggcggtgaaccagaagcctctggagtttctcagtgctctgatcccgtgaattcctcctctgtccccgcgatttcacaatgaatggatgcttcccattctcaccaagtgcctgttgaaactttcctcagcctgacaactttcttctgttactttcaaatgatcacaggctcccaggaggaaagtttaggtaaacctctcttcaagtgctgcgtcccaaaagtcccaaagaactgtctacctatgaggcgctctcaggacctgggacgtgtgatcacggtatccggggagcagccagcgctgcgccctggggaggaggaggcgccgggttactggctccgggctgcatcccctcgtctgggtctgtgctgttcctgcacttcataacataattttcctcttattccttaaggctcaacaagtcttctactgctctcagtcactttatcctgggagtcagatgtttgcctggttttttagtgcatgtgaatacctacccaaaattgctctgtgattttcaaaatgctaaattccgtagattctttgagaccagtgactttcactctttcaatccatttccattgggttgaaaggatattgagggggacatgcagcctggaagagccggaagctgacctgccttgccgctctgctttgccgctctgccgctctgccttgatggactcctatggacacaagcaatgccacacagcaccaacacttggacagggacacactgtgattggtgggggcgggggcaaggcaaatcaatacccctctgtaatctggtatgatcacaaggtgaagtcccacaataggtctgcaagccaggaagccaggaagccagtccaagtcccaaaacctcaaaaggagggaagccaacagtgcagccttcagtctgtggccaaaggcccgagagcccctggcaaaccactggtgtaagtccaannnnnnnnnnnnnnnnnnnnnnnnnnnnnnnnnnnnnnnnnnnnaagcatccagcatgggagaatgatgagggccagaagactcagcaagtctagtctttccacattcctctgcctgctttattctagccgctctggcagctgattagatggggcccacccagattgagggtgggtcagcctctcccagcccactgactcaaatgggaactcctctggcaacacctcacagacacacctaggaacaatactgtgaatccttcaatcaagttgacacttaatattaaacatcacaccagggccaaaccttgggagtcctgcctgacttctcacacccacatttgatccatcagcaagtcctacaggctctactgtcaagagcatccagaatctgcttttgctactcccactgcctcacccccgaatcctggccacctcctggaccagcccgcctcacctctctcctgccttttgcagctacctccccttcctgcttctatgcttgtctccctgtgttgtcttttctcaacacagctgctagagcaatcctattaaaatgtaaacaaacaaaaccaaaaataaatgacaattctccttt

SEQ ID NO: 46981 - DNA, 1577 bp, Homo sapiens
ttagccctaccccccctgaacccctccccacccccaactccctcaaaaacacataacagaaaagtctgtgttgagtttagcaaggacaataattaaagaaggtaaagtgaaggctcacagaatgcctcccagtttaagttaaaattccaacatcataacatcagggtgtcaattcattcaacttttaacccatttgagaaggtttaagttattaacttaaaaatatggcagtatttcttttgtaactataatctctttatagcctcttaattgctcatgctaatagctttattacatactactgcttcttataagaagtaaatccaggggccattccattttatcttagacataatatttactagttttccaagcacgacagaaatgaaaaaatatatatattagaacaagaacaatttatgttaatctctacaatctgtgttccttctgcgagcagtgcctgattctactaaaattaacacatttaagttcagtcttatgcttaagaaaaaaaaatctaatgagggactaatttataaagtatacacaaatataattctttaataaatctttccagtgttcactatatctgcattacatgtaatgtttccatccacagaaactcaggatagttcttgtaaaatgaaacagaacattctgtgttcatctctggcaagcaatgaacaaatagaacttgctcacaaaggatctaaaagtgctgcctcaggaacataaactacgtgctatatgaatgagtcttggttaactggctactatctgggatctcttcctctgctcataccactgaacccatctcttataaagcctatgagaaaatgaaagctattgcagaagtgaaattcaacatgagccacccaaattcttctaaggtaaccattctaaagcaaaatcagcagaagtcatctcttctataataacaaacaaaaaacccaaaaggcaaatgctactgctcaatcatcagatgaactcacagaggcaaaaatatgtgacaacagcaataattcaagtaaagtatgtatgaaaatttaaacacgccatgttcaagttaagacagaagtgaaggggagctatgatctttatattagtcaaaaaagctaggcataatcaccaaatgttaattcactttacagtcatcaatgagactattgtatatatttttgcaccttgcgcttgtaaaagcagataaaatatttaatatgtaatttacaatgtattttaccagctcagcatacaggatgtatacagattatatcaaagtagtagacagttacgggcctgtgcaaaccctgcaaaaatagtacttcagatatctgctaattaaaaacaaaaacagtttgctgtttagaagtgatacaatttcaactaccacaaaatacaaagggctgcaaaaatgtaaccattccaacaacatatataagttattaaataaagatttgatttgaaagaatataaatgaagactttaagtaggtcttttctacatgcatattattcctcattaaagaaaaaatatgtaaaaaggccattggtaattgctttgttaacatttgtaggccg

SEQ ID NO: 46982 - DNA, 1340 bp, Homo sapiens
gcagaagtcgcaggcagcctctcagaaagtttcacccccagaggacgaagaggtcaagaaccttgcagaaaagttggccaggttcatagcggacgggggtcccgaggtggaaaccattgccctccagaacaaccgtgagaaccaggcattcagctttctgtatgagcccaatagccaagggtacaagtactaccgacagaagctggaggagttccggaaagccaaggccagctccacaggcagcttcacagcacctgatcccggcctgaagcgcaagtcccctcctgaggccctgtcagggtccttacccccagccaccacctgccccgcctcgtccacgcctgcgcccactatcatccctgctccagctgcccccgggaagccagcctccgcagccaccgtgaagaggaagcggaagagccggtgggggcctgaagaggataaggtagagctcccacctgctgaactggtgcagagggacgtggatgcctctccctcgcctctgtcagttcaggacctcaaggggctcggctatgagaaggggaagcctgtgggtctagtgggcgtcacagagctttcagacgcccagaagaagcagctgaaggagcagcaggagatgcagcagatgtacgacatgatcatgcagcacaagcgggccatgcaggacatgcagctgctgtgggagaaggcagtccaacagcaccagcacggctatgacagtgatgaggaggtggacagcgagctgggcacctgggagcaccagctgcggcgcatggagatggataagaccagggaatgggccgagcagctgacaaagatgggccggggcaagcacttcatcggagacttcctgcctccagacgagctggaaaagtttatggagaccttcaaggccctgaaggagggcgtggagcctgactactcagagtacaaggagttcaagctgactgtggagaacatcggctaccagatgctgatgaagatgggctggaaggagggcgaggggctgggctcagagggccagggcatcaagaacccagtgaacaagggcaccaccacagtggacggcgctggcttcggcattgaccggccggcggagctctccaaggaggacgacgagtatgaggcgttccgcaagaggatgatgctggcctaccgcttccggcccaaccccctgaacaatcccagacggccttactactgagtgttctggaaatacatactttctgaatgaccaaccgtccctggactgtggaatgttccggcctgcatttctgcccaccccttccgttgtcacgagtgccgtgccgtgtaataaagtcccagtgctcatccacaaa

SEQ ID NO: 46983 - DNA, 2953 bp, Homo sapiens
aaatccgatttgatatatcggactggacctaaatctacgtatatttcatcagcagctgataacatccgaaatcaaaagcccaccatcttagctggcactgcaaatgtgaaagtaggatctcggacaccagtagaggcctctcatcctgttgaaaatgcatctgttcctaggccttcatcccattttgtgcgaagaaaaaagtcagaacctgatgatgagctgctgtttgattttcttaatagttcacagaaggagcctaccgggagggtggaaatcagaaaggaaaaaggcaagacacctgtctttcagagctctcagacatcaagtgtcagttctgtgaaccccagtgtaaccaccatcaaaaccattgaagaaaattcttttgggagccaaacccacgaagctgccagtaactcagattctagccatgaaggtcaagaggaatcttcaaaggaaaatgtgtcatcaaatgctgcctgccctgaccacaccccaacacctaatgatgatggcaaatcacatgaactgtctaaccttcgactggagaatcagctgctgaggaatgaagttcagtctttaaatcaagaaatggcctcgttactccaaagatccaaagagactcaagaagaattaaacaaagcaagagcaagagttgaaaagtggaatgctgaccattcaaagagtgatcgaatgactcgaggactccgagcccaagtagatgacctgactgaagctgtggctgcaaaggattcccagctggctgtactgaaagtgagactccaggaagctgaccagctactgagtactcgcacagaagcattagaggccttacagagtgaaaaatcacgaataatgcaggatcaaagtgaaggtaacagcctgcagaatcaagctctgcagactcttcaggagagactgcatgaagcggatgccactctgaagagagagcaggagagctataaacagatgcagagcgagtttgctgcacgccttaataaagtggaaatggaacgtcagaatttagcagaagcaattacactggccgaaagaaaatactcagatgagaagaagagggttgatgaactgcagcagcaagtcaagctgtataagttgaacttggagtcctctaagcaggaattaattgactacaagcaaaaagctactagaatactgcaatctaaggaaaaattgattaacagcttgaaagaaggctctggttttgaaggcctagatagcagcactgccagtagcatggagctggaagaacttcggcatgagaaagagatgcagagggaggaaatacagaagctgatgggccagatacatcagctcagatccgaattacaggatatggaggcacagcaagttaatgaagcagaatcagcaagagaacagttacaggatctgcatgaccaaatagctgggcagaaagcatccaaacaagaactagagacagaactggagcgactgaagcaggagttccactatatagaagaagatctttatcgaacaaagaacacattgcaaagcagaattaaagatcgagacgaagaaattcaaaaactcaggaatcagcttaccaataaaactttaagcaatagcagtcagtctgagttagaaaatcgactccatcagctaacagagactctcatccagaaacagaccatgctggagagtctcagcacagaaaagaactccctggtctttcaactggagcgcctcgaacagcagatgaactccgcctctggaagtagtagtaatgggtcttcgattaatatgtctggaattgacaatggtgaaggcactcgtctgcgaaatgttcctgttctttttaatgacacagaaactaatctggcaggaatgtacggaaaagttcgcaaagctgctagttcaattgatcagtttagtattcgcctgggaatttttctcccgaagatacccccatagcgcgagtttttgtaattatatatatggctttgcttcacctctgggtcatgattgttctgttgacttacacaccagaaatgcaccacgaccaaccatatggcaaatgaaccaagcccagttgttgcagtgattggttgtctttttctagacttgggatctgcaagaaggccaattgcctaaaatttctgagaacagtgcacaagattattttatcactacaagcttttaactttttaagttattgtacaagtattctacctaaatcttccaatttcctttaaatggtaagagtttctaaaacagacaataatttaacaagctcagctctgctttatctgagtttagtggtcctaatatatatgtagagaaagatggtggggttgttcacctctgtacagaccatctgtatgttaggtgacattgattatgggttataatcagggaaactaattgtatttagtgacaaaaataaaaagttttttttttataattcagtctgcttttggattttcatatatttaactttgcaaaaagatttactttgtacatgttacaggcttgattggtgtaaatctttttataaatacataaataaaagaaaaatatgcatttttcttttctaaaataatggtttttcatccccattaaacaagacctttccagacggactttagtgagtagagccagacagaaagcagctgaagtcacttgtaagtaattcttagtgtttgccacttcttcccaatggatgctcctgtcttcccctttccagctccctgtgctgtcttccttggattcttactcactcattgccttccttttctccagcctatatgttgagttagctcgtgatatgcataacccctgcttgtagtgtttaggaatcaaacctgccttagcaacctatgcttttttaaggtactctagtgcagagatattattcgaaatgagacattttctttgaaaatgtccattgtattgtctcctttatattgggccaatgtat

SEQ ID NO: 46984 - DNA, 1415 bp, Homo sapiens
tttttttttttttttaattacttctttttattagacagttcaaattaagcttgaagaacaggaagcaatacaactcaactattgaaatacaaatagttgagcttaatttattcaacaaaatttacccaatatatcagtgtacaaagcatgctgctgggctgggcatcaggcgtggcacagcaaacaagacagactgactcaaccctcagggggcttacattctaatgcagaaagcagataatttcagtttggatacataatacaaattatccaaagcaaggcgcaaagtattttaaaaataaggggtttgggaggccaagatctgacctattctgtagaaggactccttaggaaagtaacagttgagccaatctaaggatgctagatattcagtaggtcagtggaaaaaatcagtggttctcactgtggtcagtgggttattggtggtttcataataactggggactactcccagcactgagtggatgcagccagggagaacgatgtcctgcagtgtgtgggttagtgccacacaacgaagaattattctgtaccctgtacgactgtctaatgtcctgctggacatttaggtaggacctacagcttgtccgagagagtaactcatttgttttctctgagacaatctgtaatttgtcttgtcctattatccttaagtaaggtaatttcgctctttcttttccccatatacagattatgtacatagtctgttttgtctttaccctaacactggttttcattctagtgtcccccacccgtctagtttcattttcctgtacttgtttacaggaagtagcctctaatcggctcttaaatccaaacctactcattacaaggaagagtaaacatctgtctgtttcaaacagcgtagtcatgcctgagcgtttacataatgaaattcatcttcttttcattataaatttcttcttttctatttctccttaataagagagttagggcattaaattgatttttttaagaaattcatgtgtgtaagtagattgtattatctatgagtcatttcaggtcagcaaagagaatgttacaaaatatctgctctgaaaaaggtgaatagatctgatagggtttgtggttgtcaccgtgactgggcgtgggggtgggggcgctactagcatttagtatgtgagagccaagtatgcagaacatcttgcaatacattggacagttcctcacaataagaaattactctgcaccctatacgaattttgaatgtctcactagacattcatgtatgacctatagctcgtctgcaagaatatatcctcattttctccacttcgacaactgtacattttcttgcatagtatctttatttcaataaaggttatttcgttctttctcttatatacaaataagtattgtcatatgcaaagaag

SEQ ID NO: 46985 - DNA, 360 bp, Homo sapiens
  misc_feature (1)...(360): n = a,t,c or g
gtcagcttttagcaacgtgttatgataaacacttcttctgttaatgtccatcagctctttctggtatgtgggctctattaatattccagttgtcacagctcattgtgagtctcctttcacctgagtgcttccttagtttttattgccactgatggctggatgtcagcttcctgaagtggctccttcaaatgaattccctttttttttttaattcatagatgcaagtagagataggtaagcgcatgcgtacacacacacatacacacacaccccccacattatgagaggtaaaattaatgcagttgtaacaaaggaatacttaaanggaaaaattaaagtttgaaaaccttgttgttaaaa

SEQ ID NO: 46986 - DNA, 2067 bp, Homo sapiens
atcaccagagcccttgaggaacacaggttgagacggaagctagaaaaaaatgtttctgtgatgacgatgatcttcaaggagtcatcccccagccacccaactcgttgccacgaagacaatgtggtagtggctgtggatagtaccacaaacagggttctccattttcagaagacccagggtctccggcgttttgcatttcctctgagcctgtttcagggcagtagtgatggagtggaggttcgatatgatttactggattgtcatatcagcatctgttctcctcaggtggcacaactctttacagacaactttgactaccaaactcgagatggactttgtgcgaggtctcttagtgaatgaggagatcctagggaaccagatccacatgcacgtaacagctaaggaatatggtgcccgtgtctccaacctacacatgtactcagctgtctgtgctgaggtcatccgccgatgggtctaccctctcaccccagaggcgaacttcactgacagcaccacccagagctgcactcattcccggcacaacatctaccgagggcctgaggtcagcctgggccatggcagcatcctagaggaaaatgtgctcctgggctctggcactgtcattggcagcaattgctttatcaccaacagtgtcattggccccggctgccacattggtgataacgtggtgctggaccagacctacctgtggcagggtgttcgagtggcggctggagcacagatccatcagtctctgctttgtgacaatgctgaggtcaaggaacgagtgacactgaaaccacgctctgtcctcacttcccaggtggtcgtgggcccaaatatcacgctgcctgagggctcggtgatctctttgcaccctccagatgcagaggaagatgaagatgatggcgagttcagtgatgattctggggctgaccaagaaaaggacaaagtgaagatgaaaggttacaatccagcagaagtaggagctgctggcaagggctacctctggaaagctgcaggcatgaacatggaggaagaggaggaactgcagcagaatctgtggggactcaagatcaacatggaagaagagagtgaaagtgaaagtgagcaaagtatggattctgaggagccggacagccggggaggctcccctcagatggatgacatcaaagtgttccagaatgaagttttaggaacactacagcggggcaaagaggagaacatttcttgtgacaatctcgtcctggaaatcaactctctcaagtatgcctataacataagtctaaaggaggtgatgcaggtactgagccacgtggtcctggagttccccctgcaacagatggattccccgcttgactcaagccgctactgtgccctgctgcttcctctgctaaaggcctggagccctgtttttaggaactacataaagcgcgcagcccgaccatttggaagcgttagcagccattgaggacttcttcctagagcatgaagctcttggtatttccatggccaaggtactgatggctttctaccagctggagatcctggctgaggaaacaattctgagctggttcagccaaagagatacaactgacaagggccagcagttgcgcaagaatcaacagctgcagaggttcatccagtggctaaaagaggcagaagaggagtcatctgaagatgactgaagtcacactgcctgctcctttgggtgtgattgagtgccctcctggctcctgggctgggacaagtgaggaactagctgcagagggatgagtgaccaccatccaggctgagactgaaaggagcagaggctggaactacagtattctttcccctgctagcaaccatgtgcctcccatcctgactgtggagttgggatgtggaagtggggctggaacaaagcttctgcctagggaggagctaagcaggcccggcagttggaggaaggccagaggaacagctttgtgctccggctttccctcagggaacagcagagagcagttggctctttctgctgcttgtatatgttaatattaaaagagagagtggtgtaaaaaaaaaaaa

SEQ ID NO: 46987 - DNA, 2043 bp, Homo sapiens
aggggactctcttctccccgcttgtctctggcccctgcagaggcttggaaggccaaaaagaaagcaggagctgcagcatgccaacagttccccactgctccggggcagccactccttggagctccgggcctgtgagttaggaaatagaggttccaagaacctttcccaaagcccaggagctgtgccccaagctctggttgcctggcgggccctgggaccgaaactcctcagctcctcaaatgagctggttactcgtcatctccctccagcacccctctttcctcatgaaactcccccaactcagagtcaacagacccagcctccggtggcaccacaggctccctcctccatcctgctgccagcagcccccatccccatccttagcccctgcagtccccctagcccccaggcctcttccctctctggccccagcccagcttccagtcgcctgtccagctcctcactgtcatccctgggggaggatcaagacagcgtgctgacccctgaggaggtagccctgtgcttggaactcagtgagggtgaggagactcccaggaacagcgtctctcccatgccaagggtccttcaccccccaccacctatgggtacatcagcgtcccaacagcctcagagttcacggacatgggcaggactggaggaggggtggggcccaaggggggagtcttgctgtgcccacctcggccctgcctcacccccacccccagcgagggctccttagccaatggttggggctcagcctctgaggacaatgccgccagcgccagagccagccttgtcagctcctccgatggctccttcctcgctgatgctcactttgcccgggccctggcagtggctgtggatagctttggtttcggtctagagcccagggaggcagactgcgtcttcatagatgcctcatcacctccctccccacgggatgagatcttcctgacccccaacctctccctgcccctgtgggagtggaggccagactggttggaagacatggaggtcagccacacccaactggctgggaagggggatgcctccctgggcccccttgactctcagatctcttcccagagaagtcagctccactgtcgtatgcccaaggctgggtgcttctcctgtagattactcctgaaccgtgtccctgagacttcccagacgggaatcagaaccacttctcctgtccacccacaagacctgggctgtggtgtgtgggtcttggcctgtgtttctctgcagctggggtccaccttcccaagcctccagagagttctccctccacgattgtgaaaacaaatgaaaacaaaatttgagcaaagctgacctgggagccctcagggagcaaaacatcatctccacctgactcctagccactgctttctcctctgtgccatccactcccaccaccaggttgttttggcctgaggagcagccctgcctgctgctcttcccccaccatttggatcacaggaagtggaggagccagaggtgcctttgtggaggacagcagtggctgctgggagagggctgtggaggaaggagcttctcggagccccctctcagccttacctgggcccctcctctagagaagagctcaactctctcccaacctcaccatggaaagaaaataattatgaatgccactgaggcactgaggccctacctcatgccaaacaaagggttcaaggctgggtctagcgaggatgctgaaggaagggaggtatgagaccgtaggtcaaaagcaccatcctcgtactgttgtcactatgagcttaagaaatttgataccataaaatggtaaagacttgagttctgtgagatcattccccggagcaccatttttaggggagcacctggagagatggcaagaatttcctgagttaggcagggatcaggcattcattgacactcagggagtgtcacacatttctgttctgcaattaaagggagaatgaggttcatccaccaaattttaagcagaatataggaagggcaggggtggggagtttcagggtctgctggtcctgggca

SEQ ID NO: 46988 - DNA, 1721 bp, Homo sapiens; identical to SEQ ID NO: 1862

SEQ ID NO: 46989 - DNA, 366 bp, Homo sapiens
gcattcacctctgcccagcaggacaagatgatgaaagatacagagaacttgtgggtctaggtttgtgtcagaaaggaggttagtggcttgcttagggccaggcagagggcacattggaaggaattctctgttcccggtgacagcccttggaattgctgtgcacccagagttgcggagtaatttattggcttctgataactatagtattgggataacttcccaacattttattaaaaattttaaacatataggcatgttgaaagaattaatactcaccacctggattttggccactatccacatatctgtggcatcctattaatacatttttaattattatttttttgaggacgagtttcttttact

SEQ ID NO: 46990 - DNA, 925 bp, Homo sapiens
ctggagccgacagacggtaagctgggggtgaaggccatgccgcctcctgggaaagttccccgaaaggagaatctgtggctacagtgtgagtgggggtcctgctcctttgtgtgctcaaccatggaaaagttctttgagcatgtcactcagcacctgcagcagcacctgcatggctctggggaggaggaggaagaggaagaggaggatgacccacttgaggaagaattctcctgcttgtggcaggaatgtggcttttgttctctggacagttctgctgacctcatccgccatgtctacttccactgctaccacaccaagctgaaacagtgggggctgcaggctttgcaaagccaggctgaccttggcccctgcatcctggacttccagagccggaacgtcatccctgatatccctgaccacttcctgttgtctgtgggagcactgtgagaattccttcgacaatcctgagtggttttatcggcatgtggaagcacacagtctgtgctgtgaatacgaagcagtcggcaaggacaacccggtggtgctgtgtggctggaaaggctgtacctgcaccttcaaggaccgcagtaaacttcgagagcacctccgcagccatacccaggagaaagtggtagcctgccccacctgtgggggcatgtttgccaacaataccaagttcttagatcacatccgtcgccagacctcattggatcagcagcacttccagtgttctcactgttccaagagatttgccacagagcgggctattgcgggaccacatgcgcaaccatgtgaatcactataagtgccctctgtgtgacatgacctgcccgctgccttcctccctccgcaaccacatgcgctttcgtcacagtgaggaccggccctttaaatgtgactgttgtgactacagctgcaagaatct

SEQ ID NO: 46991 - DNA, 495 bp, Homo sapiens; identical to SEQ ID NO: 1867

SEQ ID NO: 46992 - DNA, 521 bp, Homo sapiens
  misc_feature (1)...(521): n = a,t,c or g
aacagctatgacatgattacgaatttaatacgactcactatagggaatttggccctcgaggccaagaattcggcacgagcaaattctttgttggttatgtgtgatttaacaaagtaccttttttggcttatatttttgtgcttaagaattttttcttacctctcattcataaggataattcacccaaatttccctataaaagtggaataattttgccttttagaagcctggagttgattctgtggatttttggagaagggatttaattatatttattttccatgtggggaaccctctgtcccacagcgacttcataagaagtctttcctggacaggcacggtggctcacacctgtaatcccagcactttgggaggccgaggagggttgatcacgaggtcaggagatcgagactgtcctggctaacacggngaaaccctgtctntactaannatacnnnnnnatactgggcgtggnggcngacgcctgnggnncantctnnngangctgnngcnnganaatg

SEQ ID NO: 46993 - DNA, 528 bp, Homo sapiens
  misc_feature (1)...(528): n = a,t,c or g
actgcttgacatgattacgaatttaatacgactcactatagggaatttggccctcgaggccaagaattcggcacgagcagctgccaagtgcaggaccagacaagaacctggtgactggtgatcacatccccaccccacaggatctgccccagagaaagtcctcgctcgtcaccagcaagcttgcggggtaacctgagcccccctctcctccccttcctcaaccactggacgtttatatattataggcagggatgaaatgggcacctagtcagatcttctcagcttgctagccagaaatgactgtgattctgctgggggctgctgagaaggtaatgtaggttgaaaaggggctctaagtttatttatttcgttagattgacacttccacacactccctgtagtccaggtagggcccagaaataggaaaggctaggattggataatgctgcaaatgctttttttgtgtgagaaactggagagatgtgatttctccttttgggagagaatgtccaaaantgattaagctga

SEQ ID NO: 46994 - DNA, 843 bp, Homo sapiens; identical to SEQ ID NO: 1870

SEQ ID NO: 46995 - DNA, 2356 bp, Homo sapiens
cagtgtacccttagtgaccagttgctacccaagcattgtgccaaaactatcagtcaagcagtgaataagaaatcaaaaaagcagactggtaagaaaggggaacctgaaagggagaaaccaggtgttgagagcatgaggaaaaacaggctggttgtgaccaaccttgataaattgcacactgcactttctgagttatgcttctctataaattatgtaccaaacatggtggtatgggaacatacctttaccccacgagaatatttgacttctcatctggaaatacgctttaccaagtcaattgttgggatgactatgtataatcaagccacacaggaaattgcaaaaccttcagaacttctaacaagtgtaagagcatacatgaccgtactccagtcaatagaaaactatgtgcagattgatattacaagagtatttaataatgtgcttcttcaacaaacacaacatttagacagtcatggagagccaaccattacaagtctatacacaaattggtatttggaaactttgttacgacaagtcagcaatggccatatagcatattttcctgcaatgaaagcgtttgtgaacttacctacagaaaatgaattaacattcaatgcagaggaatattctgacatatcagaaatgaggtcattatcagaactactaggcccatatggtatgaagtttctaagtgaaagccttatgtggcatatttcatcacaagttgctgaacttaagaaacttgtggtggagaatgttgatgtgttaacacaaatgaggaccagctttgcacaaaccagaccagatggctgcactgtttaaaagattatcatctgttgacagtgtcttgaagaggatgacaataattggtgtaattttatccttccgatcattggcacaagaagcacttagagatgtgttatcctaccacattccttttcttgtaagttcaattgaagattttaaggatcacattccaagggaaactgatatgaaggttgcaatgaatgtgtatgagttatcatcagctgccggattaccttgtgagattgatcctgcattggtcgtagctctttcttcacaaaaatcggaaaacattagtccagaagaagagtataaaattgcctgccttctcatggtgtttgtggcagtttctttgccaacactggccagtaatgtgatgtctcagtacagccctgctatagaagggcattgcaacaacatacattgcttggccaaagccattcaaccagattgctgcagctttgtttacaattcacaaaggaagcattgaagaccgtcttaaagaatttctgggcgcttgcatcctccagtctactgaaaattggccaggagacagataaaactacaacaagaaatagagaatctgtttatttactgctagatatgattgtacaagaatctccattccttacaatggatcttttggaatcttgttttccttatgtcttgctgagaaatgcataccatgctgtctacaaacaaagtgttacatcttctgcataaaattacctacttaatcaagataagcacgcatttttgttgccttggttttacctgtagactgtggaactattttaccttaagacctgaaaaagttttgtggattataaatttctttcatacggttgtattttctgatcattggtttcttaatatggttgtactacagtatacttggttgatttaggttgcacattcactgaattcactgagattattcctataattttaaagtatcatttatttgaaaaacatacattatcaacatgtttttgatatttgataatgaaaaaaatctttgcttgtttatttctgaaaaagaactgtatttagtgattattttagatagtgatattatagcattcatctgtgtgtaaattatttcatatagggaagagttctgatctgtacctatggttcttattgaaaacaacattggatgtgcatttctgtggatgttatgaatacatttctactttattttgaaacatttgccaaactaaatactgtaacactgtataacatttaaaaatgttaaagaactgcttagtattagaagcagatcatttcccaaaactctaagagcagcagcatatgttgttgcttgtataaagcctagcgataatttttagactaacttccatggtgccctgttggcattagcactaccattgtaccctgctgtataataaacaatcttagacatttatcaactgttgatacaaatgttagtccctaaccactttttatatatgttttaaatttttgaaattcaagtgtaccttccataacataaaataaacactagactgtatcacaaaaaaaaaaa

SEQ ID NO: 46996 - DNA, 835 bp, Homo sapiens
ttttttttttctgggttgggttttttcatgggtttttgttttgtttatttcgaatactgaaaaagtcctttgggctctgtggggttccccacgctcacggctcctttctcccacactcactgcccttcttcccacagcaaatctatttcaaggacagtactttttaaaatgattaatgttgagttctcaactagctctgcagaactagaggagctgtttgcatctgtctgtgcggatggagtttcttttatctgacaccaggtctccaaccacactgaaacaaggcatttatctacagagctcaactagaaccccttttcattaggctactccacttccttcccctcatacctaccccacatcagccacgtggttaagaaggatagtcaggaatgtttttaccaactccaagccctaattcatactcctccatatctcccaccccaccctttcaaccccacccccacccccagaatttcattgatatttctcccaactgttatttggaaaaaaggtaaaacaaaaaaggttcaaggtcttggtgctcagcccaaggggctccatgtgctgggacaccaacaggaaagggcttctgcctctccagcccacacccgagccacctcctgacccctggctgcaaaagcaggaaggggcaggagccagcacaggacccgggtggggcagggaggggaagcgtctcaggatctggcagagccccgggcagcatcattcaacttggccacccgcaagcttgctggtgacgagcgaggactttctctggggcagatcctgtggggtggggatgtgatcaccagtcaccaggttcttgtctggt

SEQ ID NO: 46997 - DNA, 600 bp, Homo sapiens
gtattttagtgagaaatataatttagtagattatggcagcctttcacatttccctattcggaaggggactgcatgaagaatctaaaataacttgaacaggaaggaaattagagctggggaatttttttttttccccttaaaaggccagattcctaagttagggaattttatttgtatgcatataccacaccttattgcagtaaagatatatggatgcttataaggaggaagtgttagaatgttgtaggatttcagccttgtacccattttacattagagttaaccttagacctgagtgctcccatgtgtgggtgccctccttgcttggggatgcgatctgccaatatttgcctcagttttgtcacccactctctatgggtacacacttctgtgctttgctctatcccagcagttattttgtccttgggttaacagttcctaaaaaaaatgacatattccatggtaaaattgaagtccatataaatggggtaatatgtgaaattcttttctcaccgctatgtttgtgagatttattcatgtgttctatgtagctgttcttttttgagcatttttgtttattttatgaatacaccatatgtg

SEQ ID NO: 46998 - DNA, 429 bp, Homo sapiens
gctatgacatgattacgaatttaatacgactcactatagggaatttggccctcgaggccaagaattcggcacgaggtgacagagacaggagttcaagagacagatcacctcgtgacagagatcggaaagataagaagcggtcctatgagagtgctaatggcagatcagaagacaggaggagctctgaagagcgcgaagcaggggagatctaactagctgtgtacatttcttcagtccttaagcttcctacggagttacgtactattgtttagttcacagctgttcagggtgacagtgagcagatccagacaccagatccagctaggctagatgtacagtatctaacttgatctgaactgaacctgttttccttgatgatgcctaaaactacatccatagtttctggtgaacctgtaatacagttctgaa

SEQ ID NO: 46999 - DNA, 1705 bp, Homo sapiens
cgtcgaccttatttaacagcttgtactttattacatatgcaaccttgccatgcctgccagttaactcccctcccgccaatgttatcctcatgatatcagctccctcttggggccactgagctgcccccctttccttctgggctggagtagtggtgcccctcaagcaggcaatgggcagggggagatccacaattaatcgtcgcagttctcttaaaagtattaacacttaaataagcactcttggggagttgcaaaggatattcaggatgggatgcagtgggaggctacccctcatccaaggtacaggctggaatgagctacagctgggtctatcgtgggcctcagaaggtgaagagggaccgtattctggggcttagtgtgggtggggcatatcctccccaaacttgttctggtgggcgatgttcttcacatctagggagagcctggtggtggacataggcctgacagtagtaacaccaggctgacaggtcgatgtagctgaggaccagcgggtgtccagaatttccatggtgttggagcatgtggccattgatgtaacgaccacagtagacctgatagcaagagagacacacccaattctcttggattgttccacagtccccacaaggttgggtcacgtctaggcctgctgcaggtatggggcatactgccaccaaatggggacaccagggcagtggtgtcacagcataaaatatggcctgatcagtgaggcccctagatccctgcatcagcatcgaatcagccatgtcctgacctccagctgcctctcctagtaggttctcctctcctggggcctgagattctgaggccccctgagattcgctgcctagctccaaggtcctgagactcccaatcagtgtactgggagatatctggggtgtagttccctgcacaggtgaggttgggggggtctggtggtctgtgctcgaggctagaggagtttggatcagctcggtgccccctggagcctcctctgacgtagtctggtccagtgtggctccctccatggctgcctccgaggtggtctgggccagtgtagctcctcctacagcctcctctgaggtagtctggcccagcgtggctcccccaacagcatcctctgaggtggtctggtccagaatggctcctcccacagtctcctctgaggtggtctggtccggagtggctcccccgacagcctcctctgaggtggtctggcccagcatggctcccccaatggctgcctcagaaatggtctgggccagagtggctccccctgtggctgcctctgagggctggtcctgagtgagggccaccacagctgtctctgagttagtctggcctggagtggactcttccccaaatgatgccgaggtgactttccccatgcctgcttccagaaccttcttttctcgtgtggtcatccgctcagctaacctaggtttggctggttggggtgccttcttggtgaccaacttagaactggagggtccttctctgtcttctaccttcatgacccgtaaactgcgccagtatctgcgatggacttggatggtctcagtgattgaggccagggcccctgatagtgggggccgtggcagggtcagcaggggtggtgggtctccaaggagggagcgagtgcaggcagccatggactctgagatggatgtcaggttatagccaccctctaggataaggataatgc

SEQ ID NO: 47000 - DNA, 1449 bp, Homo sapiens
gggcgtacggcatgcgccggtggcagtgatggagcggcagcagcagcagcaacagcaactgcgaaacctgcgtgacttcctgttggtctacaatcggatgacagaactctgcttccagcgctgtgtgcccagcttgcaccaccgagctctggacgctgaggaggaggcctgtctgcacagctgtgctggggaagctggatccattccaaccaccgcctcatggccgcttacgtgcagctcatgcctggccctggtacagcgccgcatcgcagactacgaggctgcctcgggctgtgccagggcgttgctgctgaacagcctggggtctctccatcaggcagctagccatacccaaccccaggaaggaaggccttggatggaccctcagattgaaggacccggtggacctttggggttggtgaatcctaaaacagagagaattcgaggttgcctgaaaagctgggtgtccttgctccttttcctggaagccaatatacccagtttttactcagtttgaattatattctgggcaaagaagctttgcctactttattggcacaatccgttgttctgtcgtttagtgcatatctgctggcttaagccttggcagctgagaaattgttttctatatgtagaaggaaaacctgagcatttgcaggcatctggttaaagcagggtctgtgtgtacaattttaaaacgggtaatatgtcatgctcttagttcatcttcacaacaaaactatgagtaagcggtattagcctcacttaacagatgaggaagcaagattccagaaagtaccagaaggtcattttatacaacaggagattggttcctgcccagatgacagaaaatgggagctctgtctagttgtccttaagtctgactgacttcagtggctcataaccgtgagccaagtatttgttggttcataactgttgttttgtgaactatgtcttacatgtctagagttctgctggatctagggaaaggaggagctatcgaagtacaacggatcaaaaaaccacagggcttttgggcactgcctccttgggaagttagtggccacagaagagagatgaaacctgtaagaagtctggagtcttttggaacttcagccatttccccaggttgttactttcttagtatgtacagtcttctcaggatgagcagtaaaacctttgaacaaaggtctgtgtggttgtcttcacgggcaatcaggaagggagagagctggggaccatattctgcaatgcagccaaatccgaggaagagaaactgaagggagaagtagatggcaatggttatgataaaaagggataaaactaaatcttcgggacttctttaatgctacgttaatgtttcactgctcgtctagaaactcctaaatccagctttctatcatctgccccacattggtccccttgagtacattctgtgatttctaattc

SEQ ID NO: 47001 - DNA, 4259 bp, Homo sapiens
ctgctgcagtgaggtacagcggcggtttctgaggttcttcactcgcgactgacggagctgcggtggcgtctccacacgcaaccatgaagttgaaggacacaaaatcaaggccaaagcagtcaagctgtggcaaatttcagacaaagggaatcaaagttgtgggaaaatggaaggaagtgaagattgacccaaatatgtttgcagatggacagatggatgacttggtgtgctttgaggaattgacagattaccagttggtctcccctgccaagaatccctccagtctcttctcaaaggaagcacccaagagaaaggcacaagctgtttcagaagaagaggaggaggaggagggaaagtctagctcaccaaagaaaaagatcaagttgaagaaaagtaaaaatgtagcaactgaaggaaccagtacccagaaagaatttgaagtgaaagatcctgagctggaggcccagggagatgacatggtttgtgatgatccggaggctggggagatgacatcagaaaacctggtccaaactgctccaaaaaagaagaaaaataaagggaaaaaagggttggagccttctcagagcactgctgccaaggtgcccaaaaaagcgaagacatggattcctgaagttcatgatcagaaagcagatgtgtcagcttggaaggacctgtttgttcccaggccggttctccgagcactcagctttctaggcttctctgcacccacaccaatccaagccctgaccttggcacctgccatccgtgacaaactggacatccttggggctgctgagacaggaagtgggaaaactcttgcctttgccatcccaatgattcatgcggtgttgcagtggcagaagaggaatgctgcccctcctccaagtaacaccgaagcaccacctggagagaccagaactgaggccggagctgagactagatcaccaggcaaggctgaagctgagtctgatgcattgcctgacgatactgtaattgagagtgaagcactgcccagtgatattgcagccgaggccagagccaagactggaggcactgtctcagaccaggcgttgctctttggtgacgatgatgctggtgaagggccttcttccctgatcagggagaaacctgttcccaaacagaatgagaatgaggaggaaaatcttgataaagagcagactggaaatctaaaacaggagttggatgacaaaagcgccacctgtaaggcatatccaaagcgtcctctgcttggactggttctgactcccactcgagagctggccgtccaggtcaaacagcacattgatgctgtggccaggtttacaggaattaaaactgctattttggttggtggaatgtccacgcagaaacagcagaggatgctgaaccgtcgtcctgagattgtggttgctactccaggccggctgtgggaattaattaaagaaaagcattatcatttgaggaaccttcggcagctcaggtgcctggtagtggatgaggctgaccggatggttgagaaaggccattttgctgagctctcacagctgctagagatgctcaatgactcccaatacaacccaaagagacaaacgcttgttttttctgccacactcaccctggtgcatcaggctcctgctcgaatccttcataagaagcacaccaagaaaatggataaaacagccaaacttgacctccttatgcagaaaattggcatgaggggcaagcccaaggtcattgacctcacaaggaatgaggccacggtggagacgctaacagagaccaagatccattgtgagactgatgagaaagacttctacttgtactacttcctgatgcagtatccaggccgcagcttagtgtttgccaacagtatctcctgcatcaaacgcctctctgggctcctcaaagtccttgatatcatgcccttgaccctgcatgcctgtatgcaccagaagcagaggctcagaaacctggagcagtttgcccgtctggaagactgtgttctcttggcaacagatgtggcagctcggggtctggatattcctaaagtccagcatgtcatccattaccaggtcccacgtacctcggagatttatgtccaccgaagtggtcgaactgctcgagctaccaatgaaggcctcagtctgatgctcattgggcctgaggatgtgatcaactttaagaagatttacaaaacgctcaagaaagatgaggatatcccactgttccccgtgcagacaaaatacatggatgtggtcaaggagcgaatccgtttagctcgacagattgagaaatctgagtatcggaacttccaggcttgcctgcacaactcttggattgagcaggcagcagctgccctggagattgagctggaagaagacatgtataagggaggaaaagctgaccagcaagaagaacgtcggagacaaaagcagatgaaggttctgaagaaggagctgcgccacctgctgtcccagccactgtttacggagagccagaaaaccaagtatcccactcagtctggcaagccgcccctgcttgtgtctgccccaagtaagagcgagtctgctttgagctgtctctccaaagcagaagaagaagaagacaaagaagccgaaggagccacagccggaacagccacagccaagtacaagtgcaaattaactgccgtggtcaagtgtgtcagtgactgcacattggtttctgttctctggctaatttgcaaaacctctcccacccttgtgtttcactccaccaccaaccccaggtaaaaaagtctccctctcttccactcacacccatagcgggagagacctcatgcagatttgcattgttttggagtaagaattcaatgcagcagcttaatttttctgtattgcagtgtttataggcttcttgtgtgttaaacttgatttcataaattaaaaacaatggtcagaaaaaaaaaaaaaaccggaaccggcggcaccagctcggagagaaatcgatgttgtagtgaccttcagtaaaagagcggtttttcatagaggtgccgttttagactacctatttaagaggcacgaaaaacaaatacatctaataggttaagtaaaaaaccatctatttcggacaataaaagttattttctacacacgttggtcttcattttactcgttaacagtatcatacatccttctaagcttatctttttgacgtgaaagtgtagtagtatgtctccacctggcagctatgtagttaatatttttgtctgttgtaatgttatcaagtaccgaacattttcctaatgaaatagtggaaaagacaacctttttctccatttctatttggatttttagatcacgtacataacaaggaatcgaataaataatgaagtgttttataaagagtatccgtcttggagggagattccagttgggaggttccataggcagttcttaccaagaagatgtcgattccattctccaacacccactaccgaattccacaaggatttgggaatcttcttgaagggctgacacgcgagattctgagagagcaaccggacaatataccagcttttgcagcagcctattttgagagccttctagagaaaagagagaaaaccaactttgatccagcagaatgggggagtaaggtagaagaccgcttctataacaatcatgcattcgaggagcaagaaccacctgagaaaagtgatcctaaacaagaagagtctcagatatctgggaaggaggaagagacatcagtcaccatcttagactcttctgaggaagataaggaaaaagaagaggttgctgctgtcaaaatccaagctgccttccggggacacatagccagagaggaggcaaagaaaatgaaaacaaatagtcttcaaaatgaggaaaaagaggaaaacaagtgaggacactggttttacctccaggaaacatgaaaaataatccaaatccatcaaccttcttattaatgtcatttcttcctgaggaaggaagatttgatgttgtgaaataacattcgttactgttgtgaaaatctgtcatgagcatttgtttaataagcataccattgaaacatgccacttgaagatttctctgagatcatgagtttgtttacacttgtctcaagcctatctatagagacccttggatttagaattatagaactaaagtatctgagattacagagatctcagaggttatgtgttctaactattatcaaatgaataaatcctctctatcacatcccccaaaaaaaaaaaaaaa

SEQ ID NO: 47002 - DNA, 1604 bp, Homo sapiens
gctggagcgcggcgtaggtggctgccgagtcttttcctgtttagggtcttatcctggcattgagggcgccggactggcgcttttggccgacttggcattgggtgggcggcttcttgggacccacatgagccagtggcatcatccccgcagtggctggggccggagacgcgacttttcaggacgctcctcagccaagaagaagggcggaaaccacatccccgaaaggtgggaaagactatctcccagttgggacagcggatgcctggggactcgtttcattgctttcaaagttccttttgcaaaagagtttttgaaaagaaacttgctccagaagaatgcttttcccctttggatcttttttaacaaaatcccgaggaacaaaatgaaagaacttgggacttgattattgatttaacatattactcaacgctaattattaaccagagggttttgcccagaaactgtttccttactttaaaattttttacagttggacatcaagttgcctgatgatgagactatttttaaattccaacacgctgttaatggggtttttgaaaggaaaataaagataatgataaacttattgggtgtccactgttacccatgggttttaaacaggactggctacctcatttgcagatatttgattgatgtagaaggcgtgaggccagatgatgcaattgaattattcaataggtgccggggacattgcttagaaagacaaaactacattgaagaccttcagaatggtcctatcagaaagaattggaattccagtgtacccaggtcaagtgattttgaagactcagcacatctcatgcaaccagtccacaataagcctgttaaacaaggacctaggtataatctacatcagatccagggtcactcagctcctcgacatttccacacccagacccaaagtttgcaacaatcagtcagaaaattttcagagaatccacatgtttaccagagacaccatctccctcctcctggtccccctggagaggactattcacacaggaggtattcttggaatgtgaagcccaatgccagtcgggcagcccaggatagaagaaggtggtatccttataattactccagactctcctatccagcctgttgggaatggacccagtgatacaaacctgtcctggaattctacctggagaccagagctggcctgaaaattactggtgtgacttttaattagttcaggtctaatcaggtttctttattgttcccttatgtattcaagcttaaggaaaaattgcattgctgtttacctctttgctgataaatttgcagtaattacagcattgcaggaaaaacaatctgttattccagtcttaaatttttctaaaagaagacaatattttagaactgaagcattgagaacttcccttgcaaattatttttaaaattctatcttgtttttctatgtatttctttctgactagacttgtgatatgcgtgtgtttatgtacagaaatttttagtgtttttgttatgttctgttattgacccaaaggccatctttattttctataactgttcaaaatttatattaaaatctacttaggagataaaaaaaaaagaaacaa

SEQ ID NO: 47003 - DNA, 1820 bp, Homo sapiens
  misc_feature (1)...(1820): n = a,t,c or g
gctgcagcgcgtcgagcttgcgctctttgctgccgccttcctgtgcggggccgtggcggccgcggcgatgactcggacccagggctccttcagtggtagatgtcccctgtatggtgtggccaccctgaatggctcctccctggccttatcccgtccctcagcaccatccctgtgctactttgtagctggggcctctggctcttggccctctactgcctcctgcttttgctcttctggatctacagcagctgcatcgaggactcccacagaggtgctatagggctgcgcattgcactggccatctcagctatagccgtcttcctggtcttggtgtctgcctgtatccttcgatttggcaccaggtctctctgcaactccatcatctccttgaacactacaattagctgttctgaagcccagaaaattccatggacaccccctggaactgctctgcagttttactccaacctacacaatgctgaaacctcttcttgggtgaatttggtattgtggtgtgtggtcttggtgctccaggtcgtgcagtggaagtctgaagccaccccataccggcctctggagaggggtgaccctgagtggagctctgagacagatgctctcgttgggtcacgcctttcccattcctgaagaataagcggagtgcttcctgcagccgaagactccatgcccaagtgcctgtaatcccccccctcaaggccctgtttatgttgggagtcttagttttcctttcgttggggggtgggggggaaacataatgacaggcccccctccacctcttcctgcagctgtttttgtaccaaaatattatattactgtcttcatcttagtagtgagtttttgatgttaaagtacaactagataggaggaaggagtgaaggctaagcagacatggactgaaacttagaggtactgttaggcagctgccctagggatgactgctcctttatttgttgttaatgaatcttgacctccttgtgtgaccctggttgttactccattctaagattggcgtttttttttgttttttttttttgtaaatagagacaaggtctcgctatgttgcccagcctgacgtcgnnnnnnnnnnnnnnnnnnnnnnnnnnnnnnnnnnnnnnnnnnncaggtgtgaaccaacacacctggctccccaaggttcagtttttatcctcctcttggagaggtgagtgacttgaggtcatttcttcacaagctccggtaggcacccacagtattgtcaaagagttttgtgttagggaagtgtccagttttgtccaagaggaaatagaagcgtcggcctttgactttcagaggtagcatggcagggacttcaccccggtgggccatgcaagatacctgcttcaaaggaactgtgaaatgggcccccaagccaaagggggcatgagtggtgagggtcacctgctgccctccagctcgaagcaccactgagcgcacagaccggagagagaagagaagaccagcaccgagtacgagggctccgatggcgccgcagccgacggccagaccgtagcgccagaacgcggagcgcaggtcgaaggggccacgatttgggacctccgcatccagaggctgcaccggaaccgggggccgggacacggctgccacagccatggaagcccagaagacgccctggcccgcgcagaacagcccgaggatggtgaagaagcggccccgatcatgtcaaagagcagcacatcccgttgcagcgtcgtgcttgcaggggccggcaggtgacgcagggccgcagcacggctagcacgcccgtggccatcgctccaaggcgc

SEQ ID NO: 47004 - DNA, 605 bp, Homo sapiens
  misc_feature (1)...(605): n = a,t,c or g
gcagatgttatacagattttcttagcagtgtaataacgttaaactgaagaaataaccatcctgcaggcttcaaaggacgaggtcagcaatatttcccaacatggcttgggggaaaaggatagttttgtctccttttgtattcaagtaatgcaaagtgcatttttgtctctaagtagcttttgactaaaagactttgtagtgtaaagggtgttatacaaactgtaatggtgtgcttcaaacaaatgctagaccctttcacctttgtcgtatatacaaagctgttaattatgtggtatgaattaactttgaacatgttgaaatatgtagcatgtctttaactcagacgaagattctgattgcacaggttgtgttctagccagttgtgatttatttgttcagaaacacaaatgtgaattgcactcttatcatcagaatattgtatgaagtccagtgatctttaaacagcccagaagtaatacctggacctccattgggtagcccaaagtttacatagccccctttaaaaggtaatcngtccnattaagtttccnatttccggtgcaccggggattttcccctnggaaangtccggccttgccttgggt

SEQ ID NO: 47005 - DNA, 1574 bp, Homo sapiens
ttttttttttttttttggaaaccttgaaacaatttattgaattgctttatacaagattaacaatctccacaccacccctaacaccaacatagtcgctgcacaaaagccacagcccctctcacacctaagaaacggtcacgcccggtaagtgctcagagactttcgctgcgccagggaaacccctgcagcccccagaccccgaggctgctctgccccaccctctgctgcggcctcgcctgtaggtctgccttgccatggctgttcagtcattcgctctttcattaccacaaataaagcataaacaaggaaaagaaatctcaaactccccatcaaagaaacgtttccctgaggcaagaggcatcactagattcctaaaaatgagggtattctgctccagctgcacgcgcaatggtacatggggaggagggagcaccaaagggaaaggaaggagggcctgggacccgggtgtttatgggcagagaagcctggagagtccctgctcagcctcccactgcccggcctctgcttggctttgagctcagcaatacaaatctcttctttggctcttttgctactacctaagactactctgtaaacaaactggaaatccaagttgcaaaaaatatatataacaaagggataaggaatccacttagcccaatgtgaaaacacagattggttcttatgtaaaaaaaggagtcagagcagaggccggggccaaagggcagacagaggtcttgctccttgggaaaccgggaaggccaggcaaacctctgaatgaaggatgagttactgggcgctgtaccctgggagtcaggagccaagagcggtccgttttcccacaggtgtatgtgctgaggacaccgtatactctcaacgtgcctgatcacttagctggagcagtcagttcagactcaccttgtggcacagacctcacaagacaggcaagtgccctcaaatccttgtgaaacagccactggttgagtggtgacttaggagctctgcagtaactgtcctaagtctctctgatccactctccaagctcttctgcacatcacccttcagtcgacacataaccccactgcctggagagccccaggacttcaaggcctatttctacccggcagacacttcacagaggcctgcttctgccgcactgcctaagaatgattcctaagaatacaaactggaatgtctatctgtgacttgggacccctggtatccttgaccctcagagagatgaagggctctgggctctgcagtccacctccacgaactctggaaaaacaaaatgggagccctggctatactgggacttggaatttgggggcccagacaaccttctagtcaggacggcacagataatgatgtgcaagtgtaaaaaactcaaaactggctttctcttcaatacagacatatctttaaaaaggtcttcgtctcagatccattcagagggctgaatggacatgtgttgtcgaattctgctccaccataaaggcactggaattatgtcttcctataatatgatgtgtgaagaacagtccccttctatccaatgcattcggacgcgtggg

SEQ ID NO: 47006 - DNA, 646 bp, Homo sapiens
  misc_feature (1)...(646): n = a,t,c or g
tggaattctgtctatcttctttagcttttctatatctttcctttttcgtttctcttcttctttccatttcctcctctcttcttctctttgtctttttctttctatttctctcctcctcctttcttctctcttttcttctctcattctctgcttgtttttcaggaagctcaaaagtggggttgtctttttagctattaattctctattttttgcttctatttcctctagcagtgtctctggagtagatgtcattttctcattatctgtggcataactttccaaaaactttctatattctggatcatcatcgatagtcccgactttggnatctcttttcttagtcttcttttttgcagctttttgaaaaggtgcaaattctactatagcgggatattcctgacctttattgtcaaggaatacataaccatcaaagcgatccctgaacaaaataatgtcctcttggtttttaaagttgatgtatgctctggcatacatatgaggatacaaactcgtatcattagaaaaaaactcaaaataatcatgctcaggcataggttgaagatgttcctgaagctgctccttggtcaaagtgggaggtaatcttcgaattacccaccttgctcagcgcttctttcttctccttgtt

SEQ ID NO: 47007 - DNA, 2926 bp, Homo sapiens
tggggcggggctgttgggaagtccagcttgggtccctgaggagctgtgagaaggagatgcggctgctgctggccctgttgggggtcctgctgagtgtgcctgggcctccagtcttgtccctggaggcctctgaggaagtggagcttgagccctgcctggctcccagcctggagcagcaagagcaggagctgacagtagcccttgggcagcctgtgcgtctgtgctgtgggcgggctgagcgtggtggccactggtacaaggagggcagtcgcctggcacctgctggccgtgtacggggctggaggggccgcctagagattgccagcttcctacctgaggatgctggccgctacctctgcctggcacgaggctccatgatcgtcctgcagaatctcaccttgattacaggtgactccttgacctccagcaacgatgatgaggaccccaagtcccatagggacccctcgaataggcacagttacccccagcaagcaccctactggacacacccccagcgcatggagaagaaactgcatgcagtacctgcggggaacaccgtcaagttccgctgtccagctgcaggcaaccccacgcccaccatccgctggcttaaggatggacaggcctttcatggggagaaccgcattggaggcattcggctgcgccatcagcactggagtctcgtgatggagagcgtggtgccctcggaccgcggcacatacacctgcctggtagagaacgctgtgggcagcatccgctataactacctgctagatgtgctggagcggtccccgcaccggcccatcctgcaggccgggctcccggccaacaccacagccgtggtgggcagcgacgtggagctgctgtgcaaggtgtacagcgatgcccagccccacatccagtggctgaagcacatcgtcatcaacggcagcagcttcggagccgacggtttcccctatgtgcaagtcctaaagactgcagacatcaatagctcagaggtggaggtcctgtacctgcggaacgtgtcagccgaggacgcaggcgagtacacctgcctcgcaggcaattccatcggcctctcctaccagtctgcctggctcacggtgctgccagaggaggaccccacatggaccgcagcagcgcccgaggccaggtatacggacatcatcctgtacgcgtcgggctccctggccttggctgtgctcctgctgctggccgggctgtatcgagggcaggcgctccacggccggcacccccgcccgcccgccactgtgcagaagctctcccgcttccctctggcccgacagttctccctggagtcaggctcttccggcaagtcaagctcatccctggtacgaggcgtgcgtctctcctccagcggccccgccttgctcgccggcctcgtgagtctagatctacctctcgacccactatgggagttcccccgggacaggctggtgcttgggaagcccctaggcgagggctgctttggccaggtagtacgtgcagaggcctttggcatggaccctgcccggcctgaccaagccagcactgtggccgtcaagatgctcaaagacaacgcctctgacaaggacctggccgacctggtctcggagatggaggtgatgaagctgatcggccgacacaagaacatcatcaacctgcttggtgtctgcacccaggaagggcccctgtacgtgatcgtggagtgcgccgccaagggaaacctgcgggagttcctgcgggcccggcgccccccaggccccgacctcagccccgacggtcctcggagcagtgaggggccgctctccttcccagtcctggtctcctgcgcctaccaggtggcccgaggcatgcagtatctggagtcccggaagtgtatccaccgggacctggctgcccgcaatgtgctggtgactgaggacaatgtgatgaagattgctgactttgggctggcccgcggcgttccaccacattgactactataagaaaaccagcaacggccgcctgcctgtgaagtggatggcgcccgaggccttgtttgaccggggtgtacacacaccagagtgacgtgtggtcttttgggatcctgctatgggagatcttcaccctcgggggctccccgtatcctggcatcccggtggaggagctgttctcgctgctgcgggagggacatcggatggaccgacccccacactgccccccagagctgtacgggctgatgcgtgagtgctggcacgcagcgccctcccagaggcctaccttcaagcagctggtggaggcgctggacaaggtcctgctggccgtctctgaggagtacctcgacctccgcctgaccttcggaccctattccccctctggtggggacgccagcagcacctgctcctccagcgattctgtcttcagccacgaccccctgccattgggatccagctccttccccttcgggtctggggtgcagacatgagcaaggctcaaggctgtgcaggcacataggctggtggccttgggccttggggctcagccacagcctgacacagtgctcgaccttgatagcatggggcccctggcccagagttgctgtgccgtgtccaagggccgtgcccttgcccttggagctgccgtgcctgtgtcctgatggcccaaatgtcagggttctgctcggcttcttggaccttggcgcttagtccccatcccgggtttggctgagcctggctggagagctgctatgctaaacctcctgcctcccaataccagcaggaggttctgggcctctgaaccccctttccccacacctccccctgctgctgctgccccagcgtcttgacgggagcattggcccctgagcccagagaagctggaagcctgccgaaaacaggagcaaatggcgttttataaattatttttttgaaataaaaaacaaaaa

SEQ ID NO: 47008 - DNA, 1184 bp, Homo sapiens
cccacgcgtccggtcggggcgcctgcgcagtcgctcttcctcaggcggcggccatggcgggacaggaggatccggtgcagcgggagattcaccaggactgggctaaccgggagtacattgagataatcaccagcagcatcaagaaaatcgcagactttctcaactcgttcgatatgtcttgtcgttcaagacttgcaacactaaacgagaaattgacagcccttgaacggagaattagagtacattgaagctcgggtgacaaaaggtgagacactcacctagaacagtgccgtgctgctgctgggaagttgctttacacaacacaggccacatgggaaaggccccagcagccttcagctccttcctttctccttaaagagcaacagggcttattcttgtttttcttttttcaaaagtgtggcctttgggctctgccatctggggtgtggtgtggtatgtggggaagaagttcagaggaaccgttggaaacgacgttaggcattttaccttttcagtaacattttatacatctaacttgtcaaatgtatttgagacattcacagccaaaaagcctgggactctttgtgaaggtcctcctcacctctatctttctttctctctctctcaaactttccttaaagttcctcattgcctttgcactgcttctgtgaacagtctttgtctcctccccacctttggtgggaagtgcggggcagtcctggtcaagacactcatgccctggcaatgtggctgccagagaatgttgttgctaacccaccagtttcttgttgatttggagaggtcaaggccaggcccccacttggcttgaagggacattttcagacttttctttctgtcacttggagtgtctatgcctctcatatttccctaataaactcctcaactttttatctgactgctgtgattatggtggggagaggagctagagatgggttcacttattgcacagaaatgtaatacatggcgttattattctaacataaaactttcagatgtagctgtttgattcaaagcctaggtggcttaccagcccaagtccccatgtttggactttcagctgactagctcatcttgggaatcatttggtcattcagcacatttaccaagtatttactatgtaggcatgttaaactccaataaaacatacagcattgaatcagaaa

SEQ ID NO: 47009 - DNA, 968 bp, Homo sapiens
agcaggagggttgcttgagccaggagtttgatttggcaagacctggtctctgatttttttaaaaggatgattccaaattaagtctaagaatggaagtgaatgccaagcacagaccctttcacctccacatagagaataaacgtgggacaagctgacaaggatttttagctaacagcagccactgttgctttgatagacgcatacaagccctttctaacattagcaagtcataaaaatccaaaaagtaaaaatctcagttgagaacttcaaacaatacttctgttttacaagaatttaataacaaagattaaacaatcaaaatgaaccatgggactcaaaaacatcctaagttgcaaaatcaatacataatggaaaatctgacgacatttaaaactgtaagattaattcttttcattgagttcttctacttgcatttgcaaacagagagaatgacgcgcctgtttcagggattctttagccttagcaaggtcttcttttaacttgttgtattgctgcacatcaaagtgctgttgctttgatttcttgtggaagaactgaagaaattgcctactcttaacagctgagtaagtataatcctgtcgagtgactataaagtatgcaaaaaagaccatagaatttgcaaatgtgatgaagtatgtaactggctccatgatatcccaggagtacacccaccacgtgagccaggccagtgccccaccctgaatggacagcagtgccaatccagcccacaggagtccactggttttggcttccgaatgagcttctattccagctttcacctgttcaaggggctgcagctgttccttcaggtggtcaattttctccagtaaatggtgctctctctttttctgagactcttctaaatgcaagattgtaaatagtctgtgaaccaaggatttcatgtgttccatctcagcagtgtgctcattacttggtttttctctctt

SEQ ID NO: 47010 - DNA, 575 bp, Homo sapiens
gctttgacaaagtacatgagagatcccacttttgtaagactgaattccagtgatccaagtctcataggtttgaagcagtattacaaagttgtcaattcataccctttggcacataaggtttttgaggaaaagactcagcatttacaggaactgttcagcagaattccatttaatcaagctttagtcttttctaatttgcacagcagagcacaacatttggctgatatcctttcttctaaaggctttcctgctgagtgcatttcaggcaatatgaatcagaatcagcgtcttgatgctatggctaaactgaagcactttcattgcagagttctcatttccacagatttgacttctcgtgggattgatgctgagaaggtgaatctggttgtaaatctggatgtaccattggattgggagacatacatgcatcggattgggagagctggccgttttggtacattggggctgacagtgacctactgttgccggggagaggaagaaaatatgatgatgagaattgcccagaaatgtaatatcaaccttctccctttaccagatcccattccttctggtct

SEQ ID NO: 47011 - DNA, 961 bp, Homo sapiens
gccgtgagccaccatgcctggcctcttggaatatttaataagctaaaaaattcttatacacaggtagattaattaggtagccaggagtggcccctgaaagtatgtctggcaaaacctagaactgcatcctagccatcactgtaccttctgccctccctgctgtctcctctgccagttacagttaaaaggttgtgggtgaggacgctggggcagagtcccaggcgtctgctgtcagctccccagcccggcctgcctgccgagccatctgggcgttcccacggtggagagtgtggtgcttgtgacgcggtggtgctgggagccatccctggtggcagatgtgggctctcactgcaagtcagtgtaagtccccagggactgtcagcagcacgtcctgctgcccctctctctgcagaagccctggtaacctgcgtttggaaaaatctctaaggatttctgaggagctgtcaggccatgtccttgtccaccctgtgtgggggcacggcttcgacatgggctctgctcccgtcgtgggctgagaaggagcagggtggggctgtgcccttgggaaaaggaggcccctccccgaacatgccctttgtgcgaggtccctgtccatgctgtctccatcccggagccttacggcgatgggtggccacagagcctattccaagagtctggtttagggctgggtcttcccatcttcacctctgagtcttaggcgatgcgtgaccacgcagccccttccaggagtctggtttagggctgggtcttcccatcttcacctctgagtcttaggcggtgcatgaccacgcagccccttcccggagtctggtttagggctgcgtgctcaagagtctggtttggggctgggtcttcccatcgccctggaggaggcttttgtctcatctcctgattcacattaaactctgtgccatgaagcttaaaaaaaaaaaaaaaaaaa

SEQ ID NO: 47012 - DNA, 1433 bp, Homo sapiens
ttttttttttttttgacctcatgcagccccaaaggggcaaaaagagactttaattaggggagggaggatccaccagaatcagaaaagggacagctagcgtgggagcagaggagccagaacaggcaggaggagggcccggccaggaagctctggaggactcacctcgccacctctggcacaggcactggcactgacggacaaggcgaaacagcggcccctctcaactgggagggcacccaatggcccctgtagccagaggttgcccggcttttgggccccaggtcctaggcatgactggtggtcaccaatttggcccttgtccccaaccagtgctggggggccatctttaggcagaactcaggaagctggcagagagttcccaacacttatactggggccaaggaggcttgggaataaaagggcaagggagaaactggagtctgaaacctccctccctccccacctggggtggcataggagagaaaaaataagtcgccttctggctccaggcccgcccagacccacagcaaccaataacgtataatcactgggaccagtcacagccactggaggtggaggtttaaaaaaaaaaaaaaaaaaaaagacaaaaaggttacagtatcctacaagcacagagtttaagtttcaagacgttaaaaaaaatctgtcccggcccaggggactgaacatcagaagccagcctgaccaggcacgtgtggccttggggcaggtccactgctgctttcttgcccagctagcaagcacaccacccacctcccgcatcaaatgcccaccccaacccaactccctgccgccgccgcgctgctcggggagtgactccaggacgccttcgtggagacatgggtagtctgagggggaaggccacgagatccagccagatggtttaaaaattcttaaggaactcttcagccacaatgcgggcacgggcattgactgacagcttcatctcactgatctccttgtcaatctcctccatgaagtggatcacaaagtccaccaacttgtgtttgtacatctgctctgtgtggaagttggtgatcagaaagctgatatccatacccctccaaaaggcttccttcgaaggataaagaagttctctgctcgcattcatccatgaagcgcatgaacttgtggcaacaaaatctttctcgatctcatcagccctgtttcacagcaatgctgacccggacagagttgatggagccctcaatcagaaccttttccttctcattcctgctgatggtcacaggttgtaacaggagctctttgctactcctgacttccacttccggcttgttgtgtcgttccacaacctgggaggagaagttctccaggcagagggcagcctgcaatgtggcccgcacggcactcaggtaggggcggagagtggcagtcatcgcgggcgctggctg

SEQ ID NO: 47013 - DNA, 1961 bp, Homo sapiens
cccggggttgcaccatcccagaagctgctgttagctcgccggtcctcggcacgccgcccgttcgcccctgcgctgtccgcccttcccctagcgttacttccggtccctcgctgagggggttcgtgcggctcccaggaggcgtgaaccgcggaccatgagcgtgggcttcatgcggggccggccagctggcctatgctctggcgcggggcttgcacagcagcaggcgtcttggctgcccacaagataatggctagctccccagaaaatgaaccctgcccacggtgtccgcgctcaaggaagatgggtgtgaacctgacaccgcagcaacaaaggagacgggtgaagcacagcgatcgtcctgtttctggctgtgaagccacattatcatccccttcatcctgggatgagatttggggccgacgttgcaagccagacacatcgtgggtctcctgtggcggctgggtgttcaccattcagcttctgtgggagaaggaagcttgatgggcatttcccagccagcccccaaagtgattcgctgcatgaccaacactccagtcgtggtgcgggagggggccaccgtgtatgccacaggcacgcacgcccaggtggaggacgggaggctcatggagcagctgctgagcacggtgggcttctgcacggaggtggaagaggacctgattgatgccgtcacggggctcagtggcagcggccccgcctacgcattcacagccctggatgccctggctgatgggggtgtgaagatgggacttccaaggcgcctggcagtccgcctcggggcccaggccctcctgggggctgccaagatgctgctgcactcagaacagcacccaggccagctcaaggacaacgtcagctctcctggtggggccaccatccatgccttgcatgtgctggagagtgggggcttccgctccctgctcatcaacgctgtggaggcctcctgcatccgcacacgggagctgcagtccatggctgaccaggagcaggtgtcaccagccgccatcaagaagaccatcctggacaaggtgaagctggactcccctgcaggaccgctctgtcgccttctggccacaccaagctgctcccccgcagcctggccccagcgggcaaggattgacacgtcctgcctgaccaccatcctgccaccaccttctcttctcttgtcactagggggactagggggtccccaaagtggcccactttctgtggctctgatcagcgcaggggccagccagggacatagccagggaggggccacatcacttcccactggaaatctctgtggtctgcaagtgcttcccagcccagaacaggggtggattccccaacctcaacctcctttcttctctgctcccaaaccatgtcaggaccaccttcctctagagctcgggagcccggagggtcttcacccactcctactccagtatcagctggcacgggctccttcctgagagcaaaggtcaaggaccccctctgtgaaggctcagcagaggtgggatcccacgccccctcccggcccctccctgccctccattcagggagaaacctctccttcccgtgtgagaagggccagagggtccaggcatcccaagtccagcgtgaagggccacagcccctcttggctgccaagcacgcagatcccatggacatttggggaaagggctccttgggctgctggtgaacttctgtggccaccacctcctgctcctgacctccctgggagggtgctatcagttctgtcctggccctttcagttttataagttggtttccagcccccagtgtcctgacttctgtctgccacatgaggagggaggccctgcctgtgtgggagggtggttactgtgggtggaatagtggaggccttcaactgattagacaaggcccgcccacatcttggagggcatctgccttactgattaaaatgtcaatgtaatctaa

SEQ ID NO: 47014 - DNA, 2047 bp, Homo sapiens
  misc_feature (1)...(2047): n = a,t,c or g
aaaatgttagaactataatgatacttgtaatcactgacaagtgcttttatgtttctagtagaagaaaatctttaatttgctacacttgagaatagcatctgacagtgtaactatttaaaaatcttttctgatagaagaaaggagaattggcatatgtttatatttagattctgctaagggctttaaaaatagataacactacgtataattatggcagtgatgaaagcaaatgctacttgagaactgtcctggcctacccttttgagtcagctgttcaaaggaaaagttggactcagtgttagaaaatttggagtttttcaagttcagttggaggtgaggaaaaagagaaaattttgggtattgactcagttatttccctttttcaccttgggcaagttttgctctctgttaatggaataaatgatacttactttttctggaattgggaatcaaatgagatgacccaaggaaaggaattttgaatgtgttgagcactgtgccatgttcataccattgattggcagaaggaacccttttttgatttcttaaaattcaggagtttgaagtgagtaatatctgaattggtgttagaactgttggtggtttattgtattacaagatatttcaaattcctttttttgtttacacttttaaactattgatgcacttgaatatgtttatgcagttgtgaaaaaatagtgtaaagaaagcagtacaaattatcttgagtttatataagatgattcaagatttgtgccggacaaggagaaaaagaaaatttgttgatatctttgggtgaggatggagaggtccaagaaaccattttgcaaatgttttatattactaacaagacaatctaaacctaaataaacatctttttcagagaaaagacactagagaaagatttaatttgtgatatttcaagctagattataaactgtgatctttgtgaatgaattaattcattccagaattaaattttggtctttgtattttgattccttttactttagtgaggattttgtagagaagatgaaatttcacctctataataatagaagttaggagtgaggtctcacaaacatgggctgccttctagatttgggatataccatcagggacaataaataactgaaatttggaaactggataaaagagtctgctagttaggaccacttgactaagagtgggtatagaagaaacctaaggaagaaaagttagatttgagacaacatattggagtatgttgaaattaaaggtgaataaagtagtggaaattcgatagaatttaaaggagacattgtagtgggagatggtagaggtgattagatataatatgtatatttatttgaaaaatagatatataagaatgaaagttgtatgtagtaccaacaagtaccattcgtattatgattcacaatttacagagtattttcatatataaaaatcttgtgcaatgggttgttttttcattttatagaaggagcagaggctaaaggaagttgaggttaagtgatttggaagttacaaaaactagtaagagctcaaactagcaataaaattattagtatgtttttcccttgccttcactgtaatgcttaatggttgtgtagtcttatacgtgactcctgacttcaaggatcctggtctgtacctctttaggtcaacacgttttgagtgaactggtgttggttatttggaattagatataaagtcatatattctttggtgaggaatggcttcatataggagttcacattcaaaacaagctttgacaaaataatagagtgaaaattggtagatcagagttgagctgattgggaggaccaaattaaaagactnnnnnnnnnnnnnnnnnnnnnnnnnnnnnnnnnnnnnnnnnnnngaggccaaggccggccagattgtttgagcccggggatttcaagaccagcctaggtaaccggggtatcccagctacttgggaggctgagctgccgaggcttacagttgagcccttgatccgtgccattgctttctagcctggggttgncagttgaggccctgt

SEQ ID NO: 47015 - DNA, 1700 bp, Homo sapiens
tttttttttttttaagaacaaagcagaggggtttattataggaacattctcaaactgcaacggaaaagatgtccgtacaggtggatggggatggagatccacctcggagtacacagacttcagggggcctcctgcctggcacgttctttctctcccgtatcacctaagaccctgagacctccaccctctgcaggagagacccacaaagaagcctcctccctgtggcctggctcccatcagggacagtcctgtttttagagcaagaacagtctgtacttcagacaggatcccaacccccacccaaattcaatgtcgaccgtctgagcagccagcttcattggctgcaaacgcctctctcaggtgagtcaaaggagacacgacggggaaccagggggccctaggtgaggatgtcatgggcctggtgctccaccagcatctccatgctcttcacatccgtgcaccagaactccaggcggtccttcattcccttgatctgttgcaaatccaacactcggggctgcacccaggtcatgtggactcgtttgtccacctcgtctatactgcctttcaccagccccaccgaaagggccttcatcaccagaagctccacctcattcactgtgattttagcacttttggcaatttcttcaaaagtgagttgtctgtgattggcaggtcgtgtgaaagtcatctccatgaggcacaacaactgaattttcctccagaagctggggcttcattagctgctaaatccaggctgctggccccaggcagtcttcagagtctggaaccgctctacgttgccactgttgaaggcatagagggtgtcaatcagccactgccggtcagtattcctcagggactcccagcacagggtgcatgaggagttctccaaagttaaaaactccctcgccgagaagtcctgctagccccagcgtgaaggctctctcctgctgctcagacactggtagatccttgatgtcaacacagcccaaaaaccgcagagcatctttgtagtaggacgcgtggtttccgattgtttgatagtatttactggagagatcatagaaacgactgtgaaccgatgtcacaccaggaaggttgttgagcatttcttcaacatcttcaattgtttcctttgtaacctgtaggtccccgatgtttaattttagagctccaattgctgttttacacaggatcactgcctcatcactacttttcaccttctcacgagtcttttccagaaaagtaagagccacattaggatcagtcatctgtctaactacgtgaagaatgatttccacgagggacagaggattcaccctgtgttcaaattcactgataaagttttcataaagcttaatgagaccatctccttgggcaaagcacggatcctgcacaaaatcaagcacctgaagtgtcagctgatgccacaacctgaaaaacatacagcccttaagacctctaacctaatatccagtcacagacacctccagccttgatgattctatcaagtcacaaatacaggttgggtatctctaatccaaaactccaaaactccaaaattcaaaatgctccaaaatccaaaactttttgagcaccaacatagggctcaaaggaaatgaccactggagcatctcagatttcagatttttgatttatggatactgaacgggtaagtatatatcgcaaatatttca

SEQ ID NO: 47016 - DNA, 1315 bp, Homo sapiens
gcaattttctttttttcttttatttttgtagttttgggcaaaacattcactgttctgtttcagcatatttccttggaacatcttcatctctttccattttgcggacactccccttcttctattctcctttactcaaaacatatggtttagacccacatcatggctttcttgtgggaagcctggatgggactaggaaaacacatgtttccaacatggtgcatatctgtttgtgcagatatcagacaagatttaatcttgtctaacttatgcgtattgttttgatgtttgcctgtggttattctgggcacagcaatggtggacattattgaaaatgaactttattggcagatgaaagataatagaacatgaagatttatgaactaccataagctctgcatctctgggtcttcatttccaaagcagcacttggaaaaccaagcccagttcaggcaaagagttcctttcttctcaccagcacttgaaatggtccagaatatacctgatgctcacaccaccttcctcatccacttctgaaatgaaaaggtcattccccaatggttgctatatcttttccaagagggacttccccttcttaaaaatcctgaaaaattcctttccatttcatacactgaacctgacttcatttcttaataaatatttttatcatctctatcatccagaatttcttctttctccatccatattatcttttacttcaagacacttactttcctattccctttcaaaactccttcttgtttcaaaatggattcccaatggctctagctactcctgtttctaccttgctcgacttgaccttcccctgtgtctttcctgtgcactctccattgcccctttttatgtagcctcctttctagccctgaccttcctccctattcagtcatatgcacattcgcgtatccttttttttcaccccacttgcacacagtcctcttctttatacagtcttatatacttgcaagtgatctttccacaacattaaaaccacattttgctcctcagacacctctttgcactctagatcttttctgatcatatgtgtctggatagcacatcaagtttcagacctggctatcagcacattagccagcaagaatataagtttagatctgacaatcccaaaacacaatctgcacataaaataattcacatatatcatgaagaagataacttactgcaaaggtaataaggccccacagtttctgatcatttttttttctatctccttttccaaataagtcctagcttcattcttctaattcaaatttgaactactttcaaattctacatacgt

SEQ ID NO: 47017 - DNA, 660 bp, Homo sapiens
ttgattataaagcaagtttattctgaagagggattgtcttatgtttacgcacagggaagaaataagaggaaaccctcttttcaacctcttttccccctcacagaaccgagtccccaagttctcagcaacatcatgcagtgcttcagcgcctttactggggaccaaagatgttaggatcgtgaagggtcagactggtcaccagctgttcaaagtcacccaggctccagggtgcaggtgacagattttcggggccaagagatgacctgttgtcagggcttggggtgggggaacagatgggagacagaacatcatccaggcctgaggtttggaaattgccaattcctgttccccagaggacctgggtatcagttaccccaaacctctggcccactcctgcttccttggaggatcccaccagtgagtctccctgttctgtccctcccagcccgattctcctgggaacccagtcatgagatacccgcccgttccttcctccttacgggggctgattgaaggtaagcaagagatcagtctggtactggggcagcctcagcaaggcctgatgaagtgtcacgtcctttgctacctgctggttttccttagctatctgctgcttgccagagaggacccaggcttcttgacagcggcccctcagggccc

SEQ ID NO: 47018 - DNA, 1139 bp, Homo sapiens
ggtcgactccggctctcactgctaggggcttaagcggagggagtcgagccagcgtcgccgcgatggtgttgttggagagcgagcagttcctgacggagctgaccagacttttccagaagtgccggacgtcgggcagcgtctatatcaccttgaagaagtatgacggtcgaaccaaacccattccaaagaaaggtactgtggagggctttgagcccgcagacaacaagtgtctgttacgagctaccgatgggaagaagaagatcagcactgtgaacccagggagaaaacccaatgccacctttctaagggatttcaagaggtgagctccaaggaagtgaataagtttcagatggcttatttcaaacctccttagagctaacatggatgggctgaagaagagagacaaaaagaacaaaactaagaagaccaaagcagcagcagcagcagcagcagcagcagcaccctgccgcagcagccaacagcagcaacaacagcagcaacaacagcagcaacagcagcacagtaaagggcatacatttcctgctttcacccaattaaccactgaattgctattttttccttttggccagatagctaggtttctggttcccccacagtaggtgttttcacataagattagggtccttttggaaagaatagttgcagtgtttataggatagttgtggtaagaatctagtttattttgcatttggctaattggtctgtgctgcatggttatatactcctggattatagattaaaaagtctctgtagacatctctgtgaagagcaagctatcattaaacatgtctgtttatcagcactgtctctttattcctttcccaacccattttaatagttctggcaataactactaaatctagaatgatgtgattaatgaataggctttagctctataatatcttctaggttattagaattgaaacctgacagttttataaaaagtcatgttatctcatgagctgcttcccacctggctgtataattttatcatcatggttccccagtttcgatgagttctcacagtcaaatgagagtttgtttaaccaccttaggagaaacatactacaaagtcatcaagaataaaggttccaaagtaaaaaaaaaaaaaaaaaaaa

SEQ ID NO: 47019 - DNA, 2068 bp, Homo sapiens
cccggggcgtggcctcccgcaggtgagtacgctgctccttcggtttccctgaaacctaacccgccctggggaggcgcgcagcagaggctccgattcggggcaggtgagaggctgactttctctcggtgcgtccagtggagctctgagtttcgaatcggtggcggcggattccccgcgcgcccggcgtcggggcttccaggaggatgcggagccccagcgcggcgtggctgctgggggccgccatcctgctagcagcctctctctcctgcagtggcaccatccaaggaaccaatagatcctctaaaggaagaagccttattggtaaggttgatggcacatcccacgtcactggaaaaggagttacagttgaaacagtcttttctgtggatgagttttctgcatctgtcctcactggaaaactgaccacggtcttccttccaattgtctacacaattgtgtttgtggtgggtttgccaagtaacggcatggccctgtgggtctttcttttccgaactaagaagaagcaccctgctgtgatttacatggccaatctggccttggctgacctcctctctgtcatctggttccccttgaagattgcctatcacatacatgccaacaactggatttatggggaagctctttgtaatgtgcttattggctttttctatggcaacatgtactgttccattctcttcatgacctgcctcagtgtgcagaggtattgggtcatcgtgaaccccatggggcactccaggaagaaggcaaacattgccattggcatctccctggcaatatggctgctgattctgctggtcaccatccctttgtatgtcgtgaagcagaccatcttcattcctgccctgaacatcacgacctgtcatgatgttttgcctgagcagctcttggtgggagacatgttcaattacttcctctctctggccattggggtctttctgttcccagccttcctcacagcctctgcctatgtgctgatgatcagaatgctgcgatcttctgccatggatgaaaactcagagaagaaaaggaagagggccatcaaactcattgtcactgtcctggccatgtacctgatctgcttcactcctagtaaccttctgcttgtggtgcattattttctgattaagagccagggccagagccatgtctatgccctgtacattgtagccctctgcctctctacccttaacagctgcatcgacccctttgtctattactttgtttcacatgatttcagggatcatgcaaagaacgctctcctttgccgaagtgtccgcactgtaaagcagatgcaagtatccctcacctcaaagaaacactccaggaaatccagctcttactcttcaagttcaaccactgttaagacctcctattgagttttccaggtcctcagatgggaattgcacagtaggatgtggaacctgtttaatgttatgaggacgtgtctgttatttcctaatcaaaaaggtctcaccacataccatgtggatgcagcacctctcaggattgctaggagctcccctgtttgcatgagaaaagtagtcccccaaattaacatcagtgtctgtttcagaatctctctactcagatgaccccagaaactgaaccaacagaagcagacttttcagaagatggtgaagacagaaacccagtaacttgcaaaaagtagacttggtgtgaagactcacttctcagctgaaattatatatatacacatatatatatatattttacatctgggatcatgatagacttgttagggcttcaaggccctcagagatgatcagtccaactgaacgaccttacaaatgaggaaaccaagataaatgagctgccagaatcaggtttccaatcaacagcagtgagttgggattggacagtagaatttcaatgtccagtgagtgaggttcttgtaccacttcatcaaaatcatggatcttggctgggtgcggtgcctcatgcctgtaatcctagcactttgggaggctgaggcaggcaatcacttgaggtcaggagttcgagaccagcctggccatcatggcgaaac

SEQ ID NO: 47020 - DNA, 332 bp, Homo sapiens; identical to SEQ ID NO: 18968

SEQ ID NO: 47021 - DNA, 1492 bp, Homo sapiens
ttttttttttttttactattcgttaggcttttatttttctctatgttctgcagtaactaaggaaaatcatggtaaatgtcaatcttcacacaacagcagacacaaagggtttcagaaacgtcagatatgaagaaatcctccatccttcttcaacattttactgggtatttcaacttcaaaagaacagcttatttctataagtgctgtacaagatcatagattatgatggaacgacttcattttaggaacgttagcaaaactgttatactaaatgtcaatgacaggaaacaaagaaaaaaatttgttcaattatatttttaaacatattgttattctcaacaaacggaattttaaaacgaatacaattttccattatcaaaaggcaaacactctatttcgcagttgaacaatgatcactgatcacaaatatcaaatacagtgtcccccgcccccaatcgacatcattttcaacttaggaccctggcatctactccttggggtacctgtgactctcttttacacccccaagggtctgcctcagatctacttaaggggcggaataacccctagcacctgaattgaggatagcctcaacctctgcatcatcgtccgaatcccagtcataattacaaggccagtctttagagcatcggttacgaacccttgccacaaaatgcatgactttcagtttgctcgattccacgtgtgctcggggcccccagaagaactcatactccaccggactgctacggggcaccggtttataaatcaggtaccctctgcgcacaaactcttctgtgacgatcttcttcggatctccaaagatgctgtgctgacgtccaggctgcattcctaacttccccagcactttccagaccagagcttccttggcgctgttgcccatgatgaagatgagcgctaatatagacatcaggagacttttcttggtgccctgaaaattgctccggcggcactgaaggcttttgtgcttgggcagtgctcgaggcttcttcaggggtggtagaggccctcctctggagtgctcgggtcttcctcggggccgctcaggtcgtccttcgggggtgctcgctaccacagaggcggccataggggtctcggaggcctctgaggcctggattttgcgattgttgcggttctcttctgcggtctcgcatttaggcggcgccgactctttcgtccccgaggcatgtctcctgctagaggctcaaagcttacagcagtcctagggaaggatgcttgtagcctcttcaggaagcaacagctttataccgtaagaagctgctgcccgctgaagctaccaatgtcaatagagtctttgtagcaataaacaagccgttctcagctacaaagggtagttcccacgccagctgacttgcgcgagcagccgccgccagcacttgccgcagctgcaagcccgcgagaaagctcagcaaaattggccccgcctctcctgccacgcgaattcttccag

SEQ ID NO: 47022 - DNA, 533 bp, Homo sapiens; identical to SEQ ID NO: 18978

SEQ ID NO: 47023 - DNA, 1612 bp, Homo sapiens
ttttttctcttacatgaagtaaagcgctttggtcaaacacacaaaaatactgccttgtactggtggttggtttcattagtggatcacacacagtgttctacttggcttgtaaaatggtgccttggatagggtgagtttggataagtatgtatgtatgtatgagttatagcaaaattaagtagattgaatcaagtccatgcaaaagcaataaaacagttttaattttttaattttttaaaaattaaaactttaataaaacagtttttaattttttgctaggttcttttaaaaaatgatgtaacttacatggaagtcttcacaggacttttttctttcctggaactattgaaatgtaatttaggatgatttgatcttccatctcaagttgtcaacatggctgtgtcattctggcttacatatgttttatttaacaaaattctagtcaagggataagggcataatgaagacaagcttcagttatgaaagtacaaactatttgtgtgattaatttttaaaaatgacattaagaagcccattgtaaaataatatttgcagtcaaatggtttttcttgctgtaagtcctgttgtagctatgtttagggtagtggttctcatctaccttggagtgcataagacttacctagcaggcttgtttaaaaagttcagattcctagctttgtacccagggattgcctcaggtggtatgggctgtggtcctggagtcatcacttttataaatagtggttcagagaccacagagagagactgcttcatcgaatgggaagtaccaaggagaaagtacaattcagtattgtctggaggcaagtggacactttgtacctgaggtttagaataggtggtctcttgccagtacaatccccaggcgttttctgtgttcagaagtagtaagaatgcctttaattcagaggattatctaagctctttaaagctgtttttctccattgtcatagtgccttctctgaaaaatgaatgtacaggtatcctattttctaatgtaattaggattttttaaaagcaatttttgatagtttttcttttaaaaagtaaaattcagcactgtgacttgaacccccaaatctttcacatacaggtgaaacattaagccacaaataaaaataatgaacaagaaagaagacaagatcctaattcctgtcattagtgacctaagtaccccatatcagaaactttgcaaaacagatctagggacagaagggctttgaaagacatttttctttggggcaaatttcgtgtgccagaactacagtttaaatgtttttatgagcaagggaaggtagcattgattcccatagctttctaattagatacatgctgtcatggatgtaagccttaaaggagttaatactaatcttgtacatacacaaattttcctcaggtttttttattttaaaaaatgatttgttaaaagtactgtctgctagacccttgcctttgagtggctttgaaacttaatatagtttttaaaaagtgcaatgggatgagattatgctattagtatattaaaagcatgtttctgttttactccaatttgtaagatcatttaatggaataaagatcacaacaccatgttaaa

SEQ ID NO: 47024 - DNA, 1141 bp, Homo sapiens
cagcagctgccttcgtttggaactgaagtccagccagcagactctctagctccatctcccctgtgccacccgtaggtcatatgaccttggccaccttggagtagacccagacccctcgggacccgggacattagtctcaggctgctgatggattgatttgacatgaaccaaacacagccaaactcgatacccacaagctgttcagctgaacctgactgagtgttcttcctgagtttcacgaggataggctagagtgcatttttactggtggatcagtgtgtgcaaaagagatgaccctttataaagagattttcaagtggatatatataaaagaaacagttgcttgtaaaatatacttttgtaaataatatttaattttttaaataatatatttggtgctgttttctcagatcccctgagagcactttttattttccttttaaattctatggtttcctttgcatttcttgaagtatattttaagggaaacagtgatcaccaatacatgttttcagtttttttttttttaaggtctctatcactttaatctggatcaaggctttgaagcaatgcctctctgcattttttccccagtggaacagactctgcagtacattaatcaggttgagaattgaaatattttcttgcatcagtattggctagaaaagaaaataaataaaaccaagttaatttagtagtaacaacttacagtgattcttcctgttggaagaatttccagcaaatcagaatcacgtttttagttgtgcgtgtgcgcgcacacgtgtgtaaaaagcactttcgattgtgcctcctgttttctcgagtggggacactttaactacagtttacacctcgggcgcataaagtttttcttctctttctctctggttgtttctgtttctgagtggaccaacagcagaacccacgaggatttgttttgagtatggagctgttgcgggtttgctcctttttcttgctttgcgtgctcagtttttacagactgtaaaggagatgtgttgtttgtgaagatggagcagagtcaaatctgtgcttctaactgagatgagagtgtattaatcacgtatcgcagggctccagctgttttagaagcccatcatgttaaacattaactggtttggat

SEQ ID NO: 47025 - DNA, 330 bp, Homo sapiens; identical to SEQ ID NO: 18989

SEQ ID NO: 47026 - DNA, 901 bp, Homo sapiens
gagctgctggccgagcacatcaagtccctgctcatcaagaacaacagcctgcctcgcaagagacagagcctgaggagctctagcagcaagctggcccagctgactctggagcagatcctggagcacttggacaatctgcggctcaacctgaccaacaccaagcagaacttttttagccagaccccaattctccaggcgctgcagcatgtccaagcgagctgtgacgaagcccacaagatgaaattcagtgatctcttctccctggcggaggaatatgaggactcttccaccaagccacccaagagccggcgaaaagcagctctgtccagccctcgaagtcgaaagaatgccacacagccccccaatgccgaaggaagagtcggggttccagcagtgcttcagaagaggaagacacgaaaccgaagcctaccaagcggaaacgaaaagggtcctctgcagtgggctctgacagtgactgaggccctgcattccccatcccacccccggctggactgccctctccttcttggtgattcaaaggttaatagaggctgaggagattgcaggggaaacacccttgctgcatccccaagctcccccggtggaaggaggagctttctcctctggctgagtttgagaagctgccatgcagcccctagccccttccctcctcctgggggcctcagcccctcacactgctgttcccagtgatatttgggatctgactgaagccagaggctctgtaaaatcagaccatagtggaagtcctcagccccctggccccttccgcaatctcctcccccagtctcccaaagagccatttcaacagagaagggaaatgacaaaggggcagctggccagataagctaggatgagagcagagactcagtgtgtgggtgtc

SEQ ID NO: 47027 - DNA, 2937 bp, Homo sapiens
ttttttttttttttttttctgtggaacaaatctgtttatttgcagaacacaattttgaaaagggttattctgaatgtctatgaagtgttttaaatatggtacattttaatgaggttatataccaaaatagcctaatcaccaacaatgacagaaacatccaggatacaacttgtgaaagtaaaaatttttattttgattgatttctcaatgtatagttcagtataatgccagtttttaatggcaaaaatttggttccactgaaactccataatgctacagagagctactactttttccaggaagtaggttaacagctagaaagaaaaaggacaatttcctaggcagcatggcaacttaaactgcagatctaataggtctgcaacttttacactaaaaatggcacaaacagctggtgacacaagtgagaaatggggaacaagatgtgaacactgaaaagaacaatatatatactgtaaatatgatgaataaaccaaatgtagctataagaatcttaaaggatgattatagaaaagggaaccaaatattttcctcaaatgctttttagagcctttctgtagcaatacaaatatatatatatatatttatccaaaaatatgttttatacagataaatgtttctcaattaaagatgggaccaaagctataggtataacataaagcacattgtcttttgtaagactatttatccacctgaattttcaatttctttaaagttagtgcattaaatgttttccaaatataattacctgtcagtctttttatagatataaatcaagtaggcattatgttttaaaagtgtttgcaggttaaacttttctaagatgctgtgcatattaaacttattatgagccccattaagaatcattattaataaacatatcaaaaagggctatatgtcagattttcctgttcatagtaaatattttctgatttccagtttacaagtattgaaaatgcacaagaaagattttacttcacaagtacttttaagaatatactttgatttaatatgtatgttagtaaaactccacgtgttgtaaccattattatgtttttgtttttaaaatggggatgtaatactaataaccactacctataaaataaagcacacaattgttccggtgattttacaaatctttttttccaggtgtaaagtctacaaaaattccaaaaaattagagaacactgaaaacatattaaagtttgacatccaactttatagtatttccatgttaccctgaaagataacttaaaaaatatggccttcttagaacaggccactctgctattataaaaaattggtgacagcaagaaattgtatcactgatatgtggaatttttgtaaatagttttctctccaaatcattagaaaaatgttcaaaaataaaaacaaaataaaatatggtggtggtccctaaactattttgaaggcaggtagcttagtctaagctaaaatatttttttcattcatagcaataatcctcccctcaaatgccctttaaaaaaatgcatgaaaccgtacaatagcaaaaatcaaagagcacagactgtattttcaagaacagaaaaatctctaatgctgaaagatatagtagaaagcagatttctttggggacattaatcaattagtttataattcattatgaagatttctcttttttattccggggagagtctgctacatttgaagttaatgttccattcacaccattttctgttccttttttagaagatctgcctttagttactgttggtttcttcttcacagctggtgcctgaaaagcagaatgttccctccaccttcgaagctgaaaattaatgaacttccacatcataaatgcctgagtaacgcaaatggatgccagaacagcgattctaacagctaacacattgaagtttcccagtactgaaatccagcttctgattttcctgctcttgcaaggcccaaaaccaacagtcagtactgaaagaattaaagtcagaagtcttcccaaaacaaaaagaactgcccacagagaaaatcctttctgatacttttcattgctaaaataaaacaggcgggaaatgtggaaaagaaattcaacaaaataatgtagcaccagaagaacaagtcctagatgattcaagttcaaaaggtaagctccagcaatgtggaagaggtaaagaccaatgtagacaagctgacgaggaatatcttcttttttggttttctggaagtagagttcaggaaaagcatgaagccagtaagccagctgtgatatgtagaaaaacttcatttgaaatgtcatcaggttatggggataagccctccataagatagttggggtctgagatgtagttttcagagatgagaatgaatgtgccccaaacacaggcaaaaaggtagaacgcactaagctgaccagattcattaaacttgctgtgttttgttttggagaagtgcattcgcctgttaattttatccaacatatactcttgaattacggcatgaataattatcgccactagcatgtagaagaaaacagtagccaaatctttgatgccatagtaataaagggacactgattcagtagcttgttcttctgttgctgggagggtgacattgtactgaagagtaacaaaaatgatagaagcttttgccgttatctcaaacatgagccccagcaggaagaccatcgccacacaggagacgatgtccgcgtgattctgcaggacgaattcgtggctcagcactggggggctcttggtgcttttcttgcgaatcgccatggtggggccgccgcccgcgcctgcaggtgctccgccccggttctgctcttcccagctgctcaccgacctcgccgccgcctcccgctggctgctggtcacggccccgctgcagccgctcgctggggcttcacttcccatcccacagcca

SEQ ID NO: 47028 - DNA, 981 bp, Homo sapiens
gcagcgcagggagccaggcgggctgccggcgggtgtgaagaaaaaaatgacactccaatgggctgcagtggcaacctttctttatgccgaaataggactcattttaatcttctgcctaccttttattcctcctcagagatggcagaagattttttcatttaatgtctggggtaaaattgcaactttttggaacaaggctttccttaccattatcatcctattgattgttctatttctagatgctgtgagagaagtaaggaaatattcctcagttcataccattgagaagagctccaccagcagacctgatgcctatgaacacacacagatgaaactttttaggtctcaaagaaatctttacatttctggattttccctatttttttggctagttttgagacgtctggttacgcttattactcaactggcaaaagaactgtcaaacaaaggtgtacttaaaactcaagcagaaaatactaacaaggctgccaaaaaatttatggaagaaaacgaaaaactaaaaaggattttgaaaagccatggtaatgatgaagaatgtgttttggaagcagaaaataaaaaactagtagaagaccaggagaaactgaaaactgaattaaggaagacttcagatgccctttctaaggcacaaaatgatgtgatggaaatgaagatgcagtcagagagactttcgaaagaatatgatcaactcctgaaagaacactctgaacttcagaagcaaagggagatattaccacacagaagaggagaaagcacagtgaccacagaggcagagattggagtgatggagccgcagcaaaggaatgctgacagccaccagaagctggaggaggcaaagaacagattcttccccagagcctcttccagcaggagcatggccctacagataccgataaaactgatattggacttcctggcctccagaactatgggaataaatttattgtttcaagctaaaaa

SEQ ID NO: 47029 - DNA, 1523 bp, Homo sapiens
aaacagctatgacatgattacgaatttaatacgactcactatagggaatttggccctcgaggccaagaattcggcacgagctcggccttagccatggcgagtagcagcggtgctggggcggcggcggcggccgcggcggcgaatctgaatgcggtgcgggagaccatggacgttctgcttgagatttcaagaattttgaatactggcttagatatggaaactctgtctatttgtgtacggctttgtgaacaaggaattaacccagaagctttatcatcggttattaaggagcttcgcaaggctactgaagcactgaaggctgctgaaaatatgacaagctgactttctggagaaattctgatgagatatgtcaagctctgcaagagggtttgaagattgcattgtagttgagaatgtacaatgaaattactgcatgcagcagtgtagaaaaattttactttttaaaagaattataaaaccatagctttataaatcagtggaaagtggcttacagagagaactatcagatgtgtttacatcacatcttattcactttttttaacagctctaatgctttggcattgctatgttcatatttatgtattccttatttatagctctgatagctttaattttctaagcagtctgtctatcagatgtgcacatctgctgtgccaggttgaagtatagtgggacccatcagtagtaatgtgtagtagttatgacttgttgacatttccattataaactttaattttgaattgtttatgcattataactgtggatttatattgtattgggctgaaagttgacaggatttcagccaccacttgtgaatttttatttagattcattatgtatatcagaatcttgttttttgaaataagagccatggaaaacatttcttgtaatctactcttgaacaaagaatatttagtttttcaaacagtttgttgggcagctaatagtgtgaaccaggtcatttttgtattgagtaaaaaaatcaaactttgagaaacttggattttaaaagtaatgacaatgcttaggttagtattatttgtaatttgaatcatttacatctaatgagaatgttagttgagaatgttttcttaaagttttatatcctataaataacggaataaaaaaatttgtaaaatgaaacaacaaacatgcaaaattcctatttacttttattacataaaagtaattttagtgcttacctaataaatcttgaatggttatttaataaattattagatgggtgatgtgtttcaaaagatacttgctattttttgaagaaataaggatttccagtcattaaacaaaactaaacaatcttattagatgggtgatgtgtttcaaaggatacttgctattttttgaagaaataaggatttccagtcattaaacaaaactaaacaatcaaatgttctatattaggaatctcaagtatggctttttttaaaaaacctttttaacatcttgatgtcaaggattataagtatggcttttcagaattg

SEQ ID NO: 47030 - DNA, 1149 bp, Homo sapiens
ttttttttttttttttttacctttaaagagaaatgtaaaactcagtttaatttcaagtttgtatagagaatgtatgccacagtttgtattttataaacacaacctatcttattataaatacaaaataagaaaaagtgatacgttagctgttatgaagggtgaaaacattatataaacttcaaaaggctgctttctgcatctgcatctatgtaatttcatggttctctaccaatttcatttacagaaataatctctatagtcaaattattgttcactttcatgccccaacatgggaagtggtaggtgaatatctgtaggaatacaatttattgtctgctcctccactcagaagtagccctgtgtctgtccagtctacactcagaactttgtcttcatgagcagccagatcatagagaggagccttacaacttcttgtatcccacagcttaacaatgttatctaaagatcctgaaatcagctgctgttcatgggtaggagaccattttactgatgtcacccaaccagtatgtgacgttaggggacagcgacaccaaagaaccatctttagttcggggatcccacagtctgatatgcctatctgtgcttccagatgctaaacgtttacaaagtggagaataggaaatacaattaaacactttatttcctgtcaaagttgacttaagactgccagactcaacatcccacactctaattgtatggtcccaagatgcactgcagatttcttcagcatctgaccacagaactgaggaaactgcctccatgtggccagagagggtcactatgggagtccttgttagtcccaactgttctgtcttctgtttctttcttggtcgatttgtggactcctccatttcatcttcttcatctgtagggactgtagaccagatctttagcatcttatcccaggagccactgcaaaatttagttcctgagccatcaacagctatagaatctacacttccagcatgacctctacagcagtgtagggctttcactttgtttctctctacattccactcccataagagaatagtctgatccatagaagcactcaataataagcaggacaaactatcttttttcacccaggccacatcttttacaaatccgtatgtcccacaattgtca

SEQ ID NO: 47031 - DNA, 1657 bp, Homo sapiens
gtgggcccggccttagggtggaggctttagtgtacggggacagccatggccacacagcacacatgtggagcagcggctctccctggaaagctccaggcctgaatggatggactcagcgactgcaccagtggcagctggtgactgtggacagtggtggaccctgcttctgtgcacctgctgcaggctctttttatgaaggctttcatgaattttagtatgtaatacgcactgacgacacatgatgcttggatgacagatgagaggggatggctgagtcctgtggctggcccgtgatgccaggtggcccatgtgcccagggcgcctgcagggctgctacagggacctggtcaggaggtgcacatggtgccctgccctcacccaccctctgtgtttccccttctttgaaaaggtagaagagaaaggaatattttaaacctttttggcttaaacagaattttagcatcagaactagctttctgggattggaggcaaaccatcaaggtggtccctctccagtctggacacgatgccagcaaggatgacgtcctgccacctcctggagttaccctggcctcctagggtccctttttctgatgaagtcttaatgccctaaaagcgcctctttggacactgaggccctctctgcctttcctgggcctccggcaacagttttttacaaagattttttgcagtcgagtccatatgtccacccattgatttttaaagcttttgtgatattttagcattttgaaagactttcacagtgagagtagaaggtagatttggaatcatgcattttagcaagtggacttgttgaaacaggaagcaagggccttcagtgtagcccattcttgatccagagctgttgcctgtgacagcggtttctctggatgtcaaaggcagctgcctggtgcccagcttgcttctcgactggtggcccctatggtgggtgtgcgatggaaatgtgttcctgccggagtctgaggcaccagggtgtgctcaaaggctggccctggtggtggactggcacctgtgcagagtgccgtgtgcttgtggtgcgccatctgaagcaagagtccagcgttctgccgtgtctgtcccccaccatgccccctacaggcggtactgatggcgcttttttttttttttctgtcaggaaaacaatgttgggcctgtgggccgcccacaacatatccttccctcactacctgtgtgaccaaggttggcttctgttgacctttaaaaaagaaaccctcaactcaaattgctataattagacacttgcttctgtcttgcctcctgtctgcagctgtgaatagtcatttgactgtgactgttgcccttagccagccagatgcgcctgtgaaccaaagcttcgtgcacatgtgttcccctaaaggttggggagcctcgctgtgtcttgctgttcccaggcaccaccacagcaggtgctgccatactcttgtggtctctgtgcgccccccccccccccccacccgtctgccaagcatgggtatgaatcgtgcacacagccatgcttcaaggccggggcaggggagcctgtgctgatgccatccagggcactgggctgtgcctggaaggcgagccttgattgtctgaacacataaagcaaactgtccagaaaaaaaaaaaaaaa

SEQ ID NO: 47032 - DNA, 1639 bp, Homo sapiens
ggtttggactggatatcggtggaactctggtcaagctggtatattttgaacccaaagacatcactgctgaagaagaagaggaagaagtggaaagtcttaaaagcattcggaagtacctgacctccaatgtggcttatgggtctacaggcattcgggacgtgcacctcgagctgaaggacctgactctgtgtggacgcaaaggcaatctgcactttatacgctttcccactcatgacatgcctgcttttattcaaatgggcagagataaaaacttctcgagtctccacactgtcttttgtgccactggaggtggagcgtacaaatttgagcaggattttctcacaataggtgatcttcagctttgcaaactggatgaactagattgcttgatcaaaggaattttatacattgactcagtcggattcaatggacggtcacagtgctattactttgaaaaccctgctgattctgaaaagtgtcagaagttaccatttgatttgaaaaatccgtatcctctgcttctggtgaacattggctcaggggttagcatcttagcagtatattccaaagataattacaaacgggtcacaggtactagtcttggaggaggaactttttttggtctctgctgtcttcttactggctgtaccacttttgaagaagctcttgaaatggcatctcgtggagatagcaccaaagtggataaactagtacgagatatttatggaggggactatgagaggtttggactgccaggctgggctgtggcttcaagctttggaaacatgatgagcaaggagaagcgagaggctgtcagtaaagaggacctggccagagcgactttgatcaccatcaccaacaacattggctcaatagcaagaatgtgtgcccttaatgaaaacattaaccaggtggtatttgttggaaatttcttgagaattaatacgatcgccatgcggcttttggcatatgctttggattattggtccaaggggcagttgaaagcacttttttcggaacacgagggttattttggagctgttggagcactccttgagctgttgaagatcccgtgatcattacctggggaggggttcctgaaaccttccacaatgggatctgtggactttcatttttttaagagacttactcaatttcatgactgtactacctgaaacaaagtgagaaaggacaggtgtatttttctaagtcatcaagataaatccttaagaattcagtctaaattagcaaccaggaaggaaaaatatattaaaaacaacaaaaaagtggcacatgtccaggcagtgtgaggatttgctgtatataagttgcctgctttgtatttttgaaatctctgcatcactcattggaagtgcttctgaagagagctgctctgtgttcagttgactggttttgtgtcctgtttgaacttgctgaatgtaaggcaggctactatgcgttataatctaatcacaatttgtcaatatggtcttggcaatcatctgtgcattactctggtttgcattaagcctgtgtgtgaacttactgtaaaacatgttttatttcaaggttctgcaaaattaattgggcaggttaattgtgtacctgaaacttaacaagcagtttttggaagggcaaa

SEQ ID NO: 47033 - DNA, 1484 bp, Homo sapiens
tttttttttttttttagtttatcaaaagaatttattagaaaatattacacactacatacatatttatttaagagtataatttcagtagacagcactccaacttcataatacaaacaatatctcatggaccctggggcaatcactgtgcttctgaagctacatcttttggatggaacattccagcagtacacactgtggccatttaaaggaaggtaagagaaaaaaatgtgataattaccaaaacaaattttaaaaagcacaaaacttttggaatgttaatggataactactattagtctcaaaattctaggcatttctataaaacattggtcaatgtgactagtaagttaacgggaccaaggtttcaaagatcaatactgaaccttgataaataataagaggaaatgtaactcccacaaaatgtttctgattaagtttgtgcccatgcaaaattaacataaatttcttaactcaagaatgaggaatattaaagcaatgtattttttcaacataaagcatgcattttctaatacattcttaaacatttcaaaattttaaaagttcgaattctaatcaagtagctattaatgcagtctaaccagtgccccaaatcagacatggaacacacacttgttactgtcacggaaataattcatgggagtgctactaaagatatatgagacttcaactcttgaccacatcactttttctccaaaactttagaacttgtttgcaaaagcctaaatggtataaaacacattttaaaatgtcacccaattctcaaatgtcactgaaagaaaatgcaggaaaagtatgtattgtgtgattaatcagcttaggcttaactcaaaatactttcaatgttcacaaaattgtttctagagttctaatctaaaacaactaaggaggtgtgccttgatattctgaaacactgtcttaatactttattagaagaaatatgcttgaaatttctttaccataatctaaacgcaaactttaaaaatatataccagtagaataccatattacaaatgcccagaaatgtagaataaaggtcaaaaactgcttggaaatatttttatgattacactcataacaacaaagcttatgaactagcacaatcattatgggaccaacatttcaaaatattttgcctatcaaagctagcaccaggaaaagtattatgcacataaaattgagaaacagataatctttactttagaaaagcacagttctacagagtattgctctggctaaatagtttagctagtaaaaaggtcagtttatctcactgaggcatgtatctccttggatctattaacttatctgaagaactttccaggtacttggtatgtactgaaaattcttactggaatcagtttatcatggagaaaacctactgttctttcaagatgccagttaaaataatggcacaataaacattttaaacttaccttttataaaaactgagatattctagtatt

SEQ ID NO: 47034 - DNA, 864 bp, Homo sapiens
aacaggaggaagccagctctgtgcctggaggggactcgccgccatctcaggtctcttggctttgccagggcccaccggagaaaactgacgacccgtttctgtaatccttatgggagaccaaccttgtgcctccgggagatccactctcccacctggaaacgcacgggaagccaagcctccaaaaaagcgctgcctcctcgctccgcgttgggattatccggaaggaactcccaacggaggtagtaccactctaccctccgcacctcctcctgcatcagccggcctgaagtcgcaccccttccccctccggagaagtagagaaataaatttctcccaccctaaaccagtctttgagtgattgcagtatgactccatttccctggtgcattcatataatagttcacctggtgaaaacaatgaagattatttacaaatgctaccctgctttttctggtgtcctgaacctggaagttgtgctttttaagtcttatgatgtaatcagcacgatttcacttcctgaatttcgatgaattctaagacatgggcaagatcgggttgtaagacctctgagatttaaggccatgccctggatcatggtgaacttaccaaagcaaacaatgcctgtgagatggtcctgcagcagccaaccagtgaactcttttggtgacatcctgttcttgttgtataactttatattcctataaatccattaaggccccaataaagtttgtctctaagcgctgtgttagatctatatgactacatctagtaaaattgtgaattttaaagtaaatattttattaaggaactcctatgtaaagcattactaaaattagtgttgaaatatgaaaaaaaaaaaaaaaa

SEQ ID NO: 47035 - DNA, 1100 bp, Homo sapiens
gtcatctccggcgcttctagggctggttcccgtcatcttcgggagccgtggaggtacgaacttaagacatgcctattttattaatttacttccaaacgcaacgaaaggtccatggacaatttgtgggccatttaattcagggcccccaattcgtacgtggagaagtgggaatgcaaaagtactttgacctttaaccttcggtccggcgcggtggagggaaacgcctccgtctctatataaggaattttccggtctcttcgggtcctttttcctctcttcagcgtggggcgcccacaatttgcgcgctctctttctgctgctccccagctctcggatacagccgacaccatgggtttcggagacctgaaaagccctgccggcctccaggtgctcaacgattacctggcggacaagagctacatcgaggggtatgtgccatcacaagcagatgtggcagtatttgaagccgtgtccagcccaccgcctgccgacttgtgtcatgccctacgttggtataatcacatcaagtcttacgaaaaggaaaaggccagcctgccaggagtgaagaaagctttgggcaaatatggtcctgccgatgtggaagacactacaggaagtggagctaccagatagtaaagatgatgatgacattgacctcttttggatctgatgatgaggaggaaagtgaagaagccaaagaggctaaggggaagaaccgtcttgcacaatatgaatccaaagaaagccaaaaaacctgcacttgttgccaagtcttccatcttactagatgtgaaaccttgggatgatgagacagatatggcgaaattagaggagtgcgtcagaagcattcaagcagacggcttagtctggggctcatctaaactagttccagtgggatacggaattaagaaacttcaaatacagtgtgtagttgaagatgataaagttggaacagatatgctggaggagcagatcactgcttttgaggactatgtgcagtccatggatgtggctgctttcaacaagatctaaaatccatcctggatcatggcatttaaataaaagattgaaagattaaaaaaaaaaaaaaaaaaaagtcg

SEQ ID NO: 47036 - DNA, 935 bp, Homo sapiens
  misc_feature (1)...(935): n = a,t,c or g
ttttttttttttttaaggctattatctcctttattcaaaaaataaatatttcactttgattcaacatatttcaaatcacattaagcacagagaagaaatacagtccctttggagattgtgaacacgtgttggaaagaggcatgatccaaacaatgggaatgaggtgagtgtggattccagctgtttcctgacccagaggttccatccctcttcaggtggagctacttatcgatttttaggagagaaaaagaannnnnnnnnnnnnnnnnnnnnnnnnnnnnnnnnnnngcgcgcggctttgaagtctgaaaggcacatgaagtggaccataaggtgtatggcacattcactgataaaacatcccctattccctcccaagaaagcggagatactttaatcaagtccaaagaccagagaagacagggtgctcctgcttacagctcagcaacatgaacatctctgaatatgaaagccattttttgtttgcgtccccctcccgcgcctcctctccctgccgatggggtccgcagccggctgggcggctcaactcggtgatgggtgggggcgcgtggccacgtacacaaacaccacgatcaagagcacgaccacggccagcgtgggcagtaccactgtagtgatctgctgccgggcctcctgcatggcttgcttccgctccttcttgtccttggaggtctccttcttgggcttccctttgagctgccgcatctttcctagaggatgctaggagggtgtgtccagagggattccaggaagggccacactcctcttgccaaggctggaacctcctgtagagagaacaacttttcttcaacttcaagaatcgttgattaatttcagcaaactgatttccagtacaggtgacttgagttattctctgcccgcgcgggccgccgccgccgccgccaccactgccg

SEQ ID NO: 47037 - DNA, 3125 bp, Homo sapiens
ggagaggtgcgggccgaatccgagccgagcgagaggaatccggcagtagagagcggactccagccggcggaccctgcagccctcgcctgggacagcggcgcgctgggcaggcgcccaagagagcatcgagcagcggaacccgcgaagccggcccgcagccgcgacccgcgcagcctgccgctctcccgccgccggtccgggcagcatgaggcgcgcggcgctctggctctggctgtgcgcgctggcgctgagcctgcagctggccctgccgcaaattgtggctactaatttgccccctgaagatcaagatggctctggggatgactctgacaacttctccggctcaggtgcaggtgctttgcaagatatcaccttgtcacagcagaccccctccacttggaaggacacgcagctcctgacggctattcccacgtctccagaacccaccggcctggaggctacagctgcctccacctccaccctgccggctggagaggggcccaaggagggagaggctgtagtcctgccagaagtggagcctggcctcaccgcccgggagcaggaggccaccccccgacccagggagaccacacagctcccgaccactcatcaggcctcaacgaccacagccaccacggcccaggagcccgccacctcccacccccacagggacatgcagcctggccaccatgagacctcaacccctgcaggacccagccaagctgaccttcacactccccacacagaggatggaggtccttctgccaccgagagggctgctgaggatggagcctccagtcagctcccagcagcagagggctctggggagcaggacttcacctttgaaacctcgggggagaatacggctgtagtggccgtggagcctgaccgccggaaccagtccccagtggatcagggggccacgggggcctcacagggcctcctggacaggaaagaggtgctgggaggggtcattgccggaggcctcgtggggctcatctttgctgtgtgcctggtgggtttcatgctgtaccgcatgaagaagaaggacgaaggcagctactccttggaggagccgaaacaagccaacggcggggcctaccagaagcccaccaaacaggaggaattctatgcctgacgcgggagccatgcgccccctccgccctgccactcactaggcccccacttgcctcttccttgaagaactgcaggccctggcctcccctgccaccaggccacctccccagcattccagcccctctggtcgctcctgcccacggagtcctggggtgtgctgggagctccactctgcttctctgacttctgcctggagacttagggcaccaggggtttctcgcataggacctttccaccacagccagcacctggcatcgcaccattctgactcggtttctccaaactgaagcagcctctccccaggtccagctctggaggggagggggatccgactgctttggacctaaatggcctcatgtggctggaagatcctgcgggtggggcttggggctcacacacctgtagcacttactggtaggaccaagcatcttgggggggtggccgctgagtggcaggggacaggagtccactttgtttcgtggggaggtctaatctagatatcgacttgtttttgcacatgtttcctctagttctttgttcatagcccagtagaccttgttacttctgaggtaagttaagtaagttgattcgggtatccccccatcttgcttccctaatctatggtcgggagacagcatcagggttaagaagactttttttttttttttttaaactaggagaaccaaatctggaagccaaaatgtaggcttagtttgtgtgttgtctcttgagtttgtcgctcatgtgtgcaacagggtatggactatctgtctggtggccccgtttctggtggtctgttggcaggctggccagtccaggctgccgtggggccgcgcgcctctttcaagcagtcgtgcctgtgtccatgcgctcagggccatgctgaggcctgggccgctgccacgttggagaagcccgtgtgagaagtgaatgctgggactcagccttcagacagagaggactgtagggagggcggcaggggcctggagatcctcctgcagaccacgcccgtcctgcctgtggcgccgtctccaggggctgcttcctcctggaaattgacgaggggtgtcttgggcagagctggctctgagcgcctccatccaaggccaggttctccgttagctcctgtggccccaccctgggccctgggctggaatcaggaatattttccaaagagtgatagtcttttgcttttggcaaaactctacttaatccaatgggtttttccctgtacagtagattttccaaatgtaataaactttaatataaagtagtcctgtgaatgccactgccttcgcttcttgcctctgtgctgtgtgtgacgtgaccggacttttctgcaaacaccaacatgttgggaaacttggctcgaatctctgtgccttcgtctttcccatggggagggattctggttccagggtccctctgtgtatttgcttttttgttttggctgaaattctcctggaggtcggtaggttcagccaaggttttataaggctgatgtcaatttctgtgttgccaagctccaagccccatcttctaaatggcaaaggaaggtggatgggccccagcacagcttgacctgaggctgtggtcacagcggaggtgtggagccgaggcctaccccgcagacaccttggacatcctcctcccacccggctgcagaggccagaggcccccagcccagggctcctgcacttacttgcttatttgacaacgtttcagcgactccgttggccactccgagaggtgggccagtctgtggatcagagatgcaccaccaagccaagggaacctgtgtccggtattcgatactgcgactttctgcctggagtgtatgactgcacatgactcgggggtggggaaaggggtcggctgaccatgctcatctgctggtccgtgggacggtgcccaagccagaggctgggttcatttgtgtaacgacaataaacggtacttgtcatttcgggcaaaaaaaaaagtcgacg

SEQ ID NO: 47038 - DNA, 1319 bp, Homo sapiens
gaacagcagtgaccgagatcgtcaacaggagtgcagctcccgcgtcgcctcctggggctggcctctgacccccacacctttggacccccatgagcccgagcgacctttcttcgagggccacttcctccgagtgctgtttgaccgcatgtcccggattctggatcagccatacagcctgaacctgcaggtgacctcggtcctgtcccggcttgccctcttcccccacccccatattcatgagtacctgctggatccgtacatcagcctggggccccggctggcaggagcctattctccgtgttggtgagggtgatcggggacttgatgcagagaatccagagggtaccccagttcccatgcaagctgctcctggtgcgcaagcagttttgacgggccaggctcctggggagcaggctggaccaccagaccctcctccagggcgtggtggtgctggaggagttcttgcaaggagctggctgccattgcctttcgtcaagttttcccccacatgatcctcgccagaacgtcttccccagccccggaagggcaaggtctgagccagcaccaggggcggtgggagactcctgttccacacctctgccccagagctgcctcctgcctgggcactgccgccacactcccctcctggggatggggcttctgctcccgggctcactcaaggagactgcggcatgttgaccacaccagactgggtttcagggaatgggcatgccatgtgccaaggagccaaacagatggctttccaggcagcaaggtccttggggccttcttggaggagcttgggtgacagccagggttagcacccagaccccagaccctcatgtgctgtgtgcctggccccttctgtactggccatttgtggcagggccaagcctgtgactcaactccaggggcaagatggggagtgagctgatggctccgagactggtcaggagcccaggccagtgagatggggcctggagcgttgtctgtgtcacattaggtaccatgggagctgctgagacctgacattttgtcccctgcctacatggcttggcccatggagaaggagcagtgaatgggatcgtcggggaagcccctcttcctgctctgctcccctggaaactgttgcaaaactcccagccgcctcatggcaaatgcccaaagcatgttccgcacccaggcgggggccccgtgctaatgagaaccttggtgcagctgcagccaggaggggagcgggcccaggagccaggctcaggtccagctggttcctctctggcgccttctgaacccgtctcacaggtccacagcacctgggc

SEQ ID NO: 47039 - DNA, 823 bp, Homo sapiens
ggtacttgaaaactggaacagcttgggaatgccatggggtttgataatctgccagggacatgaagaggctcagcttcctggaccatgactttggctcagctgatcctgacatgggagaacaaccacatttttctttgtgtgtgcttctagcagctgttcgggaggaccttgacccaatagtgttcccatgctgtttcttgtgaaatgctctcggctatgtagcagcttttgattccctgcataccctaggctgctgcccctatcctgtcccttgtttataacattgagaggttttctagggcacatactgagtgagagcagtgttgagaagtcggggaaaatggtgactacttttagagcaaggctgggcatcagcacctgtccagctctacttgtgtgatgtttcaggaactcagcccctttttctgcctaggataaggagctgaaagattaacttggatcttctaatggtccaaatcttttggtcacaataaagagtctccaaattagagactgcatgttagttctggatggatttggtggcctgacatgataccctgccagctgtgaggggaccccgtttttaagatgcatggccaagctctctgcaaatggaaatgcttacactgggtgttggggatgtttgctacctcctgctatttttgtggttttggttctcccactatggtaggacccctggccagcattgtggcttgtcatgtcagccccattgactaccttctcatgctctgaggtactactgcctctgcagcacaaatttctatttctgtcaataaaaggagatgaaaatattctattggag

SEQ ID NO: 47040 - DNA, 510 bp, Homo sapiens
gggcccgtggcgccgacaggatgggcaagtgtcgtggacttcgtactgctaggaagctccgtagtcaccgacgagaccagaagtggcatgataaacagtataagaaagctcatttgggcacagccctaaaggccaacccttttggaggtgcttctcatgcaaaaggaatccgtgcctggaaaaagtaggagttgaagccaaacagccaaattctgccattaggaagtgtgtaagggtccagctgatcaagaatggcaagaaaatcacagcctttgtacccaatgacggttgcttgaactttattgaggaaaatgatgaagttctggttgctggatttggtcgcaaaggtcatgctgttggtgatattcctggagtccgctttaaggttgtcaaagtagccaatgtttctcttttggccctatacaaaggcaagaaggaaagaccaagatcataaatattaatggtgaaaacactgtagtaataaattttcatatgccaaaaaaaaaaaaa

SEQ ID NO: 47041 - DNA, 2055 bp, Homo sapiens
ttttgttcagctgctttctttattagaaacaagtgagatgtattgagcagaacaacaatgcatttggtatttcctccccgaccctggaaatggatgcccccccacagcccaaagaaaagccaagacaaaaaggtgaagctcccccgtccctgttcccagacatggcacctgcctgccagccagtcagtattttttaatttaatggaatgaaattgtcctcaacagcctccgtacgtgtagtcggcttgcaggcccgccttcattttgcagcagagtaaaactgaagcctcaggcctcccctggttctggggaaggtgggccaggccatcagaaggctgcatgaggatgtaattaactggaaaacacggagaccagagacacgaccggaggtgacgtcacgcagcccacgccatcgcaatacaattgtcaagttcgctggcggtttggtaaagccggttcagttctgctccctttgccagggattctcacgtgtgtgaaaattggaccaacagtggtggggttccatttcctggttcgaattttcagtggctttatctagaatcgcactggtgactggttattgtagcaccagtccaaccttctctgcccccatgctggggcatttccaattgtaaaggtaatactgcaggttgccgtcccctatgccaaacttgagcttctccaggaaggttttgttctccatgagatccagtgcattgaacacatcaaaccctttcattttggcgaggacaagggcgtcgctcatgaggtctagaagaggggtctgggtgtgaacgttgtagaaagaataagcagctttgagactcttgtgggttggatggttcatgatggtggagggcagcgtataaaagctcaggaaatctgtcacctctccgtttgcgttctccaccacgaaagtgtcgatgatattctcctgggggtagaaccagtgctccacctcctcctggctcatgacgggcgtaaggtgaaattgcttcaagtacctggtgaggagctggtgcactactggaatgtcctttgtttccattggtcgcagcccagctgtcttgggagtctctggcagtcggtagagcttcatggtgcgctgcatggtcatatttctgctcaggtgggagaacttcacttcaatcagcttccgtgggtttagggaccgatgccaatacctgcaggtgccaacgggctttggtagtaccaccccggcagtgtaaactgcttggaagatgccctccaggtgaacccgcctggtgatctctcggatcagaactggagcaaccctcttggaacgcagcttcttgtggacacacaggaagttgatctctaccatcttcttctctgtgtcatagatatggatgtttgctgggatggcgctaatgaacccaaccaatttccgacttgagaccactcgaaccccacagtgccactgggggagccagccgggtggccggagagcccacaaaagaaactccggggaataatcaaatcggaacatgttgtcatcatcttccacatagttctcattcaggagggtgtacagttcttttagcacaccacgatcgcccaggtccaaagcatcccaggtgaagccctggggcagggtgtagggctcctggcggatattgtccttgtcaggctccacggggccatgggtgttcaccacttcgcccagcttggggacgggctgcgtatcccagaactggtagcttcgcttgctagcctcctccatggttttggcaggtccctgacccactgagaacagctcaatggccttctgtatttcctggatcctctctgctggcaaagagttcatcttcacaggctgatcctgggctgaatctgtctcactgcctttttctttcttctttttttgtttctttttcttctttttggctccagtgtcattggctggactcaaaccaccccggttgtagctgttgtcctcctcattctcgcaatcgctgcagtgctcatggccgttcccgttcccttccatcatctgcggcagcggaggtgccggcggcttcactgctgtctcac

SEQ ID NO: 47042 - DNA, 824 bp, Homo sapiens
gtccgtgtacacacactcacacaaggacgccaaccccacctagatgcaaagcaggattcaaaagaacatctttgcgttttctaccggctccccatcatcgtactagggaggaagaagcgggtgagaaacaaaacttctttccattgtcctgcccgtttctgcggacttgttctgaggccgaggagcctgtgttggaagagatggtgatgggcctgggcgttttgttgttggtcttcgtgctgggtctgggtctgaccccaccgaccctgggctcaggataactccagggtacacacacttcctgacccagcactatgatgccaaaccacagggccgggatgacagatactgtgaaagcatcatgaggagacggggcctgacctcaccctgcaaagacatcaacacatttattcatggcaacaagcgcagcatcaaggccatctgtgaaaacaagaatggaaaccctcacagagaaaacctaagaataagcaagtcttctttccaggtcaccacttgcaagctacatggaggttccccctggcctccatgccagtaccgagccacagcggggttcagaaacgttgttgttgcttgtgaaaatggcttacctgtccacttggatcagtcaattttccgtcgtccgtaaccagcgggcccctggtcaagtgctggctctgctgtccttgccttccatttcccctctgcacccagaacagtggtggcaacattcattgccaagggcccaaagaaagagctacctggaccttttgttttctgtttgacaacatgtttaataaataaaaatgtcttgatatcagtaagaa

SEQ ID NO: 47043 - DNA, 1773 bp, Homo sapiens
ctgctacatcctcatcctcctcttcaccttcatccagttccataacagctgctgttatgttaactttagctgaaccgtcaatgtccagcgcatcacaaaatggaatgtcagttgagtgcaggtgacagcaggacttgctaaagcactttgcacttaatggctgttgagggccactttttttttatactgcacagtggcacaaaaaaatatcagacaagcactattttatatttaaaaattgtttcttgacaagctgacttggcacttaagtgcacttttttatgaagaaaaagtacaatgaactgcttttcctcaagcaataattgtttccaacttgtctgggaattgtgtgtctggtaactggaaggccttccactgtggcaaatggaggcttttcactgcctgtagagacaatacagtaagcatagttaaggggtgggtcagaacatgttaagataacttactgtatatgtattcccttgtattttgttaaagctggaacatttgatatttttccatttatttatgaaaaaatatgaacctattttcatttgtacaaggtaattgttttttaaagcaagtcaccttagggtggctttaattgtataagtcaagcacatgtaataaattcaaaacctgcagttaacaggatattagacatcaatcctggtaaccaaatattaaagattctctttaaaaaagactgaacatgtttacaggtttgaattaggctaaaaggtcttgcagtggcttttcatggcccttcaaattggaatggaactactgtactttgccatttttctataaatcagtatttttttttaattttgatatacattgtgtgaaaaaagaaaatggcctaataaactgtattaaatcttaaacaatgtataaagattgtacttagccagttcaaagtgtatatttattcataatgaattataacagttatatttttgtgttttcttgtaaatgtttcttttcccttaaatacagataattcatttgtattgcttattttattatgagctacaacaaaaggacttcaggaacaagtaatgtattagtatggttcaagattgttgataggaactgtctcaaaaggatggtggttattttaaatataaatagctaatgggggtggtaggcctataaaattaaatgccttgtataaaatccaaaatgaatgcaaaattgttttcacttgtattgactttatgttgtatgattccaatctctgttctgtttggcacttgtatttaattcttcacctttgtaagacatttgtatattgtggatgtgttcattcaagctatttaatatctggcactgttaatacacagtactttattgtacagactgttttactgttttaattgtagttctgtgtactttttttggatggggctggcatgttttctttgtttcctggcaatacgacgtgggaatttcaatgcgttttgttgtagatgctaacgtgtcagaatcctttacattcaacttttctaagaaaagcattttcagtcttgtagtgtgtgcttacagtaactaattttgttgaaaatggtttcaagttattcaaatttgtacaggactgtaaagatttgttgacagcaaaatgttgaagaaaaaagcttatagaataaaagctataaagtatatattaggatctgcaaacaatgaagaattatgtaatatattgtacaaatgtaaggcaaaggctctgaaataaaatgccatagtttgtgaatccttgatttttgtttctaaaag

SEQ ID NO: 47044 - DNA, 2561 bp, Homo sapiens
gctgctggagaagtcccgcaaggttcagcgcccacacgcgcgcggtcaaagagcgcatggataggcagtgcgcacaggtgaagcggctggagaacaaccacgcccagctcctccgacgcaaccatttcaaagtgctcatcttccaggaggaaaatgagatccctgccagcgtgtttgtgaaacagcaccgtttccggtgccgtggaagggaaggaggagcttccggatgaaaacaaatccctggaggaaaccctgcacaccgtggacctctcctcagatgatgattttgccccacgatgaggaggccctggaaggacagtgccgaggaaaaggtggaagaaagtagggcagagaaaataaaaagatccagcctgaagaaagtggatagcctcaagaaagcattttctcgccagaacatcgagaaaaagatgaacaagctggggacaaagatcgtatctgtagagaggagagagaagattaagaaatctctcacgtcaaatcaccagaaaatatcctcaggaaaaagctcccccttcaaggtttctcccctcactttcgggcggaagaaagtccgagagggagaaagccatgcagaaaatgagaccaagtcagaagacctgcctagcagtgaggcagatgccaaatgaccaggaagaggagtcctttgcagagggtcattccgaaggcgtccctcgccagcgctctggtggaaggggaaattgcagaggaggctgctgagaaggcgacctccagggggagtaactcggggatggacagcaacatcgacttgactattgtggaagatgaagaggaggagtcagtggcccctggaacaggcacagaaggtacgctatgagggtagctacgcgctaacatccgaggaggcggagcgcctccgattggggaccccgtgcagcccgccgtgcctccaggtgcaccagacctcctgagcttagagccaccgtgccatcctgtgctgtgctcaagcgggcagccagggctgaagaacaaactcttgcacatctccagcacgactcacccactcctgcgttcctgtccaggcagtaatcattgaccatatagtcatagtaagacacacgagaccaggctttaccatgaaagcgacctgtcacggactccacttttaatttgctcttaggttctatctctgtagaatgtctccaagattgaagaagaaactgagcagttgaaaaatgctaatctctttgacttagtcagaaaaaaacagaggataattaagatactagtcatgaaaagtgattcattcttttttgtcattccataagcttgctgaatagtgtaccggtaatatattgtatttccaccgtactctgtgaatctaattattattctttaagtgttgatatataatatacataaatatgtaagctaaacatataactatatgttttaagaagaaaacatctacgaaaggtaaaaagagatgatcagttggttgtttacttgctagaaaccattgttttattgcaaacgaaggaaaaatgaagagattataaaagtcagctaatgaagtaagatacgtagtaaagtcaggactattcaaaaagtaagaaagaaaatttggaaaatgagagaaacaggaaacaaagaatgccgaaaagaatgaaaacagagaaaaaatgtatgtgcttgaaagtaaaatacttacaatagtagcttaactatttcactctttaaataaaaatactaaagaagttcgtatatcctggaataacatgtcatcttcaaaatatttttattttctaatatttttaataataaacattttatagtgttaaagctgtatttttcttaataaataaaggacattacaaatatttctttaaggaagttcaaaaggatgttgtcttgttaacactggaacgaatataaatcttcaaaatacaattaatatatactgttttgtggaaacttagctcatactattctttaatgctcttcaaatttaaactaacccttacatccagtgatgtgatgtgggctataagatgctaaaatctataggtttggaagtgaaggattctattttttctttttttgtacataatgggaatttcattccagattatattttatttacatattaatttcacagaatattaatatttcttaacttcttaaagcatgctagcgttttatgtatatgtacacatatattcagacagggtaattttatctgctgcctaacattgtactaaaatattgctttatctgtttttaattacaaaatgctaatgatttcttaaattatagtttaaagacaattggcccaggaagcaaatcccctgcctttagtatgaaccactataagtaaccttacaaatagagttaatccaagacaatattaacaaactgtgctttgtctttaataaaagggataggattaacaaacatattgatggcataacctattcagctatgtccttatttttgcaataatgtaacctcaaatattggattgttgaaccaacaatggctgtgttaaagaagattaaataaaccgaaaaataaaaagcatg

SEQ ID NO: 47045 - DNA, 949 bp, Homo sapiens
gtcgccggaagtgccaccgagaagcgccggcctcggggctggtctacagcggcccgggagaggctgtggtggccccgagcgcgagtgtgtaggtgacaggacagcggccaggcccgcccctcccctcgtgatggtcattgtcctccagagcagtgatggaggaaataccagcccaggaagcagcagggtcaccaagggtccagtttcagtctttggagacccagtctgagtgtctgtccccagagcctcagtttgtgcaggacaccgacatggaacagggactcactggggctccacctgttcctcaggtgcctgctcttccccgtgaggcaagcccaggagaccaggcagctgcgctcttgacagccaggtaccaggagtttgtgacattcgaggatgtggctgtgcaccttactcgagaggaatggggatacctggaccctgttcagagggacctctacagagaagtgatgttagagaattatgggaacgtggtctcactgggcatacttctccgccttcccaccacccggattcatagtgtgaattcctgcccggccctgagtcatacccaggcaagtgctttctctggagaaacacttgccgtccttacagcaggaatctccaagagatggcccaagtatcggcttcccatcgatattgctcgtccctgctcggaaactccttttccacgattgtgagatattaaaattgactgatggaatagaagctccccaggatgccaccactgtgtaaaatcgcagctcctcaaattacctctgtttaatttcaaatgttagggtccaaggaagccctctgttgcaaccagatatgttttgaacccagttcattcagaaaccatggttggtggtcatcatctacttgtattgtgaaaaaccagaaattccaaattcagctcttcagttatggtcttttcatattattttag

SEQ ID NO: 47046 - DNA, 4611 bp, Homo sapiens
gacagttctttacagcccccctgcacagctgcaggctgtgaggtatgtggtcaagaaatggagataaagctgtttctgagttcaaacacagtaggaaggctgcgaaatggctgcattgcccggctgtgtttgcatcctctctctgccatttgagggcagtggattcagcatgcatctttgaaatatatcccagcttgtcagaggtaagtgcctgttttgatggaaggagagtggggaatgcattacgggggattattagcatttttcagaagtttccgagactgatatctcaactccaaaccaatagcaatagcttatttgattggtggaaggattagagagggtcccatgatccagatgaatagatggctatcaaagaagacagaaccccatagacacaggcagcattaagtcataatttttaaattaactgtcacaaatatgaaacatctcaccagaccaatgataacgtccatatcataatttgcattttaccaaagtgtccacatagacagcacagaactaaaagttctgtagacttcagaatcatatttaaattaatttgatcctttatattaataataattaaaaactagattctacccagtgtcgtcccagtcttcacaccaacatgtatgtcctgctgtcggaatgccacctcctctgcactcagtgtcatgattcgaagattaaaatcagtgtgtcaaatcagaacataaaccaagccaggaattcatgggcccagagaggggtaaggggcttgtcctatacagcagttaagcagcccacgtgctccgcccattcccaagcagaatcagattggagctgcaggcagcgaggaggagggcgtgttctgtgttgtccactgctttgccatggtttcttgggtgttccaaggaggatagttgttgtctcccaataagacagttaattccctgaggacaggacctcttccacactagcctccgtcacagcagggtgcatgcagccgaggtgtgagcacagagcaggtccctactaaaggcaggaaggaaaccagcatgaactgagcacctactacgtgccaggtacagagccaggacaggtgctttcctgtaatcctcacaaaagcagtgagataggatcatcatccccactttacaggtgtggaaacaggctcaaggaagagcatttgcccagagtggcacagctagtcagtaggggagcatcaatttgaaaatccaggctttctcactccagggccctttctagctacataagctgagggtttggcagtaaatgaggagcccagctccgagatggttagtttggagcccaaacattagacccccttgagcacatggggccagccttgagagtgcagagccctgggtctaggaatcctggctctacagcatgacttggtgatcctgtgcaagtcttttaacctctccacaccagggctgcgctggtccagcaggattccctatcagggagaggggacttagtaaaaccatctggagagcatgtctgcaaactacagtgggccagcctctgcccagagagcctgaagttgctcacttgcaaggaagaggtgcagagcattgcaatctgctaccacacctctcacacctggtgagaatcagttctgatctccaaggttctgacctctgaggagtgacgttaagtccagagagccacaccactacaccctgagagaccttcagcaaaaggcccgtgagctcaaagaaattggggtcaggatgcttttaaagcaaaaaatgctttaaaaaaaaaaaaacagatggtggttaggagaagatttgggggtaggtattgaaaaggaagaatgggactggtatgtaaacccagctgacaggacagggtcaggccaggcagagcctggaggaatcacgttttgtggctctggattgcctggtatctgtcgtgaggctgcacttgctacctcagacatgggtaggaggtttcctaaaaaaatatcttgagtctctaagttcaggtagatcttagaaaataaacatgggaagaaagaaaaacacaattcaaacggctcagatgtaatctgcttgccatgtttcttctcttcctctaagactcatctgaatgcccctgtgctataaagccttctctgatccacaaactcagttttaagtgcgtggccctcctgggtgcacagagagagcaagcccatctctctccaaatccccagtgcactgagcacactgaatcctacctgccctgttcagatgtctgcctctctcactgaaccgtagcaacttgaggatagacactgtatccttctctaccttccatctccacatggagagggaaagtgggcttaaccaagacccttttaatcataagcacccagtctaaggaccagcccaaccagccagagtgataggaacacgttccaggggcatggacctcgggagcaacttttctctggaggcgcggacgattgtttccaatcccctgtaccacctacttgccccccagagccaccctgcattgggcacaattgtaatttaagagaatttctttaaaacgtgaaatcaatatttagatgcagacttcaagcaatatagagcattggtttgtgagaatggcatcattctgctgggaaaaacaaagcccagctttggcagccctgatgggagagatagaccttgcatctaccaaggtggaaggcggggaggatgctgtctggaaagaatgctagatatgtgtgcatgtgtgtggcaggaggctctgggctcataaactgtctggctacagggaaggctggacctgatttcctgaccacaggctcttgaagtccccatggtcttgctgacagaggcccctagagtaaaaggagcaggctggaattgttcaggaaaatgttcttcccaggctggggtggccaagagaccattcatttaatgcctgatggagaagagtgaggagcctgtgcttagcagtgaatggtccggaagccaggcagtgtggcttttccaagcaggtagatgtcctcatctgtgccctggttgagatgcttcaccaaattcttctcatagagcagcgggtggtaggcacccatcgtgcaggcactatcgaagaacttctggtagtagtagcacacgtcagtcttgcgcttggatgggaggaactcataaatatccacctggtcacacagcgtcatcatgatgatgataccaagcatcccagaggatggggggtttggctgaatctcttctggggagatttcttgaagaatgtcccatagctcccaaggcatctggggcttgaggatgtaaaagggctgattggggtgcagcttacgataagtcttgtagttgttaaagaaattataatccggattctggtaccactttgggatatctgagtggtatacagatgggtcccatacaattaggattccttcattgtacaaactgtctttgaggaagcgcttctctgtggtaaccaactgagagttcatcaggcgaatggtagtttttgtgcccacatcttgttggaagttggctgtgggtgccccattaaacctcaggactgcgtcatgatcatcgatttctctgcctagttgggaggacttcagagatcccgctgacgacacaacagcacacctgccccaaggcccagccttggtcctaatgctctccttgggcagataaccctcccattcagaggtattgaagggaaaatctgtgacctctaccatggatacattcacatggtcccggaggtggcagcgcagggcctctgcactgaacttgatgcctggtcctggccccttgtaggacactttgtacttgttcatgcttaggtaattcttccagatcttttgcagcctagggataaggtttttggaagagctgtccttgtttccacacctggaaggaggcctctggtttgggccttggctaggcctctgagactgccgagggtctggcggcccctgtgggggtcctgggtgctgcttgaggatacagactgggaatcagaccccatggccaatttccccagactctttaacacctggaattccttggtttgcaatttaaaggaatcatagtaactccctttcttcttttccttccacacacagatgactgcaaacagaagaaagaccaggacgcagcagctgaactttttcttcaggttggtgtgaatcataatgaagatgtgttcagggaagtcactttgttctgagcaggaaaacaagcctgcttctggctaatcccccaggggcggcaggcccttcaggtcctcaggaattagcactattatccatgggagggaaggtttattgggtctgcaggccaaggcccatttttctcaggatgatcaaaactcatctcagcacggggatggacacctggcaccagggcttgggacaggctcaagggggccagtccatttcagctgggctccatgacattcaccacttctccctggactgctggttgcagggctctgcgcaactggctctccccttgctcgctgcactctcggccgcggaggctgcggttgctcagcacgctcggtggcggccgcccgctccgcgcccacgccggtcggtatcggctccctttgttaacgccgggc

SEQ ID NO: 47047 - DNA, 2115 bp, Homo sapiens
taagtgggcatacatgttctatcattttgaaggagaaagaaaaccgttctcacatgttgcaaatatgtgaatcatactatattcccctaaagtaaaaccagtgacttagtggtttttggtttatttagaagttggtttagacccttatgaaacattatttacgagttggccttatccttaagggaaaagttctaaatttttaaatttatttttaattccctagtctgagggaaatgtctttattgtccattacataaaaatgttgactccagtaatttatttttctctattttttcctccatgtatttactccatttttctctattttttccttccctggatgggatttgcagaaatgttaaccaattaggctcaacttttctctacctttgttgagtcttaatcttttagaagataggcttaccgtatatttatgaagcataatatattaaaagaaaacaaatctaggatgcttgcatgacataaagtatttgcctgcagttttcattaaaaactgcaagaatatcatgcttgtctgcttcttagtaaatgttaagtctgaaatggaagtgaggatgtaactctactgaataatcaaagatcatcttagatttggcttgatctgtgtttattgcttctattaatgtaaatcaactctgtgccaaatcctcctccacaaaccatttattgtcttagttctagtggtatcaatgaagatagttacagtatatgaattctaagtcctgaggaagaaattttatggggtttgttaagtttcacattcgtgaaagaggaaattagtagagtattcagactttgatatttggctgttaatgggatgcatatcaaatttttaaaagaaggcttggcctaaggagtttattggtacaggtgcagatgattttaaggcattaaaggattatagagttatgtcatttagactgtttctaataactgagaccatctaacatttttcttttggagtctcatttttatttgtgcaatattttcaggcatataggctactgttcattgtatttatatatatattagaatttactaagtactttaacaagtaaaaatctgaatatgaaagaaaatatcagatttgcactttaaatgagcttaattgcttgaagttgtgcctgaaatatcgaattgcctcctattgggtgtggctttgttgaaataaatttgtaattgttgctgtttgaagatatcagtacagctgttcacagaaatatattcccagcatgtcacttttccattaaagcactaagttttctttgaatgttccattgttccgataagtattttacttttttctcagtacatcagagagagcgtgatccccctacagctgtcacttccaaatgttcctgtagcataaatggtgttacagacactgaggtgcactcttggtttctgagcagagttgtcatactggtttcctgggtctctagggcactggggatgtactttgaaatcaccgaacaggcttgcaattaagatcaataagggctgcagcaccatttcaatttactttccatcttacccagtagtttttgtgtttttaaattcgtttgggtggttatgtttgcatgcttaagcacacatttgaaaattaattatagctgtactacccgatgtttttccttggggatgatggccttgttcctttttaaattctgatgcttgaattctattttctagtgatttttcacatctccctttaagtttttgctgcagcaatttgagagagtacttttgattaaatgattctgatggtgggcaccaatctacaactatgtcattaactgaagatacatgttttaatcttgttgggaataagcttacccactttctccttggtaaagcgtttacttaacaaaataatacccgagaatgtaaggtctctaagtcattactaacaaagagcaaaaataatatctgcagtattgtttttcccattgattttaagtcagtttagagtacaaactgtatattagaatttgcctgtaaaatgaattctaaaaagcagatgtaaagtctctcctgaaaatgttggcatagtaaataaaaataaagttcataattataaaagttaaaaaaaaa

SEQ ID NO: 47048 - DNA, 378 bp, Homo sapiens
  misc_feature (1)...(378): n = a,t,c or g
ttgnnaacagctatgacatgattacgaatttaatacgactcactatagggaatttggccctcgaggccaagaattcggcacgagcacagaagaaagacctgtgtcctagagagtaggccaaggtgatctgcctcttctattgggagaaattctaatttctttcccactttctcaacaagcccaatattccctccaagttcttcttggtgctgagggctgtaggaattattgaaagcttctgcctcacttagtatcgtctggggcccagcacccagcaataactctaataatgtttcttaatggtatagcctcctgagattnnnnntnnnnncaaaaattaggaaatcttggagggagtcctcaagatgtattgntttg

SEQ ID NO: 47049 - DNA, 869 bp, Homo sapiens
cctcctcccctctactctacccagcttgcgctccccagccgcaagtcggccgcgctttgcccgtcagcgcttggagctttctgcgtcgcttcccgctgcgcctgccgggtcccgcctcgccccacgcgcgggctcgcgcttcggtttccccagacctgctcgcagcaccctgctgtcttcccggtccggcccgctgcccgcggcgccagcaccatgctcttctattcttttttcaagtcccttgtgggcaaggatgtggtcgtggaactaaagaatgacctgagcatctgtggaaccctccattctgtggatcagtatctcaacatcaaactaactgacatcagtgtcacagaccctgagaaataccctcacatgttatcagtgaagaactgcttcattcggggctcagtggtccgatacgtgcagctgcccagcagatgaggtcgacacacagttgctacaggatgcggcaaggaaggaagccctgcagcagaaacagtgatggctcctcctcctcttcccctccctctttcattggtgacccataaccccaagtcccagcccagaacccctaacccccaatacttgaaggggttttgtttttttactaatgatggttttgtgggttttttttaagggatgagtggatgagaggagtaatagggaacagctatcctctcttgagaaggggaggataagtaggctgggaaacttcaaagccttcccagtccccagcacctgcctttctcactacttctctggagatggtaggagagtttcctaggtctttccagggcagcatgtgattcatttggggatggaaggaatctgtcccgcatcgggaataaaatttatgatgcaaaaaaaaa

SEQ ID NO: 47050 - DNA, 500 bp, Homo sapiens
gctggaagaattaattctggaatatttcttaaacttgcttgatttgtgtaaggtctggctgctgggctccctgaaaccttgcacatatcttactgtatgactgtatttcgttttgagtctctggattctggggtttggacagatgaccatagtgaggccctgcagaaatatgcatgtcctcagtgtttggactgccagctgcaaggcagagccaaacccaatatggccccatcatccctggctcagctgtgctacctggccatgctggaaggggtttgatcttccaggaatttgcttcacagctctttcctgtcccaagatctatgcctgatgtgtaaattcaggacccaaaagggcacaaaaaagcaataactactaaatataaggaaaacaactctgtatacagcatgtataaagaaaagcaagatatatttggggagataaaagttgtaaaggcattaagatgtgtgtttgttgagaaaaaataaatttgtgcattt

SEQ ID NO: 47051 - DNA, 557 bp, Homo sapiens
gaaggtcaccagaaagacctacaggggatcttagagaaagaatgaagaccaagcgccaagacgtggacactgagccccagaaacgaaatacagaggagtcatcctcacctgttaggaaagaatcttcaagagggagacatagggaaaaggaagacataaaaatcactaaggaaagaactccagaaagtgaagaagaaaatgtagaatgggaaactaatagagatgattctgacaatggagatattaattatgattatgttcatgaattgtcattggaaatgaagcgtcagaagatacagagggaattaatgaagctggaacaagaaaacatggagaagagagaagaaattatcattaaaaaggaggtttcaccagaagtggttagatcaaaattgtccccgtcaccttctctaagaaagtctagcaaatctccgaagcgaaaatcaagcccgaagtcgtcttcagctagcaagaaagataggaagacatctgcagtatcttctcccctgttggaccagcagagaaattcaaaaaccaaccaaagtaaaaagaaagga

SEQ ID NO: 47052 - DNA, 1456 bp, Homo sapiens
  misc_feature (1)...(1456): n = a,t,c or g
agccttgacacgtgacccaagccccagcttcgcgcagggatggagccggaagaggggacgcccttgtggggcntgcagaagctgccggccgagctgggcccgcagcttcttcacaaaataattgatggcatttgtggtcgagcttatcctgtgtaccaagattatcacactgtttgggaatcagaagaatggatgcacgttttagaagatattgccaaatttttcaaagccatagttggtaaaaacttacctgatgaagagatatttcagcagttgaatcagttgaattcacttcatcaagaaactatcatgaaatgccgtgaaaacgtaggaaagatgaaatcaaacaggctctgtcaagagaaatagttgctatttcctctggcacagctacaggattttgattggcaggtaaagcttgcactttccagtgacaagatttgctgcattacgaatgccacttttaagcctgcatctagatgtaaaagaaaatggtgaagtaaaaccttattctattgaaatgagtagagaggagctgcagaatctaatacagtccttggaagcagcgaataaggtggtcctgcagttgaaataactggaaatgatgaataccagtcctatcagattttattgctccaacttatatggcagagtgaatactgcgtgttcagaaaccttgtgatgtcttgactgtttgcaccaggctgagaaagcagcaatattgatattataaagataaaaatttatcaacattccttaacaggaaattacatggttgagaggaaatgcataaaatgaaagatgaaaaatctatagtagcagtttatattttcatgattgttttgcctcatttattaaatatttgagaaatctttggagatacatagttttattgaaagctaaaaataggttctaaagtaatgtaaaaatataaagcacaaatatacttgaatattgcttaaagaattgtgtgaatagcaacatatattatggatatatactttgtgatatttttaaaaaataattttttcaaagaatgtataagctgcatatataactcaggagattccatgtctttctcatatttcagaggaaagattataaaatataaaatttcttagagaacacctctttgtcagagataaacaagaacaaatactctaaacttatgtgaacagttttgagtttatgaattctagaaactaaaatcaagaatacagaaaaatgaaaataacattttacttctgcgcttctatgtttgggaaacattgctctgataaaaaatagctgtcattatgcagtgtgtatattcaaatatgagataagactatgtacacatccacttttgttaataaactcaatattgaatacttttggatgttaaattcattggaaaaacaaaccatttgtaacctcagttaactttaacaacaagcattctgagcaaatgaaaaaa

SEQ ID NO: 47053 - DNA, 530 bp, Homo sapiens
ggcgctgcccaggcaagggcagggctggggtgatgaccatggtaacacccgggtgggagttcgtgacatctccggcgcggagggactcgatgtctatggcaatggtcgcctggtggaagggacggaactagatcccttcgctcgggacgctcacattccaggcccttgtcctgcaggctgccgcgggcggacacgccagaggaggaggccggggaatggccgcggtgtggcagcaagtcttagcagtggacgcgaggtacaacgcgtaccgcacaccaacgtttccacagttttcggacgcagtatatccggccggcgcagccagctgctgcggggagaatgccaagggttgggcaccccccagcgcttgcgtcggcagtaccttgaggctttcggggggcagcttctttggccagcgcttacgggcccctttttcgagccagggcagtgttcgttgcctattagcaacagcatcgtccgcagtagccgcactactcttgaccgcatggaggactttgaggatgatcctc

SEQ ID NO: 47054 - DNA, 432 bp, Homo sapiens
ataggatagatatcctgctataaaaatataaaaaagtcccctaagatatttatctcataacatcacgtctttgctcaaaaatgtcagtgcctgcttccatttgaaaatgcctaatttagaatagctagcatgatgtgcacatagttaacattcagtgtcaaaatatgagcgcccttactaacctgaacctgtcttctcagtctcccctacgctccctacaaaatctgtgtttcagcccttattctctaaacattctccctcctctttcattcttgtgctttcatcacaatgcttgatacaagataagcatgcaataaatatttactcagagaatgaataagtgcccaatgttggctattaaattttaccaatccttcaagaagtgaagattttgtatatttctataaaagctttcttgatcctgctagtgaa

SEQ ID NO: 47055 - DNA, 1759 bp, Homo sapiens
  misc_feature (1)...(1759): n = a,t,c or g
gtctgaacgcttacaccgtaaaaaacttaatgggagagaagcttttgttcatgtagttaccctagaagatatgagagagattgagaaaaatccccctgcccaaggaaaaaagggattaaagatgcctgtgccaggtaatcctgcagttccaggaatgcccaatgcgggactgcccggtgtgggactgcccagtgcaggacttcccggtgcaggcctgcccagcacaggactgcctggttcagcaataaccagtgcaggactgcctggtgcgggaatgcccagtgcaggaatacctagtgcaggaggtgaagagcatgccttcctgactgtaggatcaaagggaagccaattaatgggccttccattttaactttcctgggtaattttgggtgggatccaaatgcctttgggccaccaatccctcctccaggattaggaggcggggcctttggtgatggttaggcctggtatgccttcagttggaaacantggtttgcctggtctaagactggatgttccgggttttggaggtggaccaaacaatttaagtgggccatcgggatttggagggggccctcagaattttggaaatggccctggtagcttaggcggtcccccggggtttggaagtggccctcctggtcttggaagtgcccctgggcatttgggtgggccaccagcttttgggcctggccccggccccggccccggccctggcccaatccatattggtggtccccctgggctttgcatctagttctggaaaaccaggaccgacagtaattaaagtgcaaaacatgccctttactgtgtctattgatgagattttagatttcttttatggctatcaagtaatcccaggctcagtgtgtttaaaatacaatgaaaaaggtatgcccacaggtgaagccatggtggcctttgagtctcgggatgaagccacagctgctgtcattgacttaaatgacaggcctataggttcaagaaaagtaaaacttgtattagggtagccattcacatcattttttatagggtagatcttcatattgctgtgattaatgcatccagattgttttcctagtatttccaggttataacctgtggattgtttcaattgcatatagcttggtttccataacatagagcattggttgactgtttacagaagactcactcaccaggataaacattgctgtatgttacagtaaagctatctggagagaacacataaatgattttggcataccattagagaaaccatttgtaaaactcaaatgaccacataaagcttatcaaggagtctagattggttttgttttataccatatgggatgaagaaaatagaaatgtcagtagaactcattgagggtgctcttgccagctgctgaaaatagaagttggctactctcagaatttggtttaaagctggacagatttgctttgttatagggtaaagctttgtctaaagtcctcattttcttttaaaattgaataaaatttctgtatacagattcattgtatgtacctttattgcttcttaagggtccttgctgtatagacagtcctgcttcagaagttgctgctttgtttgtctaattgactcatttgtaaatgagcagaactgttttgttggtttttttccctaaatataaaagtcccacacttcgtttgtgctataacctcaaactttgatttctaatgtcacacttaaaactgtgtggaataagacttttgccataaaaataaactatggagtcct

SEQ ID NO: 47056 - DNA, 801 bp, Homo sapiens
tgctgaaactagatgtttttacatgagaaatactgtatgtgttgtctaagatgtcagttttataaatctgtattcagatttcattctttgttagctcactttataatttgtatttttttactgtatagactaaatatattctatttacatgtatgtcaactcattacttttttcctgtgaacagtattgaaaaaccccaacggctgataattaagtgaattaactgtgtctcccttgtcttaggatattctgtagattgattgcagatttcttaaatctgaaatgatctttacactgtaaattctcaggcatactgattatggagaaacacttgttttgattttgttatacttgacttaactttattgcaatgtgaattaattgcactgctaagtaggaagatgtgtaacttttatttgttgctattcacatttgaattttttcctgtataggcaatattatattgacaccttttacagatcttactgtagctttttccatataaataaaatgctttttctactatttgtcttgattacttaaaaaaataaaaatgtaagtaaggatcaaaactctaaaattttgcatgaaaattacatccaaattgtgaaaatcagatctattttgtttgccattagtcaccattagttatataaattttattgttttaggttagtatctctttactaaattgtcagtctataagataatatatgttgatcccttgctgtagaggagaatttagagtaatttggggtttgtcttggattatatctaaatggattatttgttaaaagtact

SEQ ID NO: 47057 - DNA, 416 bp, Homo sapiens
atttatatcagcttaacccaaatgctgagtgggttataaagtcaaagccattgtagaagacttaacaagctgcagataaccatgtggacttctgtcataattcttgctgagtcaagagtgtaaataaaagaaatggcaggactcatattattcagttgtacccaagtatttaaaaatgactctcttaagccttaaaaagtcatagatttgtgctgctgccagaattatattaattattattaatgttattattagaaaaaaaatttctggagtgagagtaaagaggcttaattagtttgtgggcagttttcatatgctctgtgaaatgtgtccagatgtgacataagtttttttttttaatatggggaaatggcttctcttcccattcttttctcctaaaatcatatatactggaa

SEQ ID NO: 47058 - DNA, 349 bp, Homo sapiens
atcataaatgaaattaatagattccagaattacataaaagaattagctctaatcaagaatttatatttgactgaatggtaaagaaatcaattatttaaatgccatggatctccaggctttcctaacccccaaggctagactttaatgaaaacttcattgggtaggtaaatcatagttaataggtgggactgcaaatggtatatgcagccatgttagcagaatgtttcctaagcattaaagcacctgtttaagtcacctatagccaaataatagaaatacagattttagaatcaagactaatatattaaagtaattccttgtttgatttttctataaatgaatagtatga

SEQ ID NO: 47059 - DNA, 1086 bp, Homo sapiens
ttgggattcaaattgatttttcaaatcatttttaaagagacatcatcctgactaaatcttagcctgaaccttcctcccctgtgtgtattccccggtagtcaccgcagcgagatgctggtgagactgccgtggtggcatttagcatcgttaaaactggaaaactctcaagctctttgccactttcctactattttttgattcttgccattttaccaagcttaggttgtgaaacttgacagaaatgtattacaggaaaaacttataattgtatttgactttctaacacattgcaaagtttcaaagtgactttcactttcaacaacatattagaagtaaccacttttgctttcacagcctgaagagttaggagcctgatctgatgccccctttcactctgaagtcatggggaaattttccagccatggaaagccctcttttccactggcatactgatgggctgactcagcttccttcagccgactgagatcttttcatactattggctatttcataccaattaacctcttaaataagattgtgcaattgcccaaaattggatagacaccttattaccacctgtggactcccatattcccttacccacaaatgttattttcatcagtcctgagtcattttaacttacagaaattaggattgttgctgctaatatgaataccaattataacttttagaaacaagaataaagcctaaaagagaatgaaatataagaaatgttcgttcccacccctaataacatttggaagtgaatattcccattttcttccacccacagggattgggattgatttttaatttcctaggaaacaatactagactacccaaaaagatgttgccagaatccaaaaggaactatgctcgtaaaagaaatgcagttttctcctacctaaaaaaaagaaagtaaagtgtgttctgttcttatctttttaatgactaagctttaaacagtttattttgggtaagactagaactttcagccatttgttctaatatctgtgttattagatgcaatagaatttatgaaaagaagaatgacaaaggtatctgattagaaaatttgatcttacg

SEQ ID NO: 47060 - DNA, 898 bp, Homo sapiens
ttttttttttttttaccgtcctcacactttattgttagctgttctttaagtttctcacacattattggcaattatgtaaaaatcaagaacctctataaaacaacctggctttccaggtggaattccgcatacagccaaaactggattccagtgtggccagacaacgcccatgtcccaatttaagagtcgctgtcctcaccaccatccggagtggcctctctgtcagtgtgtgatgtggccagggcagtgtccacctgaacttcctcctcatcggactgaacaacgggggactccccaccctcactgatgtcccgggtggccgagtcggtgcaggtggaggaagaagaaggtggcttggctcttaattctgagggatttggaacctggagggtaatctcattctgacaggtactggattcaggccctaaggcgggggacagcacagtgttctcttctcctccagagttcaggaagacgtccagggcctcctggtccgatatgtccatcaggtccatctgctccagcatgtccacgttcacttccatggatgacatgctgcctatgggctctcgccgctctgcaatctgcaggtagccagtggacaggtactgctccatgtcctgctggaaggcttcctcaaaaaacttctgccgctccttcagcttcatttgctgggtgtgctccatttccaggaccttctgggcgtgctctgcatctagttcagctttgaaggtttcaagttccttcctcttatttttcttgtaattctccagttgctgggactgcatatgtttgcatctttctaattcacactgcccacataagtcttccagatgcagcaggttgttctctacctcctcaaaactcgcctctaaatgagtcagatttgctgtcatgg

SEQ ID NO: 47061 - DNA, 483 bp, Homo sapiens
  misc_feature (1)...(483): n = a,t,c or g
ggngnnnnnntttgaatcgattgnctgattcgaatttaatacgactcactatagggaatttggccctcgaggccaagaattcggcacgaggcatttcttacacggcagcagcaagagaaaaatgaagaagcagcaaaagcagaaacccctgataaaaccatcagatctcgtgagacttattcactatcacaagaatagcatgggaaagaccagcccccttgattcaattacctccccctgggtcctgtgggaattctggaaggtacaattcaagttgagatttgggtggggacacagccaaaccatatcaatgattttgtactttaaccagctgaatggaagtacaatctcttgctatatgacacaataattatttgcaaaatgagtaaacatatcataaggaaattatttttacaaggtttgaaacctgaaatgcagtctattatcatacataactaaaaatagagcctcaataaacagatt

SEQ ID NO: 47062 - DNA, 1875 bp, Homo sapiens
tttttttttcaataattaggagaaagttctatccttactggtcctaaatctgaataactatgtctaattttttttaaaccttaattatgttatacctatcaatatgtactagaagaaagaggagaaaaaaagtcgctacactagtaccaggacagcacgcttacaagatagccattttatacattattaacatacaatgatcaacaaagagtcttctatgaggtgatgggggatgcagagaaaaggaagggaagtacagtacatcaccaacatggacaaaataggaattaaattccctcgtctaaacactgaatttctgggaatttactattttttctttctttttttttttttaaataaaacttatgttttgttgttttatgacttgaacaagttttgatattttaaaagcgctcagcatttaatctggttgtttgggggaaaagaaaagaaacaaagaaaggaaaaaaacaacaaaaaaacctcaccaaacaacctaacattttattagaaaaacaaagaacatgattttttttttaattaaaaaaaatgttgttgctgtttcattagaattgaaaacgggttttttctttctttctgagttagcattttggagtctttagtttgaagatgcttttgccctaccatgtctgtgaatgtctacattagtctactttgttagtaaaatttataaaaataggagtgcagcagctctttataataaatgtcgcattcagtgtctcatactggctgtgcctttaagtaccaaatttataaacgtaacaatttaaaaaatattaataaaacgtcaatatcacattttaaaaaagaaaaaatatatatccacactacaatatgttttaatgccatctattgagttgtacttctatagttgctgttgccgacctattaccaatatttaaaaaaaagttaaattaaaaaatatccttcatcataagtatctttccccaaccgaggaccatatattataacagccaaatgttaaacatgtgcaaagaggaaactgtcagtttttcccaccagtcacagtgcagtgatgtttatactttttatttttaaaattctgtttacatctacaataaattaaaaaaaaattcttccatagcctctctggtgatacttgcagcactgaggtattaaaaaaaatatatataaaccaaaaggttgctttcctaatttgtaaatagaaagtgaatggagaaaggttgtattaatgcaggcttatccactcctggcccatgggcccccagatgtgggagcagggtggggggcagggggagaagagaggcaaagtgtcctagggacctttggaggtgctgaaatgattggacaatagaaaatgatcaaatatttaaaaattaggactgaaaaagaatgtcccccccacgggacccccacccaagcccaaacaggtgtgctttgaaactttaaatatgttaaatattaaaattgtagctttgtttttaaaaaacatcttgggaaaagcagtttttcatattttaaataaaaatctaactagacggtaacatttgaagctgtgcacagacaagaggttaataggctggtacaacactaatacagttcttaggtctatcacacagacaaaggagctaaacagtgctctaacttgtcctggggtggtcctggcagctgggcgatcttcatctcagtaactgacttggccaacgttcccttcccgcctccttccacagagcatcaaactgcctgggaccgactccctcacaaaaatatttttgattctctctttcttaatagtttctatgtagttaatggaattgtatttacaacatttcttttttagaattcacaatttcaaaaaaccttataatatca

SEQ ID NO: 47063 - DNA, 909 bp, Homo sapiens
  misc_feature (1)...(909): n = a,t,c or g
cagactgatggaggtgccgcaggaaaggacacggacagcctggtgcagtacaccaaggctcccatccaggagtcgctcctcagcctcagtgatgatgtgagcaagctggctgtagccagcttcctggccctgatgcggtttatgggtgaccaagtccaagccccggggcaaggatgagatggatctgctctatgaactgctgaagctgtgccagcaggaaaagctgagggatgagatttactgccaggttatcaagcaggtcacgggacacccccggccggaacactgcactcgaggctggagcttcctcagccttctcacaggcttcttccccccgtcgaccaggctgatgccctacctgaccaagtttctgcaggattcaggccccagccaagagctggcccggagcagccaggagcacctccagcgcacagtcaaatatggggggcgccggcggatgcccccaccgggtgaaatgaaggctttcctgaaaggacaagcgattcgcctgcttcttattcacctgccggggggtgtggattataggacgaatatccagactttcacagtagcagcagaagtgcaggaggagctgtgccggcaaatgggtatcacggagcctcaggaagtgcaggaattcgccctcttcctcatcaaagagaagagccagctggtgcggcccctgcagcccgccgaatacctcaacagcgtggtagtggaccaaggacgtgagcctgcacagccggcggtccactgggagaccccactgcacttcgataactccacctacatcagcaccactacagccangtgctgtgggactacctcaagggaactgccagtancgccaaggaaacgccantcccagntggccgcctgaanactaacaaggcaanagataccctcagg

SEQ ID NO: 47064 - DNA, 2199 bp, Homo sapiens
  misc_feature (1)...(2199): n = a,t,c or g
cacacagaatacaagcaagaaagtacttttagattaaaattcgtcttatgtgaattatggcaaatgaaatcaccccactgtttacctgttttatgagtttttacatttgcttaaaattagcatacttgatcttttacagttcccatctccaccaattagtattggcagatttccactatatgtagaagtcaaaagatcagactgtaaaaatatcagatattgtaattaagagctccaaacaagtcttgcagtttcaaaggtagaaacccacccagccagttcagctgcttggacttcaaagccctccgcctagccatctcagccaggctcaggttccttctcccacccatcaggccaagcaggacttgtcaaacatacacattcaagttcctagcacacagtaggtgctaagtgggaattgattataaacttgaattcttccatcaacaaatatccacctctcctgtccagcttgcctcagatcttcaggttctctcttctctgaggcagctaagcttctacatccttcatgaagtttcctttacttctcgacagaagacagttccctttaggcctatcatctctaaatgcaactggctttccattttccacttactcaacactccacaaagtacacttgctacatggtatttattcaatgactgtatatttagtcaccacctcaatcactgctaagctctcttcatgtctatctgtaccacagtttcccatcttagactgtgacgtcagctggcaagggctggctgttggccgattcatcatgactgacatggtgtgtcacaaagagctccaagtaaatgctgtgaaggaagaggatgaggatggagatgaggatcctgagaagggcccagactggctgcccaacccatggacctgaggcctgagtaaggcctgggagctgctttcccctctgcccaggaactctgtccaggggcgattctaaggcacagtggtgaaggacatgattggtcccccaagtgtggtcctcaggtctcatggcagccactcgcctgggaacagtgcaacaagcattccatttagaagatcttccagaacacacacaagaagcattgtctaatgaaaatggagacaaggtctttcttggaagagagtgcccaagtagatactctctgccccaagactaaccaggtcccttttaaggtccctgagaacagcagcctgggagcaaccaagcctttcaaaggctgacaaggcacagagtggatgaatggaacgaacgatacatgaaaaaaacactttggctgataaaacctccaacctgaggcagggacagtgtcgctcgctgacatgcagaaacatgactgtagcagagatgatgatgatgagaaatgcttcgcatttcccacactgccgatatcccaagccctgtgctaccaccctctcccccgnnnnnnnnnnnnnnnnnnnnnnnnnnnnnnnnnnnnnnnnnnnnnnnnnnnnnnnnnagcatctgcagaataagtcagaggttgacacccagagcctgacgtcaggataggactcttggcactccgcactgaaacaccgtgattagtcctgactagacagcaaaagtaacgccagcctaagcttgaaatgaagggtccatcttgtgaaaagttaggctgcgcccaagacagccaggtctgggaagtctttcacttctcctacttcgctgaaaggctgtccaccttggttgaatgtcagcttgtaccgtaagcggataggttctttgtgtggattgtcaagcagcagcatctgagatatcacagctggaggcatcaaaggactgaatgcaggaagcttggagctggatgccggctgcagcttcactctcattgactttggcacagccacttgaaacatgatatcccagacaggctggggagccgtgctcatcatggtcaagagcagcacctgtacctctgggtgcccaggggctcccgtctgggagaagtggagcagaattctgaatccattccggtcatacacaatgagaggctggcaggctgctgggcttaacagactccaaagggacaaacacttgagccagaggtgtattctgtgaagatggggaaggagccaacgggccagcctcccaggaccaacctggagaggacttagtacctggtggcacttccttggggacacttttctgcgaaacataattcagagggc

SEQ ID NO: 47065 - DNA, 1205 bp, Homo sapiens
tttttttttttttcccttgttcagacattttatttgaatttatgacagtgatggggatttgactgagatgccttatggagaagtaccccaccctctatgaagacagaatcactctctgccattcattctgcctgatgctaacaacacgcagctgatttagggagtgtcccagcctagctggatcaagggaaattccaggagccctggggcaggccctggcccccagtgccaagcctcagagtaagcagacattgggaaagttgccaaccacttggtagaccactaggttctctgttttcccttccctttccttttcaaatcccacagtttcctgttggggagaagctgtaattagcctagtccaggtaccagatcccagctaggggcgcagctgcttggataactccaagaaaacctgggcaccagtatttttccaattataaggactgtggcataaattttcaaatgagttatattgaaaccagatttctccagctgccaagggaagaaggtagggctggactccctgctgtggcccagcccttgttaggggttggtctctcactgcagccagacaggatgatcctgggttctggggagggtaagctgccccttgccgagttctgcaccgaataaagagtccaaacccgctgcttccgtgtcctgagagatgggtaaatgggtgatggatggagcagactgaagagacagcagatgactcagtggtggaagaaggggggaagatgctgggctggctagctaatgttcccccctttcagcgatttacaggaaatggagcccagcttggtcatgaagttggtttgcttccactgtgcgatgcactcctcagaaattttgaagtcagcctgcaacttctcgaagactttcttcttgggcttgagctcctcatctggttggcccttttcatagcccttcacaaacacggtgctcacccaggaagcagaagcctgccggagggtccagaggtttcaacctggcggtttatcccttctatagaagcacacagaagcatgccttgggactcgactcctctcatcttctggggtttcaggttgcacagcaccactaccagcctgtcctgcagttcctccttgggcacgaactgtaccaggccgctcaccacagtccgtggttcagcttcccccacgtcaatcttctctacatacaggctgtctgcatctggg

SEQ ID NO: 47066 - DNA, 5554 bp, Homo sapiens
tttgtttttattcttcctgtttctcaccattcggcttatttgttttccctcctcttaggattgccccctgtgggtcactttctcagtcattttgagctcagcctaatcaaagactgaggttatgaagtcgatcctagatggccttgcagataccaccttccgcaccatcaccactgacctcctgtacgtgggctcaaatgacattcagtacgaagacatcaaaggtgacatggcatccaaattagggtacttcccacagaaattccctttaacttcctttaggggaagtcccttccaagagaagatgactgcgggagacaacccccagctagtcccagcagaccaggtgaacattacagaattttacaacaagtctctctcgtccttcaaggagaatgaggagaacatccagtgtggggagaacttcatggacatagagtgtttcatggtcctgaaccccagccagcagctggccattgcagtcctgtccctcacgctgggcaccttcacggtcctggagaacctcctggtgctgtgcgtcatcctccactcccgcagcctccgctgcaggccttcctaccacttcatcggcagcctggcggtggcagacctcctggggagtgtcatttttgtctacagcttcattgacttccacgtgttccaccgcaaagatagccgcaacgtgtttctgttcaaactgggtggggtcacggcctccttcactgcctccgtgggcagcctgttcctcacagccatcgacaggtacatatccattcacaggcccctggcctataagaggattgtcaccaggcccaaggccgtggtggcgttttgcctgatgtggaccatagccattgtgatcgccgtgctgcctctcctgggctggaactgcgagaaactgcaatctgtttgctcagacattttcccacacattgatgaaacctacctgatgttctggatcggggtcaccagcgtactgcttctgttcatcgtgtatgcgtacatgtatattctctggaaggctcacagccacgccgtccgcatgattcagcgtggcacccagaagagcatcatcatccacacgtctgaggatgggaaggtacaggtgacccggccagaccaagcccgcatggacattaggttagccaagaccctggtcctgatcctggtggtgttgatcatctgctggggccctctgcttgcaatcatggtgtatgatgtctttgggaagatgaacaagctcattaagacggtgtttgcattctgcagtatgctctgcctgctgaactccaccgtgaaccccatcatctatgctctgaggagtaaggacctgcgacacgctttccggagcatgtttccctcttgtgaaggcactgcgcagcctctggataacagcatgggggactcggactgcctgcacaaacacgcaaacaatgcagccagtgttcacagggccgcagaaagctgcatcaagagcacggtcaagattgccaaggtaaccatgtctgtgtccacagacacgtctgccgaggctctgtgagcctgatgcctccctggcagcacaggaaaagaatttttttttttaagctcaaaatctagaagagtctattgtctccttggttatatttttttaactttaccatgctcaatgaaaaggtgattgtcaccatgatcacttatcagtttgctaatgtttccatagtttaggtactcaaactccattctccaggggtttacagtgaagaaagcctgttgtttaagtgactgaacgatccttcaaagtctcaatgaaataggagggaaacctttggctacacaattggaagtctaagaacccatggaaaaatgccatcaaatgaataatgcctttgtaaccacaactttcactataatgtgaaatgtaactgtccgtagtatcagagatgtccatttttacaagttatagtactagagatattttgtaaaatgtattatgtcctgtgagatgtgtatcagtgtttatgtgctattaatatttgtttagttcagcaaaactgaaaggtagacttttatgagaacaatggacaagcagtggatacgtgtcaatgtgtgcactttttttctatattattgcccatgatataactttagaaataaaccttaatatttcttcaaatatctctatttaattttgacactgaaataaccgtaaaggtttatttttctgttacctcaacaagaagaatttgaagacttcaaaatattgagcagaattcattcatacttaaaaatttattagccctgcattttcataggaagacacattatcttctggactatagctgttctaatggattataatcagaatggaagagagaaagcatattgactttttttgagcgacatctctgactttctgtagtctttagctattactggatctcttaagacagcatgtgttaatcttaatgtatatcgttatcactgtgcagttgctgtttacttgaatagtattgtgttcctatattccaggtttaagtagatttcatgcctgggtggccaaacaacagtcttcattttttttaattgaaaagaagtagtgtctggatcagtaaaattatactgtgtgtgagtgtgaatataaatgtgtgtatgtgtgtttctgtccgtaactgttacagtaatgtcataaagtgagaaaactgtgaccaagtataaacttttaccacttgctgcactcttgcacatggattcagtttctaaaattgagttcttcctgtaatcttgttgataaaaatactgactccaaccattcaaaaatttcaccccatccctccttaagagattggatcaagtattactaaattgacctttaggtattacacaagaccagtgcttagcaaaaaataatgacaggcatccaaggaagggatgtatttgtagtgttattgccaggaaaggagagtactttggtttctgagcaccgaatattgagcaatatgtcagtcactaaaaggaagacagttctacagaaaaacaaatggtaacatttttcaatagcgtgtgtagatagtatgcactatatacatcacgttaaagtaggactatcacacccagcccatgtggctaaaaaagctgaatcagacagtggatgagacacacaacggcagtgaagaaccgatacacttggcattgacgtctagctatgctgtatctgtgctttgcccacatgcccttggtgacagctgagcacccagctctgtcttggtaggtttgggctaaggaacaaatctctcctttgctcgtggttagcaagatacactcaagcatgaagataaacacagctgctttcttcttacaccccggtctcatgctccttaatggcgccatgggtgcttgttgggcctttttccagtaaggaatgatattgctgaagaatctacttaaccctgacaaattttaattataatctcttcttatacagataaaacatgactcctacaaggccccaaggtttacatagtctgaagtgaagtacagagctggcatctatctggtgatttctagctctcgagatacccaagcagcctgatggggcagttccccttcttacggttcacgctctaaggcaggatgtggcttatgagatactttgcattgtctgtctgcacaccttgaatctgcctgctggctcccttactttacctctctgtcatgtgcagatgaaggctcagggtgctagaggattagtaagatctctttctaaagacaggagagattatttacaagaagaactcaccagggtttagtttgcatttaagaattgccagtcttttgtcctgcatcatcttggaacattaaatccacatgttttcagagcttcaccagggcagtaccaatggctgctttttcacagctatgaagagctagagaaattcttgttatggtagaaaaatttcacggattcatttttgaaactgcatttgtgcgtatgcagtgtagattttatagtgtgttgtgctttcaagatctaaatcatatataataaattaagggacaatggggctgacagcactaaacttggtgcttattgatattctaagaaatatctgtgaaatatcatcacgtatgttatacaaccttcatttaaaaaggtttaaaactagttagattcactttgacacttttcatatcatttcttaacccaagtgacgaaaacattgtccccaatgaatatactcattagaattaccatttgttaatatcactcattaattaaccccataattagatccattaatttaaatgatttaaatttaagtaagttttataaggtctgacatcagaggtatcttactttcctctgaggatgatgtacttgccctgaccatgcattttaccatcacacatgttcagaaagggccaaattcccaacctgctcatttttttttttatcagagtcatgatgaatcagtcctagaatgtttcatttgcacaagtagggctgcctccaagaggaacctctgatttattttgtatgaaatatatgtgaaaggatatgaatctgagagatgctgtagacatctgtcctacacttgagatgatttccaagcctctctggcactttgagttaagtctatctggtattaaatgccaaggaccttttgctgcctaaatccactctgcaggaaataggcccaaccaccagatgagaattaggccctggatgagtagcgctatagttactgtcctgttgattaatttctgccatttcatgtccataaaagagaccacccatatcatgcacacaattagatttctcacactctaactgtatatttgtatgatattttaaaatctcctaaatgctggggcaatggctattaacaattaattgtcttggcactggccttctgatgaaatgttaacaatgcctattgtaatatagaaaaaaacattctatctactgatttgggctgaatgtatgtaaataggtttctaaaaagtcagatgtttgagcagtggcctacaaatcagtaattttcggatgggagagtttctttacattgccgtggcatcttaaaagctatcttcatgtaaattgactgtactaggcctactggggatcagagttcccaagaaaggaaaccttttcttgtatctggattcaaatttatttccaatgtttcaagcgggaaacatgactctttattgtctgtaaatctaacattattacttttcctcttagaagaatattgtattgttagatgtttgttgagctggtaacatcgttgcaaccactgcaatatcttcgttagtaatctgtataatactttgtatacaagtactggtaagattgttattaaatgtagcttcagtcattaaattactatagcaaagtagtacttcttctgtaatatttacaatgtattaagcccacagtatattttatttcaatgtaattaaactgttaacttattcaaagagaaaacatctcatcatgtctattgtccaaagttacctggaatcaaataaaaattctagattaccatgaagaacataaaaaaaaaaaaaa

SEQ ID NO: 47067 - DNA, 306 bp, Homo sapiens; identical to SEQ ID NO: 19141

SEQ ID NO: 47068 - DNA, 2777 bp, Homo sapiens
caatagatgacttaaaaaaagtgatgaaaaattttgaatccagagttgaattcacagaagatttgcagaaaatgagcgatgctgcaggtgatattgttgacatacgagaagaaattaaatgtgacttcgaatttaaagcaaaacaccgaattgctcataaaccgcattccaaaccaaaaacttcagatatttttgaagcagatattgcaaatgatgtgaaatccaaggatttgctagctgataaagaactgtgggctcgacttgaagaactagagagacaggaagaattgctgggtgaacttgatagtaagcctgatactgtgattgcaaatggagaagatacgacatcttctgaagaggaaaaggaagatcgtaacacaaatgtgaatgcgatgcatcaagtaacagactctcatactccttgtcataaggatgttgcaagttcagaaccattcagtggtcaagtgaatagtcagttgaactgttcagtgaatggttccagttcttaccacagtgatgatgatgatgatgatgatgacgacgacgacgacaacattgacgacgatgatggtgataacgaccatgaggctttaggggttggagataattctataccaacaatatatttttcacatactgttgagcctaagagggtccgaataaatactggaaagaataccactttaaaattcagtgaaaagaaagaagaagccaaacgtaaacgaaagaacagcactggcagtggccactctgcccaggagctgccgaccatcaggacgcctgcagacatttacagagcctttgttgatgttgtgaatggagaatatgtccctcgcaaatccatcctgaagtctcgaagtagagagaatagtgtgtgtagcgacactagtgaaagcagtgctgctgaatttgatgataggcggggagttttgaggagtatcagctgcgaagaagccacttgcagtgacaccagtgagagcattttggaagaggaaccacaagaaaatcaaaagaaacttttgcccttatcagtaacacctgaggttttttctggaactgttatagaaaaagaatttgtatcaccttccttaacaccacccccagccattgctgcatcccgcactacccactatttccagaacgaaaggaagttctgttgggaagcatctgaagaaactggaaagagggtttcaaagttttaaagctgccagattgcaacagaaagactaggccctgtctaggaaatgggaatttacatcctaaaacctagttgttcatttgtttagagtatctatagcaaaataggttacatgtagtttgaaataaggtatcctgagttactttggcaacaagttcttttaccccttacccgtggtatttgaaaaaaatcaaggtaactgtctgaatactttaatatcagcttgttttgtgaattctctgaatactgtcaacactcttatctaagtttgcctttatgatgcagtggcagcattttgaattacttttcaaagaatactgttcatatgcattgtttttgtgtttcaaactaaatacaggcagttttgtgccagctgtgatattgtgcataccatatggaccattttaaagaaaattttaaaatttcaaatagattcaacaattacattacttgctttcacattttaaaggcactttaaaaaaatctacttctcttgtaggttttgcggctagttggctattcaagaaacctcgcccctctgaatgtcatactgtaatctttaaggaagaaagctacatgaattaattgtactctatgggaaaatttctttggaaagatattttgtaaaacttttttttccaagtaaaaactttatgaaacttggtctcaaaaatgttgtgaactttatgattcaaaattgagtacagatatgtccttgattcatatgtatgctacatgtatcacacaacagatctggaattctttcagttcctcagatacttctcccttagtttttgcagtttcactgggattatgttttgggaaacaaggaaaggtctagatgcttaaacattttaaataaaaattccttacagtttcatcttcccaacattttcattctttaaggctactttcctactaactgaaataacacatttacttttaccacaattcctcaaaataaatttattctaacattgaaaataacattacaagttaatcattagcttgatgcatgctaaaatgtagcttttaaaaagcattctgcattagtactaaaataagccatcaatgccagtccaccctctctattcatggctaaatatttaaaggttatttatagcttctttaatgaattcttcttaaacaaagtgaaattatgtcctagaaaagtagaagctattcgtaactagagcagtgcaactttaaagttttatgaatatgtattttaatgacaagggggcgagcttgcatccccactagttaatggataattcaaaccgaggactgattttgaaagatcacctaaaaatgtagatttgttctttagtaaatttagatcaactatgcatatattttgtaggtaaatctttcagtccatgccccaaccctcaccaaaaccaaagcagaaattacacacacaaagatgctcccgttaggaattgctattcacatgaggctttctgtgctagatttttttctcagaaacaaactttactgtaggactattgtggtgttcttaacagatttgtaatttcaagatgcgtgtcattaaataatttttcatgttcaaaaaaaa

SEQ ID NO: 47069 - DNA, 1325 bp, Homo sapiens
taacacattaaaaaaataggtttaatgcaggtgggtcatggcatgacgaatttcacaggcaccggggacagcaggcggccaggtgctcagagggcaccaaggtgccacaactccctgcagcgttgacaccgcacgagcggcaccaccagccccctcccgcctcccgtcccaccttcaccctcagccaagaggcttgggtgactctgagtaatacgttaacaaaaaacaaagcttctttgaggaaacagcatgacttagtgcaaaagattctctgcagcaagaaatgaggcccacgcagggaagctcccgcctacctgcccagggcgtggacgcagcccgggctcatcagaggtcatccacagaagctgccgataaattagagagcacggtttacggccagagattttttgctttctctacctgatttagggtttttcaaaaaaagtttctcttcccagtggcacacaactgtcctccatggcttcctgggccactggtccgcctgacagggtagggtcacaagtcccacccatgcccagagtgtggggaccatggatttgaggtgacactagggttgtcagtaccacaccctgtgtcctgctctagggtagcctctgcctgttgtccttgcaatcattattcagggcgccctcccacttgcccccaaagtcacacggccatgggcagtccaccatagtgctgccgtgactgcaaggctgaggagcagagcaaggggtcctgggtgagacctcggcccatggtggccaccctcccctgaacacaggcatctgcgcccctccaagcccacctgcccctgtgccatcatttgggccccccagacactggaggacagcgtgagataagatctcagcatatacctggggctctaagatgctgctggtgccacacaggctctggggctgtgtttgccgcactgaggcctctgccgcctgctccggacacttgggacacgcgtttccatcctggctcactgaagcctcgatctcccaggctttctttgacggtgttccctcaaagaaagaggcccaaagccctcccccgcaaaaaaagccagaaaggaatggaggtgcctccgcagaaatccagagcatctgcaagacatcctcacagccctcccagaacaggcagacaggccagtgttgctggagtcagcccctggctcccagggttccccccaggccagcccctgagctgggagcctgctgaggcccctcccacctgagcccttctccggccccccgctagactgcatctacacaatccaaggggaccctgaaggctggctggggactcaggacccacac

SEQ ID NO: 47070 - DNA, 883 bp, Homo sapiens
tttttttttttggaaggaaaataaatcctttatttttttaaacctatttgaaacctcttaagaaaattccacaataatcaggatttctgtaaatattgtcaatatatatgaacatatttgaaaaactacagttacagtatatttacatttttggaaacttttcttcagggccaagtaacatgttgtatcttcctttttgcttgtgggggcttcaggttattcatggcctctgcctcttctttaggagcagctctctttaacttcactggagtagttccaacaggggacaatggtggcgacttcacagggcctgaaggacttttcctatgcgttaagtcatggttctgtttagcgtcattattattgtgttccgttttattgttcacaggcaaattggaagacaaaattaggggtgaaacactcgaagaggaatttgataattttctaaaggcattactggtaaagcttgcctgcgggggaggcttcagtcgatcattatctccattctctgtctttttcacttttatgcttgtacttgttgaacttccatcaaatacgatgaggggtcttttccttaacccatctacagtgctactccttttagtctcatttttaatctcatgttgttctcttttcttttccatcattttcccccatctattcttcggcaaatccctctgaggcaatggtattgcatgttggacataaaggtcagtaagactgtctttgtttactcttacatcagtttcaacagctatgttcttctgctccagagtgaggagaaggaactcctgggacagcagctccgggtgcagcagcagttccgagtccgtgcagctgcgaccgcccacatcccccgccatggtcgtcgcggacgcgtggg

SEQ ID NO: 47071 - DNA, 356 bp, Homo sapiens
ggagagcagcgctgtccagcggggaggagtctcaccatcacccagtctcctcaccgtcacccagtctcctcgccagagggtccaggacctcagtgccggggtgcgaggagagcagtgctgtccagcggggaggaacctcaccatcactcagtctcctcaccagcacactttttctccatgtctcgttttgctcctcctctggtatttgtatttcttaaagaggattttgaaaagagatggtgaagttggtattttaggtagaagggaccaattgtttcctcaagactaagttggtccaaccaaactgacagagacgaggtctctacatatgaaagatggaacctggccgggtgctt

SEQ ID NO: 47072 - DNA, 1570 bp, Homo sapiens
tccattctcagctaaaggcaagcattgaaagaatacacagaaagcctggaaaaggtttccaggggtgtcaatacgccctgtcaactgagaattaagaggatccggctggtcacttgcctggagaggatcctgcatgctgatagtgctgaggcacctgccagctaagaaccaccgggaggaactgggccattctaacacccgttgctaccatgctggccacccgcctctccagacccctgtcacggctcccaggaaaaaccctaagtgcctgtgatagagaaaatggagcaatgacgcccactattgcttggttctacttccttttatcccgattggccgtcggacttatgccagtgcggcggagccggttggcaggcaaagctgttcctgggtcacaggctgtgactctggatttgggttctcattgggccaagcatctgcattcaaaaggcttccttgtgtttgctggctgcttgatgaaggacaaaggccatgatggggtcaaggagctggacagcctaaacagtgaccgattgagaaccgtccagctcaatgtctgcagcagcgaagaggtggagaaagtggtggagattgtccgctcgagcctgaaggaccctgagaaaggcatgtggggcctcgttaacaatgccggcatctcaacgttcggggaggtggagttcaccagcctggagacctacaagcaggtggcagaagtgaacctttggggcacagtgcggatgacgaaatcctttctccccctcatccgaagggccaaaggccgcgtcgtcaatatcagcagcatgctgggccgcatggccaacccggcccgctccccgtactgcatcaccaagttcggggtagaggctttctcggactgcctgcgctatgagatgtaccccctgggcgtgaaggtcagcgtggtggagcccggcaacttcatcgctgccaccagcctttacagccctgagagcattcaggccatcgccaagaagatgtgggaggagctgcctgaggtcgtgcgcaaggactacggcaagaagtactttgatgaaaagatcgccaagatggagacctactgcagcagtggctccacagacacgtcccctgtcatcgatgctgtcacacacgccctgaccgccaccaccccctacacccgctaccaccccatggactactactggtggctgcgaatgcagatcatgacccacttgcctggagccatctccgacatgatctacatccgctgaagagtctcgctgtggcctctgtcagggatccctggtggaaggggaggggagggaggaaccccatatagtcaactcttgattatccacgtgtggattatccaccatgccaggaagacccataactggttttaacactaactagagggaatgacttctttgcatagtgagtgacttgggccttcacaaacagggtgtggagtggcaggcagaggcctctaaatctcagagcaaacatggtgaatctatctctccggagataatttcatacagagattttaagaaaacatctttatattaaaaacagatctcatttgatccttaag

SEQ ID NO: 47073 - DNA, 1131 bp, Homo sapiens
gacttttttttttgagcttttgtcactttattgttaaccaatgaatattatccaaaattagagatgtaattgtaacttaattgtacaacacaaaattatgctaatggtaaaagcctactgggatttaccaaatactcattagtgtatttttacattgactatatgaacatgtgctcgcgactgctaataagttataattggtttaatctctaagaaatccatattgcaaatggttcttgtttagaaaaattcacacagccttaaaaatggattaaatccattttaatcctaatctacaaatagatcataaacagcaaaatataactgataatttttcaatactgtatcaaactgatgtagctatggtagtgcacataattcaaaatgaggaaaattaacaaaaatccaatgaaagttcaggtttttatctattatgcaattgctttaaagtgaacatttatgtctcaaaacatgaatagtagggggccaccaacccattcccttggatggtccgcaagtaggaatattctcttccataggattctgaagcatgtgcacaaccatggtacaacagtcacttcaaggttaaccagctatgttttgtcctacaaagttcaaaaaatatattaaacgcaacctttcttttacataatgtctgcccagattaatccttttaaagtcagcaaaatcaaaaaagcacaagagatattttcagacacaacttgaatctactgtgcatgaaaatgtttaataaaatggcaattttaatagataaatgtaaatttgactgtgtaataccaaatggaaagtagctgaaccacacagagaaaacaaggctttacgtatctccaaatttagctgttttacaataaacaaagtattagaacatgtgaatattagaacctccttctaactggaaagatttcttcagtaagctataaccgaaattaatataaactaaaattataatttctaaaataagaattaacaaaccaaatttaagtatttttagtcagagattgaaacaaaataagcacagtgatctagaaaccaaatatactgattatgtaactatcgtatcaaggtacagacattcttcacatgctacaaggttagcatttctcctcgtgg

SEQ ID NO: 47074 - DNA, 332 bp, Homo sapiens
gcttctacatgacttgtccatagaatccaagcctaaaaatacatacttttcattgggtctttggtcctcatttctgagggctcccttgtcatggaaaactttgttaaataattttttaatggttttctcttgttaatctgttttgttgtaagattgcaagccataaccctggcaatgggtgacaaaaaactattaacttcttgtctcctacaatagacactgttagtaactggactctaccctcccatggaatttccctcacttcttttcttgcctgattcaatcataacaaccctgctgactttcaattgtgcctacaattttcaccttaa

SEQ ID NO: 47075 - DNA, 1006 bp, Homo sapiens
  misc_feature (1)...(1006): n = a,t,c or g
tcgcatttggaaaaaatggtcccactttattactgccactacactgttcaggcctataccatcttgtgtggactgttaccagcctgtcagctaatgcctttgatgaaatttacacttcaataaattgacatttaaatttacacacaggtcaatggtaggtttaagactgtctctgctatgttgattgactagacagatccaggtgtattttagacttggaatacgacaatcttcacttacagagaaaatagttgtctaaaatttgccctagccaggaccagaaggggctctctagtgtctgacacttctcccattcctgaccagctttcaaagagaaagagaaagattataatggacacagtaatgatcccagggcagcagaggcagttccaatgtgtatttttactttcagacccctgggttaagttggcttccaacctgtccctggagagtccaggtcatgtccaaggcaggaagttgcaatgtaggagtagtcccaggagccagtaagtcaggaagtagcctagaatgtatcgtgtgactggagaacaggttttccagtgatacaaaagtcccatgataggatttctggggaccttttgtcctggtggggagtcctctgcaagaggcttccaaggcacagtctttaaggatctcaacagcggctcttgatcctgaagcaagtgagctggaaaccagtacataataggagtggaggagccnaaaaacctggtgagaacctgaacatgcatgcacagacctccaaacagcagcagcactgcagcgtggaccacgtacacaaacacctgaggactgaggaatccaagatcgggcttctctagggtcttattgttcttgctcctttgcagcccaagtgtaagcagagccaagggtgagtggtcacgtatgtccaanttgcccaggcaaccagtatagccactggtgcagccagtagaaaattgggcacctgcttgagctcatagtatttcaaaaagccaacattcca

SEQ ID NO: 47076 - DNA, 2399 bp, Homo sapiens
acagcttgacatgattacgaatttaatacgactcactatagggaatttggccctcgaggccaagaattcggcacgaggagcaaattatttcttacgtgactttagagaaaacggctacctatctgaccccaaaacgacttgaggaaactgtttccacggtcctgctgcagaggggaagcacagtcgtcaagaagagagtggggtcaggatcaaaacacatttagtgtgacttagggaaagaaaacattttccctctttgaacctctctggatacagtcattttgcctctacttgaggatcaactgttcaacctcaatggcctttcaggacctcctggggtcacgctggtgacctgtgggagattccagatccttcagactgtttttctctcaatctttgctgttgctaacataccttcatttttatggctgggagaactttcactggcatttcattacctgggccatcggtggctggggtccacatcctggacaatgacactgtctctgacaatgacactgggggccctcagccaagatgcactcttgagaatctccatcccactggactcaaacatgaggccagagaagtgtcgtcgctttgttcatcctcagtggcagctccttcacctgaatgggaccttccccaacacaagtgacgcagacatggagccctgtgtggatggctgggtgtatgacagaagctcctttcccttctccaacatgactgagtgggatctggtatgtgactctcaatcactgacttcagtggctaaatttgtattcatggctggaatgatggtgggaggcatcctaggcggtcatttatcagacaggtttgggagaaggttcgtgctcagatggtgttacctccaggttgccattgttggcacctgtgcagccttggctcccaccttcctcatttactgctcactacgcttcttgtctgggattgctgcaatgagcctcataacaaatactattatgttaatagccgagtgggcaacacacagattccaggccatgggaattacattgggaatgtgcccttctggtattgcatttatgaccctggcaggcctggcttttgccattcgagactggcatatcctccagctggtggtgtctgtaccatactttgtgatctttctgacctcaagttggctgctagagtctgctcggtggctcattatcaacaataaaccagaggaaggcttaaaggaacttagaaaagctgcacacaggagtggaatgaagaatgccagagacaccctaaccctggagattttgaaatccaccatgaaaaaagaactggaggcagcacaaaaaaaaaaaccttctctgtgtgaaatgctccacatgcccaacatatgtaaaaggatctccctcctgtcctttacgagatttgcaagtaccatccctttttggggccttactttgcacctccagcatctgggaaacaatgttttcctgttgcagactctctttgggtgcagtcaccctcctggccaattgtgttgcaccttgggcactgaatcacatgagccgtcgactaagccagatgcttctcatgttcctactgggcaacctgccttctggccatcatatttgtgcctcaagaaatgcagaccctgcgtgtggttttggcaaccctgggtgtgggagctgcttctcttggcattacctgttctactgcccaagaaaatgaactaattccttccataatcaggggaagagctatggggatcaatgcaacctttgctaatatagcaggagccctggctcccctcatgatgatcctaagtgtgtattctccacccctgccctggatcatctatggagtcttccccttcatctctggctttgctttcctcctccttcctgaaaccaggaacaagcctctgtttgacaccatccaggatgagaaaaatgagtgagtaaatagcccggttgcccctcagaggatctgtgtgctataggtctgtgctgaggaaggcaaaataccatttagggccactgtcctctcaaaaggcttagacttaggattttcccatgtaatcagtgccttaggtctaggtacagccacatggctttccccacagtgaccttcaagacaccttctgggggctctcccagatcacacagaccagctctgccccagcttgtcaaaggaggcttcatagtgaagaagcccaaaattaggtctcctcttccctccctgccctagtgtgatatgcacactgttgaaggtattttacaaatatgcagagatccaaacaccagattttcatccctgggaaaccctcaaacaagtgggtacctgtaagctgtctgagattgccagtgcttacaggcctgactactaggccactgaagaatttgtggaagagtatgcagatg

SEQ ID NO: 47077 - DNA, 624 bp, Homo sapiens
ttttttttttccaggaggccaggaaatattttattgacaaccagggacacagtcataagagagggaagcacacaggactgcaaactaacacccagtagccagcaagggccctctgcgagggaatactgaatcctgggatcctcacagtctcccaccagtagacatacattactgggcatccaggggagggggcagtggctatggtgtcccagagagtgagaggatatatgatgcctcattatgagcgacagggtaaagaggtaaaatggagggtccatcactgcctaagaccacctcctcctctcagagccaacaccaggtgaaggactgaaccaccttaaaatcttgtaatcagctgctgtcttctcatcattcatctgcttgccactgtagatgagcctctgctgttgtggggggattccctctttctcctccacacgctccttgattcgctccaccttgtctgtaggttcaatgtcaatctcaatctcctttccggtcagcgtcttcactttaattagcatcttctttccagtttgggggctgcacacggataaattgctgctcctaccgctccggtcgccgctgccgccctccagcactcttgcctgcaagggccacttc

SEQ ID NO: 47078 - DNA, 1595 bp, Homo sapiens
taaacagtaattcttcagactttattaaaaaatgacataaagtgcatcttattaaaaaatgtataaaaaccacataaattcagggcccctgtgctgggcagtgttgatatcccttagagtggaggaaggtgagggatggagggtgaactggggactggggagaggaccagggtgcagttagttcctcgtgtttgagttcaaagatggagcgagggtggatatggtgggaaggggcacacgggttctcacgcaacaacggaggaaggcaggcgacagtctcttcccctgaattctgagggaaaggcgtacattgtcacgaaatctctcctgagctcgcgctgtcctctcgtgtggccacagcctgatacaggctggaaaaggtccaggagttgggtccgagcccaggacctggtgagggccgcagtgccaacctagccctctggtccctgaggtggtgggacgacggcagcaacaactacatcctcggctgactggcaaggcagaacgcacgcagcccaagctggtcctgaatctgcagtgagacagggcagccggtggcagcgggataatgtggaaggtgaagaggccagttggtgagggtttccaactctgtctcagacaaccactttggatgcatccccagcacccctgggaggccatgaactggagcagccgtgtgtgctgcatgccatgctatctcttccctctcattctagtttcacatttggaattgttttttaaacaaagggctcagtttacataaggagcactgttccaccaacctaggcaggccccccatatttggccaggacctctggggccacggctgtttgggtgtctgggtggtaggacttcgctacttgactggagagcagccagccagctggccccaaggctcccaagggccgggcaccacggctcgtgttccacgaagagcagagcggaggggaggtccagttgaccctctccgagcattcacagcccctgaagccagggcagcgtcctctggaagtcagctctcacaccacagagtcacggatctccgagccaaggcggacccgggccgggggcacactggggatacctcccacgaagctgtcttggatgctgagtggcctcttctctgactcagtgaagactcgggaaccccggggggctgtctgaacagggactggtaccctcggtgatcgagcggggtgctagggggccctaggccgttgagtgggcgggtctcagggggcagcaccacagggcaggtcttggggtgcacgctggcacattccccctgcttcaggaagactttcatgctgttccggtgccggtagagcaagaataaaactgggagcagcacggccagcacaaagagcgtgcacatcaccaggaactccttccagtaggacctgtctgcaccccagctggccttgccaccagctggtgcactcacacgcgatgtgctgataatgacgggtacactgccaccctcatctgtttggtctgccaccccgtcctccaccacctctgggcagtagctggctaccagctgctggaagccctcctctagtgaccagcactggaactcccccagctgttgggtg

SEQ ID NO: 47079 - DNA, 494 bp, Homo sapiens; identical to SEQ ID NO: 2080

SEQ ID NO: 47080 - DNA, 973 bp, Homo sapiens
tagcgtttatcgaaggctttactggcaagcaggaaatgtggggaagtgtggatgttagctctgagattggggtgtggtcagacatctggccaggtccatctctgaccggctcctggtcaacccccagggagctggaagagtgccagcgaaaccacgagggtgatgaggacgacagccacgtccggggcccagcaggcctgcattgaggccaagcacgtgagggtgccccccacccacatgtgggtctgtgtgtgtgcacgtggcgtgggagcatccccgccttgtgttgggtctgtgccccatggaggagggaggtggggtgtctcccccaagcacagcactcaactctttcacaggacaagtacatggcggacatggacgagcttttttctcaggtggatgagaagaggaaggtgagtgtgtgtcgcttgctgccgatggctggcaggtgctcgtgcagtgccccttttcagcctctgaccgtgtgcccctgtgccacagaagcgagacatccccgactacctgtgtggcaagatcagctttgagctgatgcgggagccgtgcatcacgcccagtggcatcacctacgaccgcaaggacatcgaggagcacctgcaggtgaggctgcggctgggggagcagggccagtggcatggtcctgggccccatgactgccctctgcccttcttgtcactgcagcgtgtgggtcattttgaccccgtgacccggagccccctgacccaggaacagctcatccccaacttggctatgaaggaggttattgacgcattcatctctgagaatggctgggtggaggactactgaggttccctgccctacctggcgtcctggtccaggggagccctgggcagaagcccccggcccctatacatagtttatgttcctggccaccccgaccgcttcccccaagttctgctgttggactctggactgtttcccctctcagcatcgc

SEQ ID NO: 47081 - DNA, 2728 bp, Homo sapiens
  misc_feature (1)...(2728): n = a,t,c or g
cagacccagaacatccaaggattcctgttacagtgctacagtatacactgctcatttatcctattctcatgtgctttcttctttagtaagattattttaagaaaataagtgatatttaaagtccaaagaggaatgatcacagttgtataaggggtgttttcccacttgaactctgatgtcagtcgactgtgggtcagagctacaaccatctgtttggtttgatgttttggtggtttacttacggagtggggatagtgtgagacctaattccctgtgcaaatgtctcttattccagaaatgtgcattttgtcatctataagcaagaaatatgggcatagcagctcttggtttaaagtttgccataacctgttcatgtttgttttaagctcaggtaaagataacctcctctttctatgactccagtttccattcaggttatagtattattcaatagttgattttctttttaagctgggcaataaattgatgtttccagatggtaacatgggagagggcatataggataaagatgagcaaattctaccctaaaaatgttctagtagttcacaggaagaagatgaggtttaataactttcaaggtaattctagattgacattttgaggggaaaatgggctcttgttctagttgaagtgagcagagaaggctataaattaatatgtaacttacagcattccagaggttaaaaataactgatgcagatgtacttcttcagtgtgattcttcagatcaaacttttacttttggcatagttaatttcagaaaaatgtgctgtatgtgtgtgtgtatgagggttggtcttgctgatccttcagttagctctaaattctggcaactccttgtaattccaatgtatttgatacatgaacaatcatgttgaatgcatttgtgatctgggagacttcctcgtcttccagggaaggaaggatgtgcagcccctgaaggcatgaaactcccagtgtgtacggagccagtggaatatgggatacccataccttaccaggcgctggttccttctgctcacaataacatctgcccaaagagggagtgggaagaacgcttagctctttcactagtatggatttgagttcatggtcactatttttacccacctgcctttgttaaaaatcactttgagtagaatagcactggaggaacatatttagcacctaatattaatatttagtagtccattgataaatttgccagcatatgttctagcctctggggggaaaccaggaccacttttgtctgtggcttaaacagttcagttgctatatctgttgggtatgccgggggtggatgagtgtggcattccgtgaagaggaaggtggtaagtaaggtttcccttctacttgccttcttaagttgcaggagggagcttttctcctcccctctggttgggagcactgagggacagtgagggagggcttttaccctgttaatcctttccttatttagctagctttcctttttgtctagggcttcctcttgagaccctcttccatccattgggcctttgaaaagcttcnnnnnnnnnnnnnnnnnnnnnnnnnnnnnnnnnnnnnnnnnnnnnnctcatgcacattttccttcatttccagatcctttatttcagagcagcccattttcctctggattcattgatgaatacaagtacccacacctttggccagtaatgtcagttacctgctgcaggttctgtgtatgaggccttcatgaacggttaccttctccatacactagggaagcatttgtcagactctgcagactgggttctagagaggcagagtctttaagagtattcatttcttctggaaggtggagctttacccaaagtggaagttagccttgctcaaagatgtgttttgtggtaggtggtaaaaataaataaatagataaataataaaaaaagaaacatgtattggaggtaatttgacactgctgctgggccgtagttctctattcaccattttaaagcccattcaggttctctcttcctgaaaaggaactgattgctgtgtttacatgaaatgacattggagtcagatggtctgttttaaagatttccatgacagcctcttttcctgagttggagagattggaggtggtctatccgtacgatgtggaatcaaacggtgggtttcttagtagctaaagaagccatgtacttctagtgtgtttctcagaatatcaactcatgttcttcagatgcttttctttttttaatggtgagggaaaaggtataatttgggattccacagtgccttgcatatagtagggcgccccagtaaatacttgttgaagcaaaccaagtttcccaagtcctcatctcttatagtgaccaagacatctttctcctctgaagggcttggcagttgtggctaaaaaataagcagtatcattatttgcttgaaatcatatatacagtttgtatgaatttcagtatgttgccaagacatgattttttcttattgtattttctgtaaatatttctggcactgaactgtaaagtaaaggcaaagtgtaaatatgaaggcgtgcccgtgccccttgcctcctgtgtttcatcttcgtcggttagggaagaaggtccagaggtttgtttgtatttatgccgatcctttgtccagaagaagcccatggaatattgaatgtaatacatttagtcaattaaattttaaggagattcttatctaaaaaaaaaaa

SEQ ID NO: 47082 - DNA, 1503 bp, Homo sapiens
ttttttttcatatctcttgtatgccaaatatttaatataaatctttgaaacaagttcagatgaaataaaaatcaaagtttgcaaaaacgtgaagattaacttaattgtcaaatattcctcattgccccaaatcagtattttttttatttctatgcaaaagtatgccttcaaactgcttaaatgatatatgatatgatacacaaaccagttttcaaatagtaaagccagtcatcttgcaattgtaagaaataggtaaaagattataagacaccttacacacacacacacacacacacgtgtgcacgccaatgacaaaaaacaatttggcctctcctaaaataagaacatgaagacccttaattgctgccaggagggaacactgtgtcacccctccctacaatccaggtagtttcctttaatccaatagcaaatctgggcatatttgagaggagtgattctgacagccacgttgaaatcctgtggggaaccattcatggtccacccactggtgccctgaaaaaatggccaataatttttcgctcccacttctggctgctggtctcttccacatcctcacatagaccccagacccgctggcccctggctggggcatcgcattgctggtagagcaagtcataggtctcgtctttgacggtcacagaagcgatacaccaaattgcctggtcggtcattgtcataaccagagaagtgaattctgccccctggcagctgcttagcaggagggctcaccccaatcttcataaattttctcttgtggggctttttgagttccaggagggcataatcataatccatgccgatgtcattggcattgcccttgatccaacccttgggcacatgggtgcgtttcacccggatccactgaaatttcatctgctcgggcatggctgaagtggagtcgttggcccctcgaccaccatctttaaacttgggctttaggaagcccactcgaagcttctgggttcctttcacataggtttttccatcgtgtatgcagtgggcagctgtgaggacatgcttctctgccaccagggtgccggtgcagcccgtggataacttcactgatgttgagaaagggtagttgagcaggaagtccttcccaaaaatgctgaacctgctgtcatagccataaatctgccgcttccttcgagactttcctgaagaccctgagtctcggtgttgggccccatctccactactgctgaggatgtagatgccccacctgcgtctctgtgcggctgccattggcatagagcgtttcataagacagatattgcttggcctcttcgtaagtgggcagtggagttcccttatgacactggggtccacatgaagaagatacttctaatttggcttcggctccaaagtctggcttggctaaattgagggtagactggggcaagacgacagggaggcggtatgcaggccaagtgggtttccagggggcactgtaagggctcacttgcccaacagcacagagca

SEQ ID NO: 47083 - DNA, 2679 bp, Homo sapiens
ctattaagctctataatttatccatcaagatattttgatttgcggaatgcatttaagtacctacaacatgattataccccagggtaacatttatagataaggtaatagttgaaaagaaaatcaggaaatacaaaatatttgttactgcaagcaattttaatacaaaagtgtgtcttgtttctaaacagttcattggtagagcttcagtttctgcctcaattaaaaccaattgagataatcacacagcaacatggtcggagctgaagaacagcagctaaaaaacaggagccccagacagccccttttcatggtcacttggtcagttgactttattacgcacaaaaaaagacgaaagcaaacaggactggttaacaagtgtgctggtgaactccattaaaggacgagcacgtgtttgtcttacgtccacattttcagaacaggctcgtggaattcattcctcagtttgtgggaagttgatcgaccatttaaataaatagcaaaaaaagtggataaaacaaatctgaaattcacaatgtcaccaacgagcctatcccttgccaagggtctgggtcctggtgaacacaagagttactggtgtctaggctggatagggagcaacaaatcagtttaaaaccccaaatgttctgacgttttctgaacacttacatttacccctgaattctagcagctatttgtcctttaaacacccagtactgaaacaatatccaaagacagtattgcaatgaactccttttgctgtatcatgtgcaaatgttacttagatgaggttccctctctttagctaaaaatcacaaaacattaaacaatggaaaaagccctcccctcagttcttgctaattgaggtgtccgtgatttacaaaaaaagagttccttaaacactgcaggattcttatttttttaatataatttatcttgctgagatagcaagtcaagtttataaagaagatgcatttaggaataatcctaaaagataaagcaggtttacaaccctgcaccgcgcagaaaccctattaataggcttttttttttttaatacacatttgtatcttgaccttttcacttgtttttctcaaatatttcatttctgggccccatccattacagggttaccaggaggcaaattttatctacataaatattcacatgaaaatagtaacttacaaaaagaaaaaaaataaggcagcttcataacacaattattcttttacacttttaacaatataacttctcccgttcagaataaatatacacccaatgtatggagcaggattcaaagtggatagtggcttgggggtgcttagacagtgttatcgcttgggacctggagtcctgggggaggcagtggtggtcttcttagacatggttgggattttggaaggtttgtttagccctctcctggagttgccttggccccctgcagcgctgctttctgaagtgtcggaacaagcagactgcgtctctaagaggtcaaagtcagaagcgtcacttcctcgccggctgctggctcgactcccggctcgactcccagcccgactcccagggcgactggcagactttttagggtctgcccgattagttttggcacctgtggaggccggggaagaactattgctggtatcaccagcaagggatgtccgactagaatgaaaagttggtgttggtccgtttccaacttgctaacctgatgatgggattaaccttggttccactgggctggggtggctggagaagatggcatggatgtacagctgtggttactctgactagcactggagctggaacgagtaggggaagctgcccgggaagatggtttggaccttcgaccccgtgagcggaagggggtcattccctgggatgctccctctggtaggatgaatttctctctaagttcaatgttagttctacctcgtgctcggcagggatcatttttcactaaaaattcatccaaggccatccatcctccaccaacgcgaaccatcacggtgctgcgcagaatacggaccagccgcaactgctgagaatccccaaactgattgccgaggaagaaccggtatttattctctccgatctgctccacctgaaacctttttgcacatttgcactgagccacttgtcttgtaacctcatcttcgattttatctgcatcggttgttggtcgatacgcatccttgttgggatgaagagcagccacaaattcataataatcaatgtaaccatccccatctcggtcgaaaatgtcagccacagcagtcatctctaacttggtggtggggaacttggatgctaaaatgccatcgataaactcctgacgtgttatcttcccatcctggtccttatcaatgcgccggaagaaatccatcactcgagactttttgtgattcatccaacgcatatactttttcctccagacatcaaagtcaaagttggcaaattctttcaactcctccagccgatccaaggcatcattcagtttcctttgccgctccagtgctaacagccacacctgctgccagcgggcagaaagctggttgatccgtgggttttttgcttcagactgtgaaaggattggcatgggaggaggggttggctgacttagggatttcctgcctccgctgcgggatttctctatgaaaggcgcgtgagtaggctctatgtttt

SEQ ID NO: 47084 - DNA, 497 bp, Homo sapiens
tttttttggagtatcatttagatctgttaacagtacagttgagagagttggtgtcttttgttgaggtgcgaggacccgaggcggcgaccctcgcctttattcgaagaagcccacttccacccacagagttggggtagtcctccgaaatgcatttttgttttgccgtttgttttccaaccccctttcactctccccaaagcttcagattcactgatttttcatacaggaatgattaacaaaggcgtccgaagaaatcgttgttggaaggtgaccaaggtggaaagagacgttgctttggccctgcaagtaagaagagagagggaatagcctgaaggagtaacactaaatttaaaatgacacttttttaccaaccagcgaaagcagatgttcaaaggggatattggccaggtgcggtcgctcacgcctttaatcccagcactttgggggcagacgcggggagatagcgtgattctaggagttcaaccccagcctggcaa

SEQ ID NO: 47085 - DNA, 356 bp, Homo sapiens
agaatgcttacaataaactctcctccagggtcttcctggatcacaacgccctccccgacaccctgaaagtcacctacgactccttctgcagcaatggagtgacgcacaggaaccagcccagaggtgactgtgatggcgtgcagatcaatgtcccgatcaccttccaggtgaaggtcacggccacagagtgcatccaggagcagtcgtttgtcatccgggcgctgggcttcacggacatagtgaccgtgcaggttcttccccagtgtgagtgccggtgccgggaccagagcagagaccgcagcctctgccatggcaagggcttctttggagtgcggcatctgcaggtgtgacactgg

SEQ ID NO: 47086 - DNA, 1737 bp, Homo sapiens
cttggtttgagtatgatgtttaatgtaaagatccagtggcttggcagagttggtgcaaaactgtaaagtaccagattaagttctagtcagtgagttagcagcctaggcacttgggcaaaaaaattggccctgctgtcccaagtcctccaaagccctctccgtatcaccagctaggagctccaagactgatatgccactacttggaggcttgagtagaatccacgcgtcctcagtttccaaagtgacaagagactggccccagccatcaaagcagtagaattttcaggacagggttgaggacagtggggacagaactggacatgggggcctgagctgctgaacatttgctacatgcagtagtctaagaggctcacagctggagaggttagcctgtccaccttcccacccatgtgtggtagggaagaaggtgaccatctagttaaagaaaaaaagatccttccaaagctgtatttggcataagctaataccactgctagtgctgccactggccaggcacagatacagaaggccctgaggagttgggaggaagggagaacaatgtgcaggcaaagcaggaaacagccagctcaggtccccgccccaggggcccagaaggataaaggccgtgcagtaaagggaacatacggttcttctctttggtcaggcaaaggcccgaatatgggcctgttaggtgaaagggctgaagggcacaggctctgcccttggaccctagctttaggctcatcacattgaggcggtgatggagcgagacgaaggcaggaagacagagcagtcaggctgggactcgccagctcctaggagctgcccttgtccttgttgtccatcaggtcataccaccgggctacaccctgggaaaggtctgtctcagctaggtccagctgcaccttccccagcagctcacgctctcttgacatgaaggaggaattagacttgacagagacatccagctttcgtctctgggcctcatccagggggagttcccactcaaaccgttcattaaattcaggactcagggtcctcttcttctgtgaggtcctcctcttggtgcctcggttcttgtctggcagtagcaacagtgacacatagggatcaggaggatcacgtccattctgtcgaagggaccggcaaccatgaacaatgctgaccagctttcgttcttcactgtagtaccacagagtcagtttcacctggcccagaggcccggctggagcctcaaggggactgtcaacatgtgttaggccctgccggcgctctggggctgaggaggtgatgtgagggggtccccccgagagctctggttcttcactcagcgatgaggagctgtggctgtagctgtggctatgagcttccactcccgagtgctgggacacccaggatccctagctgtgctctcagtagcacctgcccctgaccactgctgagtgtaaaccagcggtccaagcagagctggtcagccacgaggagctctgagaggggcagggataatgagcccagcacgccagtgccctcaccccgaacctgcaactctaggctctcagtgtgtggtttcctgatgagaaaggaggcactctcatcccagacaggggctgaagtttgcgaaatagtcttggttttatgagaactatctcccacagtgagagtagcataagggctgaggtgcttggtgccttttcgcagcgggaggtcctctgcccgctccatatagatggatagcag

SEQ ID NO: 47087 - DNA, 663 bp, Homo sapiens
  misc_feature (1)...(663): n = a,t,c or g
ggtcttgcttacctgcatgtagcaaagcccagacatcaagcatggtgggtgcagactgtccgtgtgacccaacaccgtgaggctgtgagccctggcagcactccaaaacaatagccttgcaaaacgtactccccagaaagggttccacaattgatgagattggtcactactctgcatattagcacattaaagatttctttatgaaggatcctttataaagaaaggataaataaacctttattagacctcacatttcccagactgacttaactatggaattttttttcacctaatgtctatgagtgatcatggagctagtgttttcaggtacacgttttgaagagactggctggacacgtgactgctacttattggttttcacctctctgtacatctcagtctgggtaatgatcaataatggctttacaccagataaaaatgattatgaattttgtgccaaagtggnaaatatgattatccctgcacaagggcattttggaatatctgctgcaactggaggtcttgcagatgaccatgatgtcctttcttttctgactttccagttgactgaacctggaaaagagccgcccacaccagataaagaaatttcggaaaaggaaaaagnaaagtatcaggaggaatttgagcactttcaacaagaat

SEQ ID NO: 47088 - DNA, 1299 bp, Homo sapiens
gcgaccgccgcttcagcgaccgctcggacctcaccaagcaccggcgcacgcacacgggcgagaagcctaccgctgcgaactgtgcggcaacgtgttcacgtgcgtgtccaatctcaacgtgcatcggcgcaaccatgccggccacaagccacacaaatgccccgagtgcagcaaggccttcagcgtcgcctccaagcttgcactgcaccgcaagacgcacctgggcgaacggccagcggagtgcgcagagtgcgggcaagtgcttcagccacagccgctcgctgtcacagcatcagcggggcccacacgcgcgcccgcaccgctgccgccgttgccatccagtccgcagtgggcactgccctcgtctttgaggggccggctgaacaggaaaagccagggttctctgtgtcctagttgagggaggcttgctgaggcttctctaaaggtggttgggcaagcacctatatagtatcacggggacagttgaggcaactcgtagatggagatttgggaaaagacgatgtggcctcctacctttccagtttctgttggcagcccttcacgtagcctcctgcctcgcctctacacctactaccctgtcggcccttttgccatgctgtcctcgtataactcggattctctcctcaggtgtaggtgcagggagtcagggaacccttagactcccctgtgtgcaagagcccaggtgttggtgtgtccctttaatgctactgtgctctctggtgtttctgattttcctgcctttattctgtcttctcttgtcctatctcattccagcccacatcttctcctttcctgattacttttgttgtcctgcctcttcaggtaaatggtcacagatttggctgtaggcacgttaccagccctgtggcttcttgactcttggttccctgttaactctgtttctgagaaatgtgggtatggaggtgggtgggaaagctcacttccatgaaggatgtctccatgctaggagctgcctgcaccctggcagaggtggccagtcacgtgaaggtggggcagggcccttagcatggccacacatgtccccagggcagatcaaggggcctctcagaaccatgttccccagccaggtgaggaccattttcactgggacccaggccaaaaccatgtgggtgcacaaagccaggcactgccaagtggaacatgaggttatttccaaatcatgggagccaccagcagggagagggcaggatggaaaatcccctggagccggtcaactttttgctcatggctagtgaaataaagttgtttgagtactag

SEQ ID NO: 47089 - DNA, 819 bp, Homo sapiens
tttttttttttttttttcatggccaaacgtaactatttattcatttttttcttataaacattgagtttcttctttaaaaaaaaaaaaacacctagaatttaaatatttcccatcccatcacatacaagtctgtatacattatttacatcttttgaataaaacatattacagattttctgacatcagtatccctttttaaacaaaaatgaagcaattaaactttgatcagtaacaactacaatttgcataatccggcacagtttgtaatatagcgcctatgttggatttcataacttagatgatttttccccttctagttacttgattataagagagaaactgtctccatgagagtagttccctgtctttatgcactcttctcaatacttgcacagtgtaaatgccgcccttattcttccattacttggcactgacaatattcctctgcttttgtcttcagaaatgatttctatttgaactttaagtgttctcatatatactgtattctccttcaacccagatttcatgacactgttcctagtgttaattctatgcagtaaaagttaaacctataggaaaagttcaaataaaacatcaagtaagtgtttcctacaagattagtgccctcaccaccctggttatgcatgtacaataataaatacaagttagtagctccaaaaaaactactttccctaaaaagtcatttctgtcgaacaatttaaggagcaaagcatccttaaaatgaaaatgcactaatcttttttacaacctgcacaattaagtatttcagaaaaacaaaaacttgtgcaaaatggtaag

SEQ ID NO: 47090 - DNA, 888 bp, Homo sapiens; identical to SEQ ID NO: 19243

SEQ ID NO: 47091 - DNA, 1744 bp, Homo sapiens
gcggcgcggcatactcagcggcagagacggaagaacagcgctcccgaggccgcgggagcctgcagagaggacagccggcctgcgccgggacatgcggccccaggagctccccaggctcgcgttcccgttgctgctgttgctgttgctgctgctgccgccgccgccgtgccctgcccacagcgccacgcgcttcgaccccacctgggagtccctggacgcccgccagctgcccgcgtggtttgaccaggccaagttcggcatcttcatccactggggagtgttttccgtgcccagcttcggtagcgagtggttctggtggtattggcaaaaggaaaagataccgaagtatgtggaatttatgaaagataattaccctcctagtttcaaatatgaagattttggaccactatttacagcaaaattttttaatgccaaccagtgggcagatatttttcaggcctctggtgccaaatacattgtcttaacttccaaacatcatgaaggctttaccttgtgggggtcagaatattcgtggaactggaatgccatagatgaggggcccaagagggacattgtcaaggaacttgaggtagccattaggaacagaactgacctgcgttttggactgtactattccctttttgaatggtttcatccgctcttccttgaggatgaatccagttcattccataagcggcaatttccagtttctaagacattgccagagctctatgagttaagtgaacaactatcaagcctgaggttctgtggtcggatggtgacggaggagcaccggatcaatactggaacagcacaggcttcttgggcctggttatataatgaaaagcccagttcggggcacagtagtcaccaatgatcgttggggagctggtagcatctgtaacatggtggcttctatcctgcagtgatcgttataacccaggacatcttttgccacataaatgggaaaactgcatgacaatagacaaactgtcctggggctataggagggaagctggaatctctgactatcttacaattgaagaattggtgaagcaacttgtagagacagtttcatgtggaggaaatcttttgatgaatattgggcccacactagatggcaccatttctgtagtttttgaggagcgactgaggcaaatggggtcctggctaaaagtcaatggagaagctatttatgaaacccatacctggcgatcccagaatgacactgtcaccccagatgtgtggtacacatccaagcctaaagaaaaattagtctatgccatttttcttaaatggcccacatcaggacagctgttccttggccatcccaaagctattctgggggcaacagaggtgaaactactgggccatggacagccacttaactggatttctttggagcaaaatggcattatggtagaactgccacagctaaccattcatcagatgccgtgtaaatgggggctgggctctagcccctaactaatgtgatctaaagtgcagcagagtggctgatgctgcaagttatgtctaaggctaggaactatcaggtgtctataattgtagcacatggagaaagcaaatgtaaaactggataagaaaattattttggcagttcagccctttccctttttcccactaaattttttcttaaattacccatgtaaccattttaactctccagtgcactttgccattaaagtctcttcacattgatttgtttccaaaaaaaaaaagtcga

SEQ ID NO: 47092 - DNA, 1314 bp, Homo sapiens
tttttttttttttttgttaagacaggaaacacatttattgagagcacagtggggtgcgccaagccctgtgctttggaaccgcatcacagcgcccctcacaacagccctgtgaggtaggtgaaggagcccacttcccacatgcagacactgaaggctcaacagctcccctaggcctcagggttcctgcggggtgggcaggggtccagcccacgggtctgaccccaggtcagcggcgtccatcagtcagagggcgggtctctactcaagggggaggccccgggtccagagtctctgggtccagcctgtcccgtgggaataggtgcagggtgtccccgtggctgtggagggatttcgagcttggagaggggctggggtcccacattcgaggtcccttcccacgtaggcatccaggtgatggcttccgcccaaaccaggaaggagacgagaggcccgccaggaagaagacttgggtccgggatggtgggccccatcagggcctcttccgcagcttccatccgcagttcttcagccgacccagccgggccacggcccacgtgccagggaacgatcacgaggggtctctgggatgggacaggagtctgtccatagccctgaggccaggcccacaggaggaggcactggaggatgcttggcaggagatggagacaccagcaggggcttgtcgggggcactgggaacctgctggaaacaggcagctggagtgggagtggctcctggggcaggggagtggtactcagaccacaggagggccaggtgaccacaggtatgggcttggcagggagaaccagcctgctaggcagagggctgtggagctgagccctggagcccagggactgaggcagagaaggggaggttggtcaggcccacctcaggagacagagcaaagcggagtgccgggtgggtgaggaagctggccgctggagagccaccagggagagcaagccagcagccgggcagaagcagagcctgcagatgctccctggaggtttcccctgctggtcctcggcatgggaggtgggccccagcagctgctagagagtgaaggagctggaccaagccccgggggaggaaggcatcacggcaagggaagggtcgcagtcacaaccacacctcgagagggagacctgtggccaaagcgcgggggggcacacactacagctgttcccgtgcccactttggtcctgagagactcagggccaggggtccagaacagttcagcatcaggaatggggcggggaaggcagagagggagaaggggctggctccgaccagagcagagccctggggatagct

SEQ ID NO: 47093 - DNA, 1089 bp, Homo sapiens
tttttttttttttttttttgcgaggacaaagtcctttattagaaaatatatcaaaatcccagccccctgagccaggaccagaagagggagctattccagcataggcagaaaatgcccagggaggggcttccttcaccaaacaacttcccgggaaccataaatagaataaatattcacagaggtccgaggagaagccagatcactcttctctccatggaagagggaggggcttggggtccagccctgctcctactctaggggcagggactcctaggaatcgtcacattaaaatcatgacatcaaggattcacagtcataagccctacaggagaccctagagagagggacccctgaggtctacaggagcccagctccagtccagcagtgagggagaggcccctaccccctagcacggcaccagagttcagttccctcacatccctctgagaacagtgaggagctgagggtggggagaatacaaccccatgaattcggtttcatgattaaggtagacaggaaggaggagtcagtgtgaacctcggagggctgtgtggttggcagtagatagaggcccagggcctggctgggggcccggcgttgcagcatctcttgacggaaggcttgggaggaaccaggtgggtaacgtggcccagaaggagcccgaggaccccgagggtcagtcccaatgtctgctgtgatgttggtataaagaggccccagctctcgagccagcaactggtatgtcagtgagttcatcccatcttgcgtccaggaattctgggtacggaccaggaggtcaaatctgagggttagaggttggagactaagacccagaaaggaacagccagaaatctagggacctttaggattttcctggctaggggtacagaaccctgaggatccagtaacaattcccaggcagtccttccttcttcctacctgtggggattttcctcattgcccttatctcctcggtgcttcaccatcttatagtgtcctacagatgtggggggccgagagatcttcatcccagccaggcgcaccctatgggaaaagtgagggtatcatggggatccagagtagagaaaa

SEQ ID NO: 47094 - DNA, 456 bp, Homo sapiens
  misc_feature (1)...(456): n = a,t,c or g
gtgnnttgattcgaataccnttatgacatgattacgaatttaatacgactcactatagggaatttggccctcgaggccaagaattcggcacgagcggcacgagccgctggaacgcctacagtgggatcctcggcatctggcacgagtgggagatcgccaacaacaccttcacgggcatgtggatgagggacggtgacgcctgccgttcccggagccggcagagcaaggtggagctggcgtgtggaaaaagcaaccggctggcccatgtgtccgagccgagcacctgcgtctacgcgctgacgttcgagacccccctcgtctgccacccccacgccttgctagtgtacccaaccctgccagaggccctgcagcggcagtgggaccaggtagagcaggacctggccgatgagctgatcaccccccagggccatgagaagttgctgaggacactttttg

SEQ ID NO: 47095 - DNA, 1039 bp, Homo sapiens
  misc_feature (1)...(1039): n = a,t,c or g
cccacgcgtccgatatgatacgcactgacagaaaagcacagaagacatactgctaagagtttctttgtgcatttcactactgttctaggggactgctgtctctttggttccttttaggtttgtgttaggatgttgcacaagtaatcatttaatgttaaatgcaagtgtccaaagaaatgagtcttaaagttctttggtcatatttcactttagagttaggacaggagacagctaacctgacttccattttacaaatattagaaactttttcttcagtaacaaaaacagggaaggacaataaaaccatgaactattttgctttatgtctgtttttaaaaaataattgttttgaagtttgcttattagcttaataccttatagtacttttaaaaaatcatccttggtaattattgacttatcctagatccatgtacaattcagacttttatctgttagctttaataaaaatttaaaaccatctcatttcagaataaaataaacggaattacagttcatgcattagcatttttaagtgaagttctcttaataagattgccttttgtctaaccgaaatagggcatacagattagtttggatgggaaagtggtaagacttgactttttaatactgtgcctatttccaaaagaagacttgatgtggctttttacattatgctttaaagatgttaatggaggatacatagtcttaaaacaatttgtttgggagtaagttttagtcggaaaaaggtgaagatatttatgctgagttatgttaagcaaattattttgagaccttttgctggtagacaaaaactgaggaaatgtttcacctaaatatattatggtcaatgaaaaaaccggactttagagtaaatgtgataaccaagtagatttgtggaacctttatttctttagtaattatttttatcttatgtgaaatgattcaacctttaatttttggcccaggaattataggcccatgggttttgggtttaccccctaaaggggcccttttnatgccctgggaggaaagacccagg

SEQ ID NO: 47096 - DNA, 1357 bp, Homo sapiens
ttttttttttttccattcaaaaatgacaaattctttatttaaatcaacaaactcatcttcctcaagccccagaccatggtaggcagccctccctctccatcccctcaccccaccccttagccacagtgaagggaatggaaaatgagaagccacgagggcccctgccagggaaggctgccccagatgtgtggtgagcacagtcagtgcagctgtggctggggcagcagctgccacaggctcctccctataaattaagttcctgcagccacagctgtgggagaagcatacttgtagaagcaaggccagtccagcatcagaaggcagaggcagcatcagtgactcccagccatggaatgaacggaggacacagagctcagagacagaacaggccagggggaagaaggagagacagaataggccagggcatggcggtgagggactgaggcccctaaattttggtcccaggggaaaggaagaggccagttggtccagttttgatggctatggggaagggaatgtattagtaagcatgggggagaggatgccagcaggcacctcagaggtgacaggacaggctgaaccccccaccctgacagaaaggagcttgagagctctggggctctctgggaatgtcactgctaaaatatatatctacatatatattaaccattcgtgggagggcaggggcaaggccctggggtgggatcagaggatctggcgtggcatcccgtagccagtcatgcctgcctgagacgccccgcggttggtgcccatctgtaacccgatcacgttcttgccctcttgcagctggttatccgagaagttccgaggattctccttggatttcttagggaaccagttgggatccccagagaagagcccatcatctcgggctactgccagcccacccagattcatcagcgtccgctgcacacaggccatgttctttccttcccagaggtccacagtttggaagatgtcagtggtgttaatgccatagcgctcagctgcttgcaggaactgagagatctgctccatctgcttgaaggccatggtggaggcctggatcttctttactggggcctgccctcggggtacagtgcattaatgagctcacatagcaccgtgccatccttgagccagttctggaagttctcgcgtccaggctggggccggcccacatcctttcggcactgggtggtgatccactggatcaggatctgctccagatctgcatcatattgtttctcaatcttctgctgcacctcccggctcaggccatatgcaggtcccctgttggccattccaatgggtggcggtggctgcggggagcgttcaagcgggcttggagagcggc

SEQ ID NO: 47097 - DNA, 1479 bp, Homo sapiens
ggaagtgaagcatgtggacttctatgctttctcctactattacgaccttgcagctggtgtgggcctcatagatgcggagaagggaggcagcctggtggtgggggactttgagatcgcagccaagtacgtgtgtcggaccctggagacacagccgcagagcagccccttctcatgcatggacctcaccctacggtcagccttgctactccaggagttcggctttcccaggagcaaagtgctgaagctcactcggaaaattgacaatgttgagaccagctgggctctgggggccatttttcattacatcgactccctgaacagacagaagagtccagcctcatagtggccgagccatgccctggtccccgtcagcagtgtctgtgtgtctgcataaaccctcctgtcctggacgtgacttcatcctgaggagccacagcacaggccgtgctgggcactttctgcacactggctctgggacttgcagaaggcctggtgctgccctggcatcagcctcttccagtcacatctggccagagggctgtctggacctggggccctgctcaatgccacctgtctgcctgggctccaagtgggcaggaccaggacagaaccacaggcacacactgagggggcagtgtggctccctgcctgtcccatccccatgccccgtccgcggggctgtggctgctgctgtgcatgtccctgcgatgggagtcttgtctcccagcctgtcagtttcctccccagggcagagctccccttcctgcgagagtctgggaggcggtgcaggctgtcctggctgctctggggaagccgagggacagccataacacccccgggacagtaggtctgggcggcaccactgggaactctggacttgagtgtgtttgcctcttccttgggtatgaatgtgtgagttcacccagaggcctgctctcctcacacattgtgtggtttggggttaatgatggagggagacacctcctcatagacggcaggtgcccacctttcagggagtctcccagcatgggcggatgccgggcatgagctgctgtaaactatttgtgggctgtgctgcttgagtgacgtctctgtcgtgtgggtgccaagtgcttgtgtagaaactgtgttctgagcccccttttctggacaccaactgtgtcctgtgaatgtatcgctactgtgagctgttcccgcctagccagggccatgtcttaggtgcagctgtgccacgggtcagctgagccacagtcccagaaccaagctctcggtgtctcgggccaccatccgcccacctcgggctgaccccacctcctccatggacagtgtgagccccgggccgtgcatcctgctcagtgtggcgtcagtgtcggggctgagccccttgagctgcttcagtgaatgtacagtgcccggcacgagctgaacctcatgtgttccactcccaataaaaggttgacagggataaaaaaaaaaaaa

SEQ ID NO: 47098 - DNA, 984 bp, Homo sapiens
cacagccagacagctatgctaacagtctcaagttttcttccagtttgtttagatttaaatgatacatttgtaactttttaaaaactaaattttggttggatttttcatgaaaacctcttttttctttatcccctaaaaaatggtttgaaatgtcattgttatttaaaaacccgatgtgttggaacttctttaatctgctgtttcctctttttccccccctttgaaagtttcgcatagtgtaaacattcactatgtcttttaccttccctgctcctcccatctgggaggcgctgatgctattacccagtgctgaataatggcactctaaaggtatgggaaggaaggagcccaaggcaaccacctgctgtcctttcagccttcctttggagactgctccatcagtgccgaggtgtgtgggaacaggcttcactgcaccgccatcttactgagttgcttcacgtgaggaaaagggggctttggccctgtgactcagttccacattttggattgcatactggaaaagaagccaatcttcttgctagtaaaccagcaacccggctgtatacagtggtgacccaagcaatggatataaacctaaaaatctgagggaggggagaggtggaatacagtagttcttggaatctgaagtctcctatttgatcaggttatttcctgggacttggcaaaaatctgattggtggggatctcctaggacctagtggacatctggtattaatttaatctcaggaaaaacaagaaattaacccagagagagtctgggttctggaattcagcgtagctacctccagaccgtggtgtctggcctccatttttgtctgtcattcagctctgacttacagctgcagtcacctttgctataaggcacctgggtagaagggtggatgggcttcacatcaatttttttcttcctttagggtgggggattggtttggctttcttttgttgtggctttttgttttattt

SEQ ID NO: 47099 - DNA, 1586 bp, Homo sapiens
  misc_feature (1)...(1586): n = a,t,c or g
aactttctcaacacccccaattaggagctcagtgctctcttggggcaatgcagttaaaagggtgagcctcaaatctagtcattacaccagtcaacagaagtggacagggcctaggcctctcctcagctccttaaccctcctccttctgccctggattgtaacctctcccttgtccaaatctaggattcctggtaggaaaaggaaaaggcccttcccttccctccaccacttccaactggcccctttgcctgacctgggacttggagaaccagaggaaaagagagggagcggaagtggggagatggagcagggcacctgttagaatcagagctgcaggatttcttggggaccctcctctgttcccttcactgcttcccagcacctcctggaccctttccctcttttcaagggaggaagcccattgatttgcagcttgttattntttaggcntatttacaatctatgtgcctgacaactcaacacaccgcagggttaattgtttcccaccagagctccaactgaacaaccagacagacaactctcatcatcctccagagagaaaataggccgtgtctcaaagaaaggttcttggtctatgcctctggtctgtgggctggcagggcaaccataccatacccccgccagtcctcggctcctgctgcaaagttggccatgtttcacagggaaacttttggaagagtggctgcttatgagattccaaaatgaagtgttggccaacaccgctcatggccatcctggattttcccggtggcttcccttcctgctcgcctccctgaacaggggagaaagcttaacctctcttctcctctccaaacctttcaccttgaatgggtaatgtttggtgggggctgttccttcttggagatgccttgagtcggaacattttgagaacatggaggaaggatgaagaagtgaaaatgacaataatgactctcaagaggctggcgatgtgacatggcaaatgtagaactgacttaaattgaacaaaccctcactgagcacctctgatgttgagcacctgctgaatactgagcactgaatgggggagggggaggggagcacggggtgagtcaacctgggactcggtctcagggatatgcctaccaatagcgggtatcgtaaggcatgtacccaaacataacggatgtaaggcagaaagtgatcggagaaggaatgagaaagtgtgcgtgatgttaatgaaaagtcatatgcagctagagcagacccaggaaagctttctggaagagattgcatctgaggaaattcaggaaggatctttgtagattggggggagattctaaattgaaggggtgatagggtgaggggccagagggaagtctgctgtgttctcatgtaggatgtcagccctccctgcaacttctctttttggccaatgtcttttcactttcctgaccctttagaatcatccccagccagacgcaatcatggaagttgccttattgtcactggttaagaacttggcgagattgaagggcttttgttattgttgttggatatttttgtttcccataaaagcacatcatttcaaccctaaaaaaaaaaaa

SEQ ID NO: 47100 - DNA, 977 bp, Homo sapiens
taagatacgaacgagaaacctgatttattgctcatccttcccttgcctccctaatggcaagcaaaactctgaacatctgaaaaggatgtagttctggacaaatcctgactacccagaggaaactcactgtgagattgctgttgatttgaagggtgctttcactaaggttatattttaaagtagaataacacatgctgagtgtaaactggctttggattggtcagctgcagtagtacaaaaacagcatagaatttgagaaaactaaaactgctatgagatagctatgagaaaactaaaactgctatgagatagaaatgatgtaaaattatgtggaaagttttccctcatatactcacatacagccctttgaagggctctggctctgaccggttgatggccttgagcgagatgaaatcatgaaattgagtcaaatcaatttgacattgaaatgacaagaggaaactcttaaatacataaaaacaagctctcatttgcctaggatagatactgtcttaaaaataaagactgaacctagatgttctgagcactagcaacaaggtattttaacaagtttaaaggaattctctgaaaaagttataaaattattctaggaaacataaccataatagtgttttaagggactttcacctggggattttatattcatgaacagagtgtattctgtatttaaaatgtctcatttgtgggaattggatgacatgttttttgataaatttattcacaatataaattgactttttattctaggaccatgtgaataatgggttccattgcacaaatacaaatattttaatagcttcttaggcagtggtgtagacatcttggatataaataattgtagatcttgtatatttgatttttaaaaaactagaataaacagagaggcataaacatatcttagagtccaagtggtagtgtttagcattggatataataaatggatgttttacaaagtg

SEQ ID NO: 47101 - DNA, 2407 bp, Homo sapiens
ctctttcagggcctgagccatcctgcgtgtcttgcgctcggtggaaatgcccagccgagggacgcgaccagaggacagctctgtgctgatccccacccgacaattcgaccccacacaaggaggatctaagcagcaagattaaagaacaaaaaattgtggtggatgaactttctaaccttaagaagaataggaaagtatataggcaacaacagaacagcaatatattctttcttgcagaccgaacagaaatgctgtctgagagcaagaatatattggatgaactgaaaaaagaataccaagaaatagaaaacttagacaagaccaaaatcaagaaatagtcaacctgtatttcaccataacaatgtgtggcatttgttgttctgtaaacttttctgctgagcatttcagtcaagatttaaaagaggacttactatataatcttaaacagcggggacccaatagtagtaaacaattgttaaagtctgatgttaactaccagtgtttattttctgctcacgtcctacacttgaggggtgttttgactacccagcctgtggaagatgaaagaggcaatgtgtttctatggaatggagaaatttttagtggaataaaggttgaagctgaagagaatgacactcaaattttgtttaattatctttcctcctgtaagaatgaatctgagattttgtcactcttctcagaagtacaaggtccctggtcatttatatattatcaagcatctagtcattatttatggtttggtagggatttttttggtcgccgtagcttgctttggcattttagtaatttgggcaagagtttctgcctctcttcagttgggcacccaaacatctggattggcaaatcagtggcaagaagttccagcatctggacttttcagaattgatcttaagtctactgtcatttccagatgcattattttacaactgtatccttggaaatatatttctagggagaatattattgaagaaaatgttaatagcctgagtcaaatttcagcagacttaccagcatttgtatcagtggtagcaaatgaagccaaactgtatcttgaaaaacctgttgttcctttaaatatgatgttgccacaagctgcattggagactcattgcagtaatatttccaatgtgccacctacaagagagatacttcaagtctttcttactgatgtacacatgaaggaagtaattcagcagttcattgatgtcctgagtgtagcagtcaagaaacgtgtcttgtgtttacctagggatgaaaacctggacagccaaatggaagttttggaaaacgtgtgatagggaaaggcaaatgttggcaatcctgttttctgggggcattgattccatggttattgcaacccttgctgaccgtcatattcctttagatgaaccaattgatcttcttaatgtagctttcatagctgaagaaaagaccatgccaactacctttaacagagaagggaataaacagaaaaataaatgtgaaataccttcagaagaattctctaaagatgttgctgctgctgctgctgacagtcctaataaaacatgtcagtgtaccagatcgaatcacaggaagggcgggactaaaggaactacaagctgttagcccttcccgaatttggaattttgttgaaattaatgtttctatggaagaactgcagaaattaagaagaactcgaatatgtcacttaattcggccattggatacagttttggatgatagcattggctgtgcagtctggtttgcttctagaggaattggttggttagtggcccaggaaggagtgaaatcctatcagagcaatgcaaaggtagttctcactggaattggtgcagatgagcaacttgcaggttattctcgtcatcgtgtccgctttcagtcgcatgggctggaaggattgaataaggaaataatgatggaactgggtcgaatttcttctagaaatcttggtcgtgatgacagagttattggtgatcatggaaaagaagcaagatttcctttcctggatgaaaatgttgtctcctttctaaattctctgccgatttgggaaaaagcaaacttgactttaccccgaggaattggtgaaaaattacttttacgccttgcagctgtggaacttggtcttacagcctctgctcttctgcccaaacgggccatgcagtttggatcaagaattgcaaaaatggaaaaaattaatgaaaaggcatctgataaatgtggacggctccaaatcatgtccttagaaaatctttctattgaaaaggagactaaattgtaatgtgattcacaatgtaacaatataaaaataagtttttatataattatataaaagtaagatactctgctgctttactattgtataatatagtagttttaaagttca

SEQ ID NO: 47102 - DNA, 1957 bp, Homo sapiens
tttttttttttttttttttaaatcagtgtgtactttattttgagccaatgttttacataagaccaacaaactaagtgtgggcaaactgttcaatcacttttgagaaattacatggttcctatttaggtttgaaaaagtagtttgttgccataacatcagaccttaaggtgttttaaagtgtatcctaagggtactgacagaagaaaaatacagtgttatggaagtatacacaactcatgaccacacagtatagatccattcatggtgaataatgttcatctgttctccaaaggtagtgaaaaatattaagtcatcaaataaatgctcagaattaccaaggaacagttaaaaaggaccaggatccaaacaggttatttatatatttatctataaacaagtgacaacactaaaaaacacattgaaaaccagtgttttaaactctgaatgtgggatttaaaaatattccattaacttgagattgcaataatttttttaaaccaaatagcatttgactggcaagtctcatataatttacagctgtaatattcctaaaaggaatatctacatactatagcctatcaaatataatctgcattttgcaaatcaatacaaaaatctatccatcatttatacattttatatttatatactttttaaaaattagattttattgctaggtgaatttggaattcaaattaaatttggaaacttaataatgctcttctcataaccttctccccattctttttttaatttttaaacactggaagcaaatgattatcaaaatgagactgcaacttaaggcattttaaaagaaaaaataattaggtgccatatagcattttatttcaaaagtatattttgtcccacttttctcactagcaagagtaaaacacaaaccttttttcataaatatgactacagtaatcataacacaaaaaagggttgataggcattgcttagatatttaaaacaagggtaatactttcccactcacctaaaagaaaaaacctttttgattaccagtttataaacatcggatttgctatgttaaaaagtccagcagaattttaattcagcaacactggagaatgaatatatatatacaggcatacatgtgtatgtatatattcattttatatatagtcaatgtatttattaggcattcccccacaaaagtaatttatatttaattgccatttttaataaacacttatgttcacagatcatccatctgtcttatatgaagttaggcaatatcaaatgtcctgttatggtctccgtcttcttcggaatcatcctctgaagtttcgagatcttccatatgtgcctgaagagttcttgcaaggttaataaatcggacacgtgtgcttggttcatttgtatttcccatcatatcagaaaagctttggttcgcacaagtgcaataacaccactaggtagagaccagagctgataaactcatactcagcttgttcatttgcatgagctctatgtagttcatgaatatcaaaatcctccaggttaagctccaacttctctttacatagttcacaggtggttacagcttctaatgaagaaccagagttaattttggcctgtaaccactttttcatacagtcttggtggacatactgcaaacttcctgtgcacttgcatggctctatcagcaaattagatgatgatgcagctgccatttgacaaattctacataagtcaccttcttcttcttctgagtcctctaaaaggaggctctcttttattttctgcaatctttctggatctcttgaaggcgcacttttagttttatcacttttaccatcagctgaattccaacctgaaggaataatatctactgtgatcatgacattgtcggtcaaattactcccaagtgctggggggactgcaaaccggaataaggaaccaggaagaatccctgatattcctgtatttcttc

SEQ ID NO: 47103 - DNA, 793 bp, Homo sapiens
tttttttttttttttggataggaaatacttttattgcaaaaagtactgaaggtaccctaaaaccttaagcaggattctggacatggaagcctacagaatagacaaaaataaatatgtcaacctgcccgaccctctggggtgaactggatgtggacactggagggagggcgtcctttattacatacgcgtctctgaagtcatataaatatagaataccttatagtagatcagcattaaataccagtcactgtgtttatataacttaatttgtgctgtagacaaagttctgtacatgtaacatgtggccatgcccaggcatcccagcatctatcctgaagtcagtgtaaagacatccttaagtggtggagacatgacagcccagaacccacagcagagggaaactggggagaggagggggcctgaccctggatcccccagctggtgtccacaggctagagggacccattgctgcagaggctggtgcctggttttccccatacttggtcttctaaacccaaagacagggtcctgatggtggagacctgggtaggtccggaggacagacacaggagagggcacaatcccaagcgcagctctcctgcactggctcgcaccacagccctcatctgagtggccgacacaagcctggagtacggcagctgccaaccacagcaaagccgcaaaaaagactgagaaaacaggaacccagagttccacaggggcaaggcctcgcagaccagccaagcccgagatgccctgtgctggcagtcatcacagtctggacagcatgtcc

SEQ ID NO: 47104 - DNA, 686 bp, Homo sapiens
ggcgtgagcaaccatggccgggcagcacctcccggtaccccggctggagggcgtttctcgggagcagttcatgcagcacctctacccacagagaaaacctcttgtgttggaagggattgatttggggccatgtacaagcaaatggacagtggattacctaagccaagttggagggaagaaagaagtaaagattcatgttgctgcagttgcacagatggacttcattagtaagaacttcattaaactttaccttttgaccagttggtccagagggcagctgaagagaaacataaagaattctttgtttcagaggatgagaaatactacttacggtcacttggagaagaccctagaaaggatgttgcagatatcagaaagcagtttcctttgttgaaaggagatattaagtttccagaattcttcaaagaggaacagttcttttccagtgtttttcgaattagttcaccaggattacaactatggactcattatgatgtatgctacataaatgagaaatttaaagctacaatagatctttagcattatagatttaacagtcacagtttcaacttcctataggttaccctaaacatctgtgtaatttgctgaaacatgacttttgaaaataggtgctgtgcatagcagtgatacaggaatgaattattttgctaatggcaaaaaaaaaa

SEQ ID NO: 47105 - DNA, 636 bp, Homo sapiens
  misc_feature (1)...(636): n = a,t,c or g
attctgaaaatggcagaaatgaaaaagtacactttagaaaataaagaggaaggatcactctcagatactgaagccgatgcagtctctggacaacttccagatcccacaacgaatcccagtgctggaaaggacgggccctcccttctggtggtggagcaggtccgggtggtggatctggaagggagcctgaaggtggtgtacccgtccaaggccgacctggccactgcccctccccacgtgactgtcgtgcgctgacgccagggccgcctgtccgcgtttgtttggccggttttgcggaggtttctatgcggcaatgctgaattatccgttagattttcaccccagnnnnnnnnnnnnnnnnnnnnnnnnnnnnnnnnnnnnnnnnnnnnnnnnnnnnnnnnnnnnnnnnnnnnnnnnnnnnnnnnnnnnnnnnnnnnnnnnnnnnnnnnnnnnnnnnnnnnnnnnnnnnnnnnnnnnnnnnnnnnnnnnnnnnnnnnnnnnnnnnnnnnnnnnnnnnnnnnnngaagaaggtggatctccaaccaggccagagaagattctcacagaaggttttgaactctaagaaataaattggtttggtaataaatggcttctggtcagataaaaaaaaaaaaa

SEQ ID NO: 47106 - DNA, 2168 bp, Homo sapiens
ttttttttttttttgataattaggataatgcctttattaacgagaatgaaacgttcattcctccttccactccttctcgttggttttctggacacagctcacctgatcctgctagaaacgttgtcagtctgcttgtggcttccctccttgattgactcacgctgtgtgatgtcttgagaagtatctatccacttcatgtgaatgagcactccaatatcagccaacatcaatcattcttacctaaagaataataagaaaaagttaatataaaagacaagggtataaaataaaggtttgaaaatgctagtcaacttcaaaatttaaagagtaaaaatccagagataaagattgggggtaagttacagcataaaaaaataggaagaaacttcatggtgggggggaaatctaaaattattcttacataaaataagtagacacctgaattagaatgaaaactgtattttctttaaaatgtaaaagcctgactctcagtttcaccagtctgagcacaagtttgactgcaacccaaaatatactatcccttatgtgaaggtatgtgacaacgttgacctcaccaaatgagttttaacatcagctcttttttcatatgaaagcacataccctgctccccattcaagtatgtcttccattgtcaggcagggctgaccacgcttcagcaggagtcctccaagagtgcccaactccccttcccacagtacacaacgctgtagttgttgtcctgcaatcctttgtatttacctcattctttcccatctaagtcctcactgagttttaaagttagggctggaaaagctatgcccttactgggacagcaaggaaccaatttttttctgagggagaagacattcaccttcactatatgcctggcagggccacagtgcacaaaacaaagatcagccttcattcaagttccaggtttttcttcctccctgaatgattactgcaaagggtatatgaagtaagcagttccctgttgcacatgtaccatccataagggatactatatcgttttgcattcttccccccattctccacattgtcctatcttaagtccaagcccttttcactctcaaaaaaaaaaaaaaaaatatttttttcagcactggtgttcaaaagcaacgtttttatggttaatggtttaccagcaactgttgagatttccagttgagtcttaaaaattgccaatcattatctagcagcaatgacagatgattaggagcagtcaaatcctctgaattctttccctaataggcagccatttgagaactgcactagctgacatcactaaaacattatcagctaaagcccaaaaccaaataaaggcccagaccaacatcctggctctctaaaacctgtccaaaatcattaagtgaaaggcagtaaatgcaggactgtggatcatgtcactgcagctgacaatgattaacaataggagacatgcaacccccattaaggttaaaagtccaaaactagtcacacgcatctctttattggggaaaagtgagactattatgcattcttggtaggtttgcaaccttgcatgaagagcacccattgcatttctttcatctttcagaaagcaccggtatctgttccaagggcctaacagtacgaaaatacattctggcatcacacctctgaacccaagactgttctcattaaaaataattttggtttgtaacaaaattatgaaatacaatgcaagcacctcggtatagcattattactgaaaccacttaattcccagctttttgagttttttaaaaaaacccactgcactaagattcacaattcattgctacatacaaattaaagctagtaagaacacactaacgtcacaagtttctcattctaaagtgcaaaagcctaatcatctgaaagtgaacagggtaaggcaaaattaaccccccaccccaataaagttcctgaagtccatatattatataccaagtacattctctaaaaattgttactgactggtaagaaatagacctgagtttttatttctaacacccaatcactaaaccacggcagcaagcactggccaccgatttaatggattacgacacaggaaaccccatcagggttctatgtaatttagtgatactcatgtcactaatattgagcattatacttgatcgtcgacg

SEQ ID NO: 47107 - DNA, 1407 bp, Homo sapiens
ttttttttttgagtattgcaacactttattaagagtattggctttgaatcagtagctgaagtaacaattgcatgaagccagattaggtgcactgcataatacccatactcgatttattgacattacttagcaatttactggacaaaagtcaaacttttttgttttttattaagcacattccacagtacaaagctgtcatgaataatatctgtacaatttaacagtttcaatagctgttcagacacaaatttatttcaaacagataattggcaaacataattaattacaagttagaattagactatcccagtgctttaaaacattaatatagcagtaatttacatttgctcagttatggttagcaaaataaagtccagagtatggctgggaattactattataatcccagaaagtcagaactccttgggtgccaaagtcccctgctataatttagtaggcacaattcaaaggttgtctgcatattcaaaggccatcatctcccaaggaacgaggggaacttctatattaaacatgcaaaaacaacaaaaaatccattcattcattccgaattgtctcctcctctgcccctaccttccccctgggctttcctgagcagtttgatattgaagttgtaggacgaaaagaggtcaaaactaaatcactttcacaaccaccatcaagcttacaacatccaccttatgaatggaggtttattgtttacactttgagactcaacctctcaaaaacataaattaatttagtaacatgggaaggaaggattttatttttaaaagaaaaactaaaaaagcaaagccaactcaataaacaaatcacatacacacacactgatccccacaccgttctcaatgcaaaggacaaatcagagcccaggggccttccctttagtagtagagtgtgcttccacgggaagaggtttactttataggaggctgtttattggtcctttaaaatgttattgacattccttgatctttggaaacaatggcgaagggcaaatcaaacctaatattgaataagggagaaggagtgccaattggatgccaacgtcctttccatgcactgtcagggcaacagtgccatttacacatttgggctgtgtcgtagggaggacttgggagctttgagaacctgctggggccacagcagcagctgacaccagagatgactggggtggcattcatgggcttgaggcttcactccacttcagagcacccacccctcagcatgggcctctgaaccagcctgactgccctgcaggctccaacacaccagcaggccctgccagaaccttggcaaggccaggatgcatgaattccagagccaagacagcccgtcaacagggccttcttatttccccttcccagggccacgactgcacagaataat

SEQ ID NO: 47108 - DNA, 990 bp, Homo sapiens
ttttttttttctaatccaaacgcacttctctttattcaaaccagggtcaaactggtcaatgggaaacgccctgaagccacgtgcctggggagaaaggcttcctactcggttcggttcagcgctgcgtgggatccacgcggctggctgtgcgcaacccccacagttcacctcagacactaccaagcaggtcagtcgacaaaagcaaggaattaaacaaaaaacagaaatacactcagtagatttcttctagaagctcccagagtttctggaccaccaagtcccaacccccaaagccaggagcgaggggactaacagcgcaccccctccaccagtgccgacggaaaccccgttttaaattaaaaaataagccagtatacatcgtagaaaatttctcttaaaaatctcacaatttgtaaatgtatattttttctttaacataaaagtttacaatataccgtaaaacaaaaggctcaggaaaataatttccaaaaaaaaggaagaaaaagaaacctgaagttttgaattaaagctgaagacattttttttaaaccctgttgttgaaccagtgacttttttttattgtgctgatgggttagagaaagaaatatttaaaaacctcagtccagacgacacccacagccgctccaaaagcctcgcgccctccccccgctacgcccccccaaggttgagtcgccactttgccgccaagtttgtgattgtcacgagttcacaagtttggaatcctgggtctgggccgtgcagacgtcgcggcgccgcgggctagcgtcggtaggggtggaaccttgcacgttgtggttctgccctcgtccaaaggccgctggccgccgcggggtgggccccccgaccctggcacggagggacccccgtatgaatggaggctgctggctggggtctgagaagccctgtccgaagccactcaagtcctgcccgtaacctgaatactgaccataggggaagtctggctgaact

SEQ ID NO: 47109 - DNA, 1485 bp, Homo sapiens
ttttttttcaatgttggttcaatatattcatcaatactgctattgagttttaaggactggaaaatagacaaactttaccattgacagtcaatccatgtcagtctgaatatcactggaaaataacaaaggtatgccagtttccacagtgttatgaggatagtttgttaccctgggaaagtggagtctataccagcttagattcaaagaggaaagcaggtcatagacgaaagtataatttgaaaaaaaaaaagaatggcttcaggtccacttaaccaaaacactgaaactttaattgaatgagaattacacctgtcaaagacctgggcagtacactcctctctcctctctatagcactcattccttctgaggtgtcatttcaccagccacctgagtaagtgctccagctatccccagaccagctagagacatcccaagcatggtcatgttagcatcaatgtccaggcatactcagggctcagaatcgtgggttagtaccacttttcccactacccccttatattccacaagggactcacagccagcaggttaactctcccctccctacccccaccaaaccctggaaaatcacagacagcctttttacagctcctctttctcggcccccttcttctggaaggcagtcaggatgtttaagctcttctggagctcctccttcttcccgtcactcatcttgttcttctcaatcagcctggcgatccgtgtcatctctgatgctgggaagtcctccccttggtctaagatcttccccatgatcttcaggtattgctcggcccacttcttctgagtctccttcacacttgagaggttatcttgcccctgcttcaagagggcctggcgggcctccacaccagaggccctgatgaactccccggccagggcgtcgtatacaggcaggcaaccaggcatacctaggtagaccccttgccccttcagccagcgctggatggctcccaacctttaactgccccagtgtaatgggactgggttctcaaagtccccatcccggaagaggtagaagactgggtagctctctttgtccagcttgtatttctcactcagctccatgttcagcttgtcaccataatctgagatccccacctctgccaccaagagatcatcgctggaagccgagttttcagcaagacgcttgaactcatcctgcttctcaccgtaggggtactgggtgtcgaacttcaccaagacgaacttgcttttgggaatgaccttgtagaaagtgaccgtatccaggggaagggcgcccttggtgtgcagggccgctgccgccatgcggagcggagaggagcaggaagcccaggagaaggggaagcagcggggagagaaatgcggcgcggggcacagcggcagccatatcgccgggttcctgcagagggaggtaggtaagcgatagtggagaacgccccgagtcagcggtcacgtgactgggggggcggactcacgcgcgc

SEQ ID NO: 47110 - DNA, 1745 bp, Homo sapiens
ttttttttttttttacatttaactttttattactttttaaaaatccaaattcagataaattaacacactaggttagaacctcaattgtatttgatacattatatactggatttctattactaaaaagccagttggaatatggcctatacgaaccaaagagtgtatacaaaatggaagtggtcatcaggcaataattgtttccttggaactctgcaccgactgtccatgctctgtggggacttacacattcaagtttgacagttgaaaaaccaactggagctgcttttccaagaatgttctgttgtccttcaaatagaattccatgttatttctttcttgccttaagctcttatatctttcaaatgacctaagctgatgaactggagtaaacacaaactgctgcagttatcaattagcaagcctagttcaccaatacttcaaaataaacagacttcacaagtttatttccattcctaacagtggaataataacttaattttgtttacttttgtctttgtagatttctgtctgcagctccagtaagaatgccaaatcagatggcttttaggaaatgctcataggagagaactagagttattcctcacactgaatttaagtcttaccagatttctgcaggttcatatgttaacgttctgatctagcctacctgtaagtctagtttatttctgtacacacttccaaatactcttcataaattttcacttctgactgaaatataacaccttgattgataaaatagtttcataactatagaattttagtgaagatataaaacattaatgaatacttgtgttttaatacatcactactcctatttattacatgttccaataaaccaatagaatgaagcactaagacacggtgaaatctaaacttaaaacccagatggaactgccatatagattacaaatgggtctccccaccacagaattcatatacaaaagcccttcggtatgtagcttttccctgaacaaatacattaatacactttttgttttttacatttgtaaaaattcaaggttttaataacatttctttgcaagacatttggtataaggtggttaataaatattaggaaacaaacactgtaccaaaatggatatgacttgtgaataaaccctaaataaagtggcttttggaagaactggattttgcagcaaccaactttataaagaggtccatccgctctcaatggaaaacacccaagcataccattcactaggttcggatatcaccataatataatgaattctaagagtatggggtttgatttatgggcaaccccagtacaatctaggagcccaacatgatgaaaaatactaaaagaatgcttcaccatccctcaggccattacatttccaccttatcctactcttgtattaggatatatgtatacaaatgtcaactactaatgtagttaaatttcaggagaagcatgcttaaagatacacaaggaatgtttagccttagtttttgatagtattatccaaagtgtgagttgaaagaaattaagcaaataatgttaacaaacgaaagacagatacacagcattagtgggggtataaaaacctcacctttcaattaacttgaataatgttctattttctattctacaactgagcgctagggagctaaactatttgtgaattacatcttctttaagaagacacacacacacgcacacacatacatacacttattcaacccctctatgcagccaaaaa

SEQ ID NO: 47111 - DNA, 539 bp, Homo sapiens
  misc_feature (1)...(539): n = a,t,c or g
cccccccttgaatacccgctttgacatgattacgaatttaatacgactcactatagggaatttggccctcgaggccaagaattcggcacgagctaggaagaggattccatgtcatccgcctttaagtctcggaagtaagcatgaagaatcccagtggtgaggaggaaaggctgaggagtcagaaaaagctcctacaagaagatggaacagctcctacaaagaggtggctgtgggtagaagcagccgcctggggcagttttcaggctttggagaaggaaagcagcttctctgttgaggaatattctgcaagtaggtgatccactttgaaagctggttactattccttccttctaggcctgtcggaggggaaggagggcagccgngnnngctctgctcccatgaggcaaattcggtcaccaaaacaaaaaaacagcttcttatgtagaaagcaggggaattagcctagttttcggatattccccagtattctagctttttaacgaacagcctgangaggctgggtgcaatgctcatgtgtg

SEQ ID NO: 47112 - DNA, 1032 bp, Homo sapiens
  misc_feature (1)...(1032): n = a,t,c or g
gattttgcaaggcgatttcgagcaacctatgtttcttgggcaattgcttatctcctaggattgatctgccttatccgagcttgttattggggagccataagagtcagttatccagaacacagttttgcataagcttgtttatgattcagtagtgcaggtgagagtgtctagcagttcttggtaagctactctggacatctttaaattatttatcctaatggattccattctggtttatgtataatcgtttcaagactttgggagtcttttatgaacaaatgctcattgcactatattatatgcaaattgttttgctgctaggttttcaaaatttgaataataaagccttttcatgttcttttacatctcttatagatatttttggatttgttaccaaacattacatttactctcacccttttattatttttaaataagttatttcattacttgctgatacatgagtattcctaagtgtttataaatatttctataatagtttcacatttatatttacattttaattaaacagtatcaaaattgcttgcttaaaacctaagcaatatgcattttgcttgaactgcttactgtaactttaacctaagattatagtgaccttattcaggaaaaaaaaaaaatttagngtaacttcaaagacttgacattcttgtcagaggaaaaaaaatttctagatactgtttgcttgttttttgttgtttgtagaaagataaaatattttggtagtaatttaaaatacaagaacgaatatttatttgtccacagttggagatgttggataaatgtcttttctcaaagatcacaggacttttgtctttcatttttgcctttttatttaccatttataaaagatctggtctggattatggaatttaatgtttatcagctctatgtattcctttatagaggcttgaggaagtatttcacataacatgttttataatacttaaccatttatccaaagatatatttacattgggttgtgcccctttcccttagatcatggtaaatttt

SEQ ID NO: 47113 - DNA, 580 bp, Homo sapiens
ggtggttgtggcatgaacgcctcccaagcatgggttcctttgcttctaggaaattcgcccccgtctgcagcatctgtgaaaatcccatcatccctcgggatgggaaagatgccttcaaaatcgaatgcatgggaagaaacttccatgaaaattgctacaggtgtgaggactgcaggatcctcctgtctgtcgagcccacggaccaaggctgctaccccctgaacaaccatctcttctgcaagccatgccatgtgaagcggagtgctgcggggtgctgctgagagtgcccgctgggcagtgaacagaccactagccccggctggggcccttccctgacttggtttcccttcctaacctgctcttgcacactttccttctgagcctccatggagaccagcctgcaagccggcccagcctgtccaggatacagtggggctgagcacccccaggccttccactcctctaccctctgggcaccagaaggctcctggaccatgagcttcacccccagaattccctgctgaccctgccccacttccagggaaaagctgggggaggttggacccctctcactgactag

SEQ ID NO: 47114 - DNA, 479 bp, Homo sapiens; identical to SEQ ID NO: 2172

SEQ ID NO: 47115 - DNA, 1824 bp, Homo sapiens
tcaaaggagacccggtctcgaaggctcatggcgatgctggtcctagtacccggacgagttatgcggcctctgggtggccaactttggcgcttcttgcctcgcggactcgagttttggggcccagccgaggggactgcgagagtcttgctgaggcagttctgcgcgcggcaagcggaggcgtggcgtgcctcggggcgccctggctattgcctgggaacccggcccctcagcactgcgatggccgccacccccgttggtcgcagaagggccccggagactccacggcgccccttgaagcccggggcctgttttcctggaaagtctttaagcaatcacatttgctattggaggagctttactggctggaatgaagcacgtcaagaaagaaaaggcagagaagttagagaaggaacggcagcgacacatcggcaagcctttacttgggggaccgttttccctcacaactcatactggggagcgtaaaactgacaaggactacttgggtcagtggttattgatttattttggcttcactcattgccctgatgtctgtccagaagaactagaaaagatgattcaagtcgtggatgaaatagatagcattacaactctgccagatctaactccacttttcatcagcattgacccagagagggacacaaaagaagccatcgcaaattatgtgaaagaattttctcccaaactggttggcttgactggcacgagagaagaggtcgatcaagtggccagagcatacagagtgtattacagccctggccccaaggacgaagatgaagactacatagtggatcacacaataataatgtacttgattggaccagatggtgagtttctagattattttggccagaacaagaggaagggagaaatagctgcttcaattgccacacacatgaggccatacagaaaaaagagctagccaaagcagtgttgctggatgcagtattctcttgctaagaggaaggaaactgtctcgcataggagcctatataaatataaacatatatacgtgcactctacagaatggccttcataccatgagaacatttctgttttggatggggatgttacccttgcgttcaaccaaaattgattcttggaactgtaaagattacaacccaaagtctcccaggaagctgtggggagaccagaggatcaagctgaagtgaagccagtgaagagcccacctgtggaaggacatggcggggccgaggcacagccagtgcattcctgcctgcgaacaggccctcccagcagctttgccgcctctccatcgtcttgggcccttgctcaaatagctgtgggactgaatttcacagaaaagaatattaatttccatagtgctcttgcttgcctcttcttgagttctttgctcttctgagttcttggtggctaataacagtcagattagggtctctgccattcagagttgatgcttgaaaactttagttttccttattaatgaatatcactatcagatttgactaatgaagaggaaatctattgtttgggggaaaaaaaacatcagtttgatttctctaggggttcttttatgtgatttttagctaagtggtgtgccaggttttcagtgacataccaaatggaaataagaggatattgatcacgagtgtgatgctgagtagctttctgcatatactggattgtactttgtgtaaagtaaacatactcagttttgctgttcagacaagcgtgatctttttcatgggtgatgagtgggtacatagatggctgcacacagttctcagggaagagacccacaggctccagcgggcaggtgggtgc

SEQ ID NO: 47116 - DNA, 985 bp, Homo sapiens
tttttctgccactccagtttattgaaatgagtaaatttatagctttatttgcatacagaaaagtgcatgagaaaataagtatgtacaaaacagttgtgtggctgatcatgactttcaaaaattcaactacctagaaatagttacctccagtttagcacatttaggtatttggacatttaaagtactatttcaagtctgtgtttatagtgactgagtagggaagctgatagaaaattatgccatatatgatcaactattaccattaaacataaaaccacaggactttctacttggggctaatcaatagagggtcatgtggcccctgtcttgtttagcttctgagcatcaccctcttcttccccctcaaggtaacggttggatgtggctgattaactccccacaagaacctgagcattaagggtcaagagacaacattaaaaacccaacataaacaaaacaaaacaaaacttattttgacaataataaacccttcagaactgtgctcacaacaggactgaaaatgaactgggaacgtttccaagttgtgaggagaaaaatattgcagacattagattttcaaatggtaaccccaaacagtgggttctacagctttttctcccctcttatcttcctacctaacggacattgagattgtggctgcaagaaaagttttcccagttacttgataaaggccctagcatgaccccaaataagcacctaatgtgtttggcacaatcacatttagctttgtgatatgttgctcttcaaaatagagtcctttgttgctgagttgagttcaatttctcttgaacattaactgctcttctggaacttcagctcaagagagtggcctccttcttccacaggaaggatataggttgtgcccatttgcaattctagttcttgggactagcaattactgagaatgaagagaggctccagatctgtctgtgaatcattagatttttttttttttttgcccgtg

SEQ ID NO: 47117 - DNA, 877 bp, Homo sapiens
gcccttgggaaaagaggatctaggatccagttggtgcagcttatggcttgtccctgtgtgtatagttgttaaattattcttttatttttatttttaagaagttattctttagataataataggcatgtagcttaaaaggaaacctcaaaagacacaaaggatttgtctcattttaaattaaaaaaatactgtatcagcatcaagtaattaaacatttgttggaatatcataacttcttttttctttattgtatgttccctttcctgtgcttacgtattttcagaaattttagttggtgtgcataccacaatttgtattttatacttaaatatacatttcatggttgtatatttatttgatcaagttcttttatatcaaataacagagcttggcatttggttgcttgctcataactcggcagtaagcatttttaagcatgaagttattctttggttgaattttattcttgatatggggcttaggagtgagatttctggtctacagaaatgatcatgctcatgaattttgacatttatcgtcatgatgctttgcacaagggctgcaccaatttagatcatctttagcggtgaatgagtggattaattttactacaactactgatggtggtggtggaatttcagttgcttttttttgcgaggttaataggtctaaaattttacttttgtttgatgactagtggtttgaatttttcgctgcctgttatattgcttgtatactttgcctgtttgtgtcactgtccttttggattggagtcatactgtttttttttgtttattttaacttatctgtataaaacattgtattcaaaactagttattgttggtcagatttaatacaaatgtttttcctaaaaaaa

SEQ ID NO: 47118 - DNA, 1990 bp, Homo sapiens
attcggcacgacgggcaaaagtctctaccacacctactcaactctgtcacgctagcacaaaacagccacacacaaatacattaaaaaatgggtataactgtgttccaataaaactctattagcaacaggcagtgggccagatgtggcatgacatgcacgtttactaactatcccctgattaaagaatgtccaacaatagctgaaagttacttgagaaagtcagcactgtaggaggaagaaactaacaccaaaacacaagccggtagttctggggaaatgctggcagaccaagggcgggacctcttgcccagaataatctctctctcctactaaggaacctataggttcactgaagtaatccattactttgaatcactctctcctttgccccaccttttaaacacaaatcccccatcccctaatagttactggtgaacagatggactcatccctttcttatccgagaagccccatcacatgctatgtcctatcacatgctataccagaagctagggctgcagaggtggatgacgcccccagatccctgccccctaggggcttaagagtctagcaggggcacctgacccaagtaagtacaatgcagggtaaggctggctaaagagcacgtgaaaaggagctgggaacacagctggtcagcagagcttcagggagggctgaaggacaggctgcacacgaggcactcagaaaacagcagtgaaacagaaggcaggcagcaacggcagtggtactggacctggggaacaccaagttcaagctctatatacaacgaggacaaaaatgaaccaggctccctgaaagcagggaatctaacctgtgctacggcgccttcccagtccacgagggcgtgagagtacatacacatgcaagtgcactccagcgctcacccaagcaacacccttggagaaacacggactccaggcccaaatccagcctgagaccctcaaagggcagatccgctaacctcaagttttcagaagatctgaacccactgggggctcctgctcctctgcctgccccatgccagactaggattccagtgacataagcgccctctacagactcagaaggacagagaaggttctgctggaagtgggctcctcagcaaaccagcagataggggttcctttgatatttataccccagggttttttcactctcacgtgacatctatgtggggccaatgaagccaattcttcttttgtacatatggcagtcctgtaaggaatgcatttcaaacgggatccgctaattaggaattttctcctggggatttttcaacagtctatggggggccagaagcttttccacaaaccagtgaaggtggcagcaaagaaagcctcttagacgaggagctggcagcagctgctatctagatagacagcaaaaaccaaccactaattcagcaaacacaacctcatacctaaccgcttccctttaaatgggccttcggtgtgtgcgcacatggggcacgtgcggggagaaccatacttattcccctgttcccggcctaccacctctgctcccccttctcttctctaccatttaactgtctcctctgctttgtttcttatcactgctgctggtgtctagagccagccagcagtacctggcagacatcgcgaccctgcgggcagcgcttaggactgcacatttacatttcccaaatgatctgggtagatggggacaggtgaagacttggggaaacggaaatatacgaatgacatgagacatgcatatctagtgtcaatccattcgactgggcacaggacagcagactgctgacagtgctatgtaagattatgagtgatcctccctctattttgcaaacagtctgtaagtaactgataaaactttaaaatatgcaaattttaaaattatatagtttgatttactcatcaaattatcatgtatgctgttatttaagtatgaataaaggcttttttaaattggaaaaaaaaaaaagtcgacg

SEQ ID NO: 47119 - DNA, 1670 bp, Homo sapiens
aaaaaactaaagtgactggcactaagtgaacttgagattatcctcagcttcaagttcctaagataagggctttcttaagctttcaggtgtatgtatcctctagatgtagacaataatgtcccatttctaagtcttttccttttgcttctccttaaattgattgtacttccaaatttgctgttatgtttttttcctaatactgtgatctatctgatctgcagacaagaaccttgtctctgttgaagagcatcaaggggagattatgtacacattgaaactgaagtgtggtgttactgacggaatgtgcagtaactcctcagatatctgttaaggcatttccccgatgtgatgccagccttcttacctgtactgaaagatgcttagcttagaaaaaaacaaaacagatgcaaaatcagataattttattttgtttcatgggttttcttatttactttttaaacaagggaagggaatattaggaaaatcacacaaggcctcacatacatgttatttaaagaatgaattgggacggatgtcttagacttcactttcctaggctttttagcaaaacctaaagggtggtatccatattttgcgtgaattatgggtgtaagaccttgcccacttaggttttctatctctgtccttgatcttctttgccaaaatgtgagtatacagaaatttttctgtatatttcaacttaagacatttttaggcatctgtatagtttgtattcaatttgagaccttttctatggggaagctcagtaatttttattaaaagattgccattgctattcatgtaaaacatggaaaaaaaattgtgtagtgaagccaacagtggacttaggatgggattgaatgttcagtatagtgatctcacttagggagaatttgcaggagaaagtgatagtttattgttttttcctcgcccatattcagttttgttctacttcctccccttccttccagatgataacatcacatctctacagtaagtgcctctgccagcccaacccaggagcgcaagttgtctttgccatctggtctatagtacagtgcgcggcgttaggccacaactcaaaagcattatcttttttagggttagtagaaattgttttatgttgatgggaggtttgtttgattgtcaaaatgtacagccacagccttttaatttgggagcccctgttgtcattcaaatgtgtacctctacagttgtaaaaagtattagattctactatctgtgggttgtgcttgccagacaggtcttaaattgtatattttttggaaaagtttatatactctcttaggaatcattgtgaaaagatcaagaaatcaggatggccatttatttaatatccattcatttcatgttagtgggactattaacttgtcaccaagcaggactctatttcaaacaaaatttaaaactgtttgtggcctatatgtgtttaatcctggttaaagataaagcttcataatgctgtttttattcaacacattaaccagctgtaaaacacagacctttatcaagagtaggcaaagattttcaggattcatatacagatagactataaagtcatgtaatttgaaaagcagtgtttcattatgaaagagctctcaagttgcttgtaaagctaatctaattaaaaagatgtataaatgttgttg

SEQ ID NO: 47120 - DNA, 1023 bp, Homo sapiens
cccttttatgacatgattacgaatttaatacgactcactatagggaatttggccctcgaggccaagaattcggcacgagcaggagggaccactggaacatgtggtgcttgggaatgcctctcctgttgcattggtccctgaaggcctcagggcaggtatgtggtgtgtgggcgactccacaagacctgcctcccatcctggcagcccagcctgagaccgttgcattgaggcaggcaggagcggcagggtggctgctctccaggagcccaactgccttgagttcctgccccactgggccccctcccctgctgggcaatcctgggaaggtctggaggttcctgtggacctcagggaagccaggggcagctgtcaggcctgaggaagacctgtggagctcctctccagcctcctctttccctcccctctggtctccattctcttcagctccctacatgggctggggaggagacacctggtgggcagagctcaggcagaggtttggatttcagctccctcacttccggggctgtgtggctttggcagatgtcagacttctggtcttgcttctccacgtggacagtgagtatctggctcattcttcactgggttcttctgagattgaacctacaggtgtttgccaagtgcctggcccagagcaagtggccactgcttctcccatctctctcctgcccaacctggtagagctgagggcatgagaggcagagtgcacagtggtcaagggtgcagctctgcagcacaggcagcctaggcctgcgtcccaacctgcctctcaccagctctgtgaccttgggcaagggatttatctgtctgtcccttagttttctcacctgtaaaaggaggataagtatatatatatatttcccagtgttgtgaagattaaaggagtttatcgatgtaggtcttaggatgagtcctggcatttaccaagggttggatatatgttattatcactattaagtgttgagggtccaggcatgctgggcaacagggaccccatctcta

SEQ ID NO: 47121 - DNA, 2453 bp, Homo sapiens
  misc_feature (1)...(2453): n = a,t,c or g
ttttttttttttttgcaacacaagtcaatctttattgaaaactgcagtattaatacataacaattcttgttacaataaacgtgcttttgagatttttaaatctgagctcatctcatcagattgcataaaaaattaaaatagtatcaattgacacctaactgaactggctcaggatggaaattccattccttggcatggatacgtaagttcaatgcagaggtgagggatgcctttaacactggaagacaatgctgacttagcttaaaaaaagtaccgagagaacggtgtaaaaaacgggtatttaaaaatcatttttaaaaaaacaaaaaggaaccgtttcttctttagttacaatccatgaggctctctagggcctctccgtgtggccagcacagcaaccctgctaggagcacaaacggctggcctgagatctggcccagctgccttgcccactggtctgcacagggactcatggggcacagcctgtggtgaggaggagacacctgtcatgccagtcctgggagcacaccacccttctgcaggcccgggggggggtccctacacagacgccgctcatcctctgtctccccttcccaagtgacttcacttcagtcctgtggaccaagataaggctatccccacaggctctctcttcttcaaataatgagtaggaaaaagagacaaactttctgaaacatgcagtttccgacccaaataggccacataccccaacttctgtgttacttggtcagttgagcccctggagccctcaggacctactgataaagcatgtcctctgcagtatactcaagagtctgctgcccttcagaaagccagagggaacactcacaaatgcagaggtactagaggggagaaatacgtgctctgccttcccccaggccaaccacactctgctttagagaccctctcagaaagcaccagagaggaggaccagacgctgccacccacctcaagccacacccctgccacctgctgctgcgcccaatggaggtcctgtcctgtccgggcaacagccaaactggcgacaatggacacatccaacagtcagctgtcggataaggtgaaggtggcccaactgctcagagtaacactgttctcaaatgtttaaaaaggacaggtgaagtctgggtctccttttttaaagcagacaccaatacttacataactagtacatgttggcctttcaccagcactcactggcactcacaggtgccttacataccttacgggggccaacactgacaggtattagtacgtcgcaagttgcttgtaaaaatgtattccttctcgttaactgttgtgtcccccaaagacacatgcaaaattatttccctagacctcattcatcacagccagatgatgccaccagaaagagcaaggtactgtatgcccagctggggaagggcaagacactcactgacccaggtgcccaccccaaggctcaggaccacccccattgcctgtgaacacatttgcatagcactcaagaaggtttcccagaatagcgacaggtaggcctacaaaccacaccaagaagaacgttcttaacagatggctcacgagagacataaaaggttctggaagtgccttcaggcccattaccatgactggccctgactctggccctcacagagcggcaagttcatgggtcactggctcacactaaatgctcagccgccagcacagatccaaacaagacctccatgagcagagaaactgcagcggctgaacacactccccaagcctcaggggagaaggtgtagaacaaatattttttaaatagccatcatgatgtccatgtttacatgaactaggtcctttgcttacctgctgtctcaacttctaaaagaatagtaattcagctgaaggactcccaaattaggaatgtcaaacacacaaaaagcaaatttctcagaatgctccaccatatgcttcgggacaaattatgaagctttgtaacagaattttgacccaagttctatttcttaattgactttaattttactagaagcgaatgttgataaaattacaacctatgacagttttgtgactatttcctaagtccagattcttacctgatatctacctttcgtatctgacagctgacgtcctaaaaatttcaaagtcagaaagatttctgcacggatgtgcaatgcaaacttatttcataaagcctctcaacttcataaaagggaaaaaaggttaagttacagggaggaagaaaagtgtttatgaagctgatgtaaatggcgtgtggggggtgcagcccactctttaaaacaccatcctgtgtgtgccaagtaccaagcaagcctgaagagatgcctgtaacttctaacctcctcctgaaccccaagactccagccctcacaggagttgtacatgtatgtttccatttngttgtgtggggctttttaaaagcatacactaac

SEQ ID NO: 47122 - DNA, 2544 bp, Homo sapiens
ttttttttaacattctagaaattttgccaccaccactctttctgttgcaaagatggcatctgtgactactggggtagacaagaacgtttgttcaaactaaagaaagccagaagccaaaatttaactgcacagtaacaatgcacttttcatcatgcagccttgtgtttcctatattattcaattttctaacatgcattagaatacataaacttgtattctaatgatttaagtttgattttacaatatggaaaaaatttgaggaagaacatgacctgggaaagagaaaaggaagaacttttaccacaatgaaaatagatacattcgtacccaactatataataagaatataatccatttaagtttccagaaatatacttctcaaaactccccttcagttatggaaaagatccctcctctgtggcaataagtagggggaggggaatcaatgtgtttcaacggacaacagttcagcacaacaggaaacagcttaactttggtccacttgtctgttaggcttaattaaggacagtcaaactgcccataatcagttcaaaaacccaacaagtaaatttaaaaatatattcatgtgtaatttcattcctaaaactgggcagagctgttctgtcctcattctctgccttttctgcttcagaatccactgttggcttggtctctaaatcctcagcatcttcgtgatcttccctggcagcctcagcagcatctgcttggctagactctctctcctcttggttcatgatttctggggtcacgtggtccaaatctgcttctagaagttcagtttgtacttccactggcatttgattgacccgttcaacatgcagctcctctacatgtacttcagtaccttcttcagtctgaattcggcccacttctagataactcacttggacctgctctggaagctcactcatgtgtgaatcgtgcacctggctgtcctggagcagatctggatggacttgttccacagtcacttgtgctgaatccacctgaacctgaagcaatggtagcacatgcaccttcccaacttgttctataatagtcattgatgttacaggttcagtttgcacacgtgtttctactgaaagaacttcttccgttactagacgctctgaaatattgtgagcatcactgagatgcctccttaattcatttccttgcataaaccacaaatcacataaagtacaatggttgggtttatctccagtgtgtattaccaagtgatctttgaactggtcccagctgttaaacacactgttgcagacctggcattcgtagagcttcttccttcctttttttgcccctactccagtttggcatgcagtgaggtgacatttcagagtgctatttctagcaaatcgttcatgacaatttggacattcaaaaggtttttcacctgtatgttttcgaagatgttctttaaaatgtccaaaatggtcaaactgtttctcacagtactgacatacatgaatttttttcccagttctttgcttcttactgactccaccttcttcaaggtgggtaacaatttaggtgctgtttccatgcgctctctcgaagatatcgtttattgcatatttcacacttgaaactctcagtggagtgtgatttcatgtgctcctgtttgctcgtggggtcagatggacagccatcttctttaatctgcccttttctgtcaccttgacggtacttgctggtaatatctgccaacagtgctagagcagaatcatcagaggaacctgtgctctgtatgtactttacggactgcttggcagaagccacttcctctaatgtttcgatgccttcatcttccacttcaatggctgtcggcaatctctacctcaatttcaacaggttctgattctgcagatggcaatgactcagtgataacatttgaagtttctgcaatcttcctttttttggcctcattttttcctgtggtattttcctctaagggagctgagttttctttgttcctgacttcaagggctttgatagcttctagcatttgtagaaactgtgctgctttccatacatcattggcttcttcttctccttgtatcattaattttgctgtatatgtgaactcaattaaatggcgaaaggccattttactaacaccttctatctccaccaatggttcttgggtaaactcctgaaagaatttgtagaagaacttactacaagcagccaaaacagccttgtgagccttaaaatggtgtccgtcgacaattagggtgatgtcagtaaaccggtcctgctctcgctgttcattcaatcggtcgaggatcattttatgatgttcagggaactcctgaaggcattccatcgtctcttcagcctccatggccgtcgggctgctctacaaaagaagagcatgataatgtacacccatgagctcgagccgaggaacaaaacccctaaagcataaaacaacaacaaaaaaaaccagcaacgtgaaaagaaggggggagggtgaagcaagaggagagaaaggcgagggaagaaaggcgagcgagcggcccc

SEQ ID NO: 47123 - DNA, 1058 bp, Homo sapiens
ttttttttttttttgaaacagcacaggaaaagtgactgctttaatgtattaggcaaaattttacataaaatcagaaatctatgatctgtccctgctccaatttgtaaaaaacgcaagattcatcagaagccacgtgcagtcagatcccagctggccggcggtgcagatctggagtccagcctcagggatgcgctactttccattctctgcattgaacattcgttctgtcagcatccgctccagcttcactgcatcagcggcaaacttgcggatcccgtcagagagcttctccacagccatctggtcctcgttgtgcaaccaacggaaagacttctcatccaggtggattttttcccaggtcactggcttgggccgccttggctgaagagcacaggcaccagcttggcgttgtcctgcagcagctctcccaggagcttgggtgagatggtgaggaagtcacagccggccagtgctttgatctcgcccgtgttgcggaaggaggcgcccatgacaatggttttgtagctaaacttcttgtagtagttgtagattttagtgacactctttaccccagggtcttccaggggctcataggatttcttgtcggtgtttgccacatgccaatcaaggatgcgcccaacaaatggggagatgagggtcacacccgcctcggcacaggccacagcctgggcgaaggagaagagtaacgtcatgttgcagtggatgccgtgctgctcctcgagctcctttccagcctgaattccttcccaggttgatgacagctttataagaattcggtccttgctgatcccagcttccttgtagagctcgatgagccgcctggctctggccaccatcgcatctttatcaaaggagagccttgcgtctacttctgtggatactcggcccggaatcttctttagtatttctgctccaaacaacacaaaaagtttatcaatagcatttttaatctggtcctcttgtgacccgcccagcttccggccataggcaatcgcctcctccaccagctcctggtaagcgggcatctgtgctgcggg

SEQ ID NO: 47124 - DNA, 3562 bp, Homo sapiens
agctgttcttaggtacatattttaggatttttattgctgattacagatttgaaactatgaaatgtgcactgcttggcaagtaacacaagtaattctttacttattcacatttccaataaaagcgtaaataaacagacaaaaaatataaaggacaagagaaatacaaatagcaacagcttcaaaacaaaaggatttagtaacagaaagtctccacagtgtccgtcaaaatttaagattatccaaaccgtgcaaacgctcaacacaaaccaacgccatacactgaactattaatacttgtcccttgaagttgcaaactagaagccacccacataactgtatgatcacacaaaccaactaatttgctcaaggttcaggttaaagcaacatttaatatcctttacaagatggaattcgtgacaagttcaaaaggagaacttcctttgttttaatgcagctgtgctcagaagcctgtgatttcctaggaaaccatctgggtttagcccattagaaaaatgcagtttaaagcagtgtcacactggctgcctgaaggtacccttggagatactggagcgcttctgcattcaggctggtgctcaccattgatggaacccttcctggacaggcggtagacaacttgtgaagtgactgtgccaggtgaattttggggttattcaccatttgacctacaggatcatgctctttttttcccagcaaatgccaactgtgagaaggcagtctgatatcctggtgtatcttctatgtcaataaaatgttcctcatcaggaatggtatcatcttcgggtaactcaaaaagaccaatcaaagactgtaataatggagtccacagtttggtatactcagtgtccatcattgggggacattctgttagtaatttggttatgccaaccgcacagatctttttctctacatttccagataccttctgaatttcaggaataataattttttccaaaaccattccaaacatttttggttgtatacccatcaaatatttcttgtagtgctagtgccccatattttatgcaatacaaattaataaagactaaaaaactcttgataaacttggttgttttggaattctgaagtctctggaatagcagaatgaagatttgtttccctatattggtcaactgattcaggaggcatgtgctctattatactgtttagaagataaaaaccttggtggtcatttgctttggatgcaatcagcttctgaaagacacctagtaacccaggaattttgtcagctgcagcacttgctattgtgtttgaaccgcgttctaagaatgcttgaagaagcctcactagagcaggaatatttcctgttctttcccaaagcactggctgaaggagatgaggaaataaggccatataggaagacgggatgtcatttttgtgtgtttccagaagcaaagacatcacttgaaagacgtatggaataaattcttgcacatcattttgtaagatttcagtaaacaccaaaaacaaagcctcctcaaaatttacaacagcagcagggttagctttgcaagttattcttatggataaacatattgcttcaaacatgtagtgattaaagtgaggtttgcttgggttcttactaacagctaatagcttctgtgtaagctgagtgatgagagtagggatgtaggggattatggcttcttgtaggagagaaaaacttctcatgatagctttcataatatattcattttctgaagagccaggaagtgtgagagctttgaaaaggtttgttagcagaatctcaacaaacggtgcgatttctgcagctgtaaagagagtggcattgttaggccctcgcatagtaaagagccgttcaagagcatgagctgcgtaagtatgaacaacaatacttccagcttgaagatgattaatcaagagaggaatcgagactaaaagatgttcttttggcacttgatttctaaaaatcataatatatttgataccgtcagctttaaggacaggaaattcattcacattagctgattttaaatcagggaggatgtgattcacaaagaactcagttaggtttacaagttcatttgcttgtgtaattccatgcttctgtgtttgggcttttgatgccaaagatgtcactaggtagatggctgcatctttgtgtttccagttgacagatggattttttgcgtattcctgcagcatggaattaacataaccagagaagattcctgtcacaggtccctcaaaaaacttgcataatcctcgtaccagatcacaagcagccctgcgtctagtatcaatatcagatccttccaaatctctccttatgtactcctcagaattatcttcaaatgcttcttcatcagcagctctaaattccatgttaggcacaataaccttttcacagatacttgtcagcgtgttctggtcctcaaatagattcttataatgaggtctctcacaaactgaagccagaaattgaattgcattacttaccaacaaatcatatttaacctcttgacccgttgtaactagtaaattccagatggctgtaacaaaacgaggcaggtatcgctggaattcttcatcgtacttttgtgcatagagtgcggcattatcacaaatctgggattttaagagctccaataagccggcttcctcttcatcatcagtttgtaaaagcttattatccaatgttaagagagtatgaaaattattcatccaagtttccatattatcttcaaaaaaattcagggagatcctgaaagtttaaactatagaacaattttgagatcaggatcagggaagaaaacagaatcctcagggcagaggcatcatttgcatgggtactgcagagttcaatagtggccttaaaaagattagtcaaaggcaaagcaaaggcatccagaacaagcttaatttcagtccataactcgtttgacttaaattcatgacggtatcttttaaataatgaatgtgctgtacggaggactccattaataacatggaaatctccactctgaaagcgattcaccatttctgtcagcaagtcaggccatttctgtggaaaatcttctctgccaataatgctaattgcatcacttaactgcttctgaatttgctctgggctgctaagcatcaagtgcactatgttggctttaatggccactcgatcggcttcacaaattttgtttggttcatcttcaacaattctccagttccttttaatatagtttttgaatgttactgaagcacatactttgataacattatcctgggacttctccagtaatgtcaaaagcaacagtggataattctgatttccttcaacagattcaagaaatttctcagctggacgtcggatggcaggatcaggatcaagtgttttctttaaatattctgttagtgtttgcagatttgcatcgctgagttccattgctataggatctcgtggggatacagaaacggaggagggaaccccagccgcggaccgtagctggcactatccgctcctgccgccgctccgcctcacattcaaaccccggcaaaatggcgcgac

SEQ ID NO: 47125 - DNA, 1892 bp, Homo sapiens
cataacgtccacgtggagattgagcagcggtggcatcaggtggagaccacacctctccgggaagagaagcaggtgcccatcgcgcccgtccacctgtcttctgaagatgggggtgaccggctctccacacacgagctgacctctctgctcgagaaggagctggagcagagccagaaggaggcctcagaccttctggagcagaaccggctcctgcaggaccagctgagggtagccctgggccgggagcagagcgcccgtgagggctacgtgctgcaggccacgtgcgagcgagggtttgcagcaatggaagaaacgcaccagaagaagattgaagatctccagaggcagcaccagcgggagctagagaaacttcgagaagagaaagaccgcctcctagccgaggagacagcggccaccatctcagccatcgaagccatgaagaacgcccaccgggaggaaatggagcgggagctggagaagagccagcggtcccagatcagcagcgtcaactcggatgttgaggccctgcggcgccagtacctggaggagctgcagtcggtgcagcgggaactggaggtcctctcggagcagtactcgcagaagtgcctggagaatgcccatctggcccaggcgctggaggccgagcggcaggccctgcggcagtgccagcgtgagaaccaggagctcaatgcccacaaccaggagctgaacaaccgcctggctgcagagatcacacggttgcggacgctgctgactggggacggcggtggggaggccactgggtcaccccttgcacagggcaaggatgcctatgaactagaggtcttattgcgggtaaaggaatcggaaatacagtacctgaaacaggagattagctccctcaaggatgagctgcagacggcactgcgggacaagaagtacgcaagtgacaagtacaaagacatctacacagagctcagcatcgcgaaggctaaggctgactgtgacatcagcaggttgaaggagcagctcaaggctgcaacggaagcactgggggagaagtcccctgacagtgccacggtgtccggatatgatataatgaaatctaaaagcaaccctgacttcttgaagaaagacagatcctgtgtcacccggcaactcagaaacatcaggtccaagagtctgaaggaaggcctgacggtgcaagaacggttgaagctctttgaatccagggacttgaagaaagactaggtgtgtcccatccaagttgagcacgcgccttccccagcttgcagcagcacaccccaagcgctgcttttcacctgtacctttgttttattattattattattattgctgttgttgtcatcgttaactgtgggcatggaatgcgtgaggctggcttctgggttgtccacaccactctctgctgtgttgacttcctgttgtcttcaacaaagcttttttccgtggtattctaaaattaggccagcagtgggggctgggagggcatctgtgttagtcctttcctggctgtgacccgccacactcactgtcagtattaaggcccagcagcctgttgataagctaccctgtctcaccatgtgctggtgtggaaacggggcccagccagcacgcctcaaggtagatggaatccccactggtcagagaaaaagctatgcggacactccagcttggcctgggtcacagcactgactcctcacccgctagtctggctgttaagaggagaaagtgcactgccttccagcccaggaggaggacagcattttgtatttgttccactgatgcagcttagacccacacccctgagagtcgtggcaaacctttcacaacctggaaaatgttgaaagcaaccattcctatttttgtttgttttttattaaatcttgcac

SEQ ID NO: 47126 - DNA, 424 bp, Homo sapiens
gaggagttagatcacttatccgtctctccctggcccacccttctctgtcacatggcttctttgctgaccgtgatacacaccacacttgtcttctctacctggaagttgtattccccatacccacatggctcacttcttcacttcattcaagtctctgctcagatattaacctcttcagagagcccttccttcacacactgtcttgcatagcagcctcccctacaagttgtcttctttctccttaacttttgtgatggttaattttaggtgtcagcttgactggattaaagaatacctagagaactggaaaggcattatttgttagtgtgtctgtgagggtatttccagaagagattgatatatgactgaatgggctaagagggaaccatccgccctcaacgtgcagttggcttggaacaaaaac

SEQ ID NO: 47127 - DNA, 308 bp, Homo sapiens
catctccatcagcgatggagagaacggattttgccgcggctgggctgcacagcagcgccgcggtccacagcagagcccgcgaccgccatcttaggcagttccaggaagcggccatttcagagcgcaccgcttagccgcggcggcggctctgcttctcacgttcaccgaggcctgaacagggtcaacagccagtcgtcgtggactggagggggatgggagagagggaggggaatgaaaaacaaaacagagaggaaagaaggattcggggacagggtgatgctctcagctcagggatatcgcctaggcca

SEQ ID NO: 47128 - DNA, 402 bp, Homo sapiens; identical to SEQ ID NO: 19394

SEQ ID NO: 47129 - DNA, 322 bp, Homo sapiens
gcagaccaggcatagtggctcacacctgtaatcctagcacttttggaggctgagatgggagtttagcttgaacccaggagtttgagaccagcctgggcaacattgtgagaccctgtctctaagaaaaatgaaaacataaaaattagcagggtgtgattgtgcgtgcttgtagtctcagttacttgtgaattgaggtgggagggttgcttgagcccaggaggtcaagactgcagtgagcaatgattgcaccactgcacttccagcctgggcgacagagtgaaccctgagtcatcatcctataattctttatttagaggctgac

SEQ ID NO: 47130 - DNA, 2300 bp, Homo sapiens
ggacaagagcggaggcctggggtgagcgcggcccgacgggcacgggctaggacagacggacgcagacggcccgacgacctgggcgttcggcggaggggcgctggggcctgactcgcggaaggggaaactgaagcagaaagaggttacttaatgggctcaaggtcacctacctgacctaccagcagctcaatggccttcccaaagaagaaacttcagggtcttgtggctgcaaccatcacgccaatgactgagaatggagaaatcaacttttcagtaattggtcagtatgtggattatcttgtgaaagaacagggagtgaagaacatttttgtgaatggcacaacaggagaaggcctgtccctgagcgtctcagagcgtcgccaggttgcagaggagtgggtgacaaaagggaaggacaagctggatcaggtgataattcacgtaggagcactgagcttgaaggagtcacaggaactggcccaacatgcagcagaaataggagctgatggcatcgctgtcattgcaccgttcttcctcaagccatggaccaaagatatcctgattaatttcctaaaggaagtggctgctgccgcccctgccctgccattttattactatcacattcctgccttgacaggggtaaagattcgtgctgaggagttgttggatgggattctggataagatccccaccttccaagggctgaaattcagtgatacagatctcttagacttcgggcaatgtgttgatcagaatcgccagcaacagtttgctttcctttttggggtggatgagcaactgttgagtgctctggtgatgggagcaactggagcagtgggcagttttgtatccagagatttatcaactttgttgtcaaactaggttttggagtgtcacagaccaaagccatcatgactctggtctctgggattccaatgggcccaccccggcttccactgcagaaagcctcccagggagtttactgatagtgctgaagctaaactgaagagcctggatttcctttctttcactgatttaaaggatggaaacttggaagctggtagctagtgcctctctatcaaatcagggtttgcaccttgagacataatctaccttaaatagtgcatttttttctcagggaattttagatgaacttgaataaactctcctagcaaatgaaatctcacaataagcattgaggtaccttttgtgagccttaaaaagtcttattttgtgaaggggcaaaaactctaggagtcacaactctcagtcattcatttcacagatttttttgtggagaaatttctgtttatatggatgaaatggaatcaagaggaaaattgtaattgattaattccatctgtctttaggagctctcattatctcggtctctggttcctaatcctattttaaagttgtctaattttaaaccactataatatgtcttcattttaataaatattcatttggaatctaggaaaactctgagctactgcatttaggcagggcactttaataccaaactgtaacatgtctcaactgtatacaactcaaaatacaccagctcatttggctgctcagtctaactctagaatggatgcttttgaattcatttcgatgtcaccacttttcgctctttaaaaacactggggtcaggtgagggacttgtttcagttcctataaactaaggtaaatgggcgggctttctccataaacaagggaaaaagttcttccccaaagatgaatttaagtctccacttttttctatacagaaaactcaaaactcaaagtttcaaagaaccaaaggactcttcctctgggcaccacaaacttccccttcctccactgagaagactgtctctcccgcaggaccctgaattattgaaatcgaaggctgacttcctttctgcagtgagccccaggggctaatgttattatcctgtcacacttgcaactagtgacttttgtttagtgatagaagatttggggaggacccaaaggactcagaactttctctccatacctccttttactcttttctttctgtgtaatgtatcaacaactgtttaatctcccttctaacaaaccttgatataagctttctgatatcaaagtatattgacagttaacccttactgattttaaacttgactatccagtctgttaattacctaagattttgttttcatttcatctctaattgttttgatcattggcagagaaagagtatttgaaattcatatcagttttgctccttattttaatctctttgaattaaaaataaaactttttcaaaatgg

SEQ ID NO: 47131 - DNA, 1897 bp, Homo sapiens
ttttttttttggaaaccgagtggggactttactgatagtgacagtgatgacttcggagaggctgacggccggtacttcagggtgtgtttcaaaaagctgcccctggagggaggtggtagggaggcggtggggagctgcactcaccccggcctgtcccctccagctcagccagcagtcacactgcccagatttctttcttttcctctgccgcctgctcagcccgctgctcaaggcctttgcacaggctgccgccttcctccgccagggccagctgcccgatactggtgaggcccttgttcccttgcagtcctcgaggcaggctgtgtctgtgctgggtgccaggtctaggtcttctctcttctgcagagttgggctacacagagcagctgttccagttcctgcaggccaccgcccaggaagaagggatcttcggtgagtcccaaccagtcagcccaggctcctgcaggcagtggtgtttgctggtggctgctgccccctgcaggacagtgacaacccaactctaggaaggcaggctgcagagtacagtcttctgtccagtcagagctctatccctccctgggcttctttaaacaagaggagagaagcctgtgcccagtggctctctgttctccctacctagagccttcacttctctcttctttccagagtgtgcggacccaaagctcgccatcagtgctgtctggaccttcagagaccttgagaaagacaggaggtttcctgaatacaccgacacctgggggggtcccagttaggatgacatcccctgggtaaaaggtaacaaactgggagacccaggctatcaggtcctctgtcttgaataccatctggttggtgttgctgctctggaccacttccccattcactcggcagcagatctttaagttgtgtggatctgctacactgtccttggtcaccaaggcagggcccagagggcagaaggtgtcgaaggtttttcccagcagccattgtttcccattacgtctcatttgccagtcacgagcactcacgtcatgagccacagtgaagccggccacgtgggccatagcatctgtggccttgatgtgcttgcctttctttccaatgaccacggccagctccacttcccaatctacctcctggctctgtggtgggaggaccacctcatcatagggccccacgatggagctggcaaacttgctgaagatgatgggctccttgggcacgggcacgttctgttctttgcagtggtccacataattcatgcccacacacaccaccttatctggtcgtgtgactggagccaggaaaggttacctccgaccgtggtaggactggcaactgggcagccagggctcttcttgccactgagagggtggcctctccctgctctaggaactgcgtcatcgtcttcgggagtgtggggtcaaaggcattgaggttgataacccctccaccattccctgtctccaggcccaagtgaggccccaccaggtggggtgcccggaactgcactagtctcatgtctctggagggttgaaagggccacttctgagcctgcagcagaacttgtgagtaaccttcttctaccagacaccagcatcagagcctgcttatacttcataaggtgaaacttttctagaggagcaactactaccatctacgcagtaagtcccagggattccagcgttccttcaaccagtgctttctgaaagttcccactgtgcttggctctgctggccgcggcggccgatcttcctgcgctgtagggttagagctcgcggggccgaaggtcaaagggcggcgggcgcctgagcactgccaccagtgaccgcagccagccggggaaatgcagcagctgctaacccagggccactcggccggatcacccgagagaaaa

SEQ ID NO: 47132 - DNA, 1342 bp, Homo sapiens
attatattagtgggaccagttatgacaagaataatcattatagtacttttcagattttataacctggagcagattattttaagttgattagtaggttctgttacagtttttcttttgatcgtgcacttatagtcttcatttaattcctcatagaatcccagtcacctttatatatcatattattggaagagattcatcttcataatctccagttttttcacagtgcctcacagagttaatcatgccttttggagctagaaggactttagaacttatctagttatgctcctttatattataagtaagggaatagaatcaataagacagtttctgcccaaagtcatgttaccagttggtgacagagctggaaatacgtagagatctatacccttaaatctctccactcacatgctgatatactttctactacaatatgctatagctttatggaactcagggtgatgatcagacgtgtcattagaacatgagtcctctgcttctgattcaggcatacttttgggattcttccatctttaaaggaaaaaggaagccattcatctatatttagtaacccagtaatatctcacttagtttagggttagatctttagttaattcaaccttatagatcatacttatgaaggtgataactgacacgtgttccctgaattttaatttgataggcaatacatctacccactccattattttttaaaacttcatttaatagtttaaaccaggattggttttgttttcaatttttattcactcttcatagaatcacaattacctttatatatcatatgttattggaagagattcctcagtaatctccaatctctcatagtgcctcacagggttggtcaatggcttttggaactggaaggaccttagaacttatctgttatgctcctgatagccaatagcagatagaagcttgcaatcaagagggtaggacatgtgttcttcaatggatatcaaaggaagaggttgcaaaccaaagccatttggcaagccctgtagcctgggccatttaagacaggggcggtctcagccaaattgcacccatttaactatcccaaagagccacagtgcctacaacccaggccctaagttgatgaagaaaaagtcaaggaaggaggtgatacaattggaaatattcccatcaaatggttaatcttatttagaaaatgggcatattagaaaaagtccttccaagatgattttggataataaaagttgtatttgtggaaattggtattatctctgttttatgcacttacatttatcccttacattttgtttttagtgaccctacatgacattaaatttaaagtaaaact

SEQ ID NO: 47133 - DNA, 971 bp, Homo sapiens
gttgattctgaggtgcactgtgggaaagagcttgtcgctgcggtgttgctgttggagactcgattgttggtgacagcgaaagaacgataacaaaatgccggagcgagatagtgagccgttctcacaaccctttggcccccgatggccacgatgtggatgatcctcactccttccaccaatcaaaactcaccaatgaagacttcaggaaacttctcatgacccccagggctgcacctacctctgcaccaccttctaagtcacgtcaccatgagatgccaagggagtacaatgaggatgaagacccagctgcacgaaggaggaaaaagaaaagttattatgccaagctacgccaacaagaaattgagagagagagagagctagcagagaagtaccgggatcgtgccaaggaacggagagatggagtgaacaaagattatgaagaaaccgagcttatcagcaccacagctaactatagggctgttggcccactgctgaggcggacaaatcagctgcagagaagagaagacagttgatccaggagtccaaattcttgggtggtgacatggaacacacccatttggtgaaaggcttggattttgctctgcttcaaaaggtacgagctgagattgccagcaaagagaaagaggaagaggaactgatggaaaagccccagaaagaaaccaagaaagatgaggatcctgaaaataaaattgaatttaaaacacgtctgggccgcaatgtttaccgaatgctttttaagagcaaagcatatgagcggaatgagttgttcctgccgggccgcatgctaatgctggtagacctggatgatgagtatgctgacacagatatccccaccactcttatccgcagcaaggctgattgccccaccatggaggcccagaccacactgaccacaaatgacattgtcattagcaagctgacccagatcctttcatacctgaggcagggaa

SEQ ID NO: 47134 - DNA, 492 bp, Homo sapiens
acaaatgtaaaaattactatgaagtacttggagttacgaaagatgctggtgatgaagatttgaaaaaagcttatagaaagcttgctttgaagtttcatccagacaaaaaccatgcacctggagcaacagatgcttttaaaaagattggaaatgcttatgctgttttaagtaatccagaaaagcgaaaacagtatgacctcacgggcaatgaagaacaagcatgtaaccaccaaaacaatggcagatttaatttccatagaggttttgtgaagttgatataactccagaagacttgtttaatatattttttgggggtggatttccttcaggtagtgtacattctttttcaaatggaagagctggttatagccaacaacatcagcatcgacatagtggacatgaaagagaagaggaaagaggagatggaggtttttctgtgtttatccagctgatgcccataattgtattgatcctcgtgtcattattaagcct

SEQ ID NO: 47135 - DNA, 1601 bp, Homo sapiens
ttgagttataaaaatttcattttttaaaatctgtagggtgaaagtgaacaaataaacaaatgaaccactgagagtacacttgctggctgtaaggccggcagctgggtttaggagcagaggcagcagaagaccggagctttccagtctttaatttccgttgccctgacatcgatgcctggtgtgaagatacatcacctgacatctaaggggatcggcccaagggaggaaatgaaagctgtgaaaaagatgctctgctctccccactcaccagcctgcctcagaggtccagcttagccacagacacaatctctgacaactcccaagaactagcaggaagagcaatataagaactagggtttattttagcaaagaaaacacgtaagagccacactggtagtcccaggagaggcccagcagcaaatgctgagaaaagccagtggctttttgcacagcctgcccatggtggaggggagcacctgagctggctcctgggcccacagctgtgcctgggaatagtccaggctgtgcctgcagaggagctgctccaagcagaccctgaggaagggcacatatcccaaatgctgcttgcttcaaacaggcaccctcggtgctgcctcctctgaggctggcagttccttcctggatatgcagggtcaagagcggagggggaagcagagagagtgccgcctcacacgtactccccacagtcggcgatgatcaccttctgctttggcttcccgtccttgctgccctgggcctcaatttgccgcaagacatctaggccttcggtgacctctccaaacaccacatgcttgccatccagccagtctgtcttgtcacatgtcaggaagaactgagagccattggtgtttgggccagagttggccatggatagtagacctggtcccgtatgcttgaggataaagttttcatcatcgaacttcttcccatagatggacttgcccccagtgccattgtggtttgtgaaatcaccgccctggcacatgaactgggggatgatgcggtggaagctgcttcccttaaagccaaagcccttttcatgagtgcacaggcagcggaaattctctgctgtcatgggcacgacatcagaacgcaggagcatctggatgcggccagccggcttgttcccaatcttgatgtccatgtacacctgaggatttgagcgggcctttttagcaatgggctctccctcctgggtctctgctttgggaggctctgacccttcttcctctttattctcttcaagcgtcttcccagaaaacttcttcaaccagtcatcatctgaccaaactggcctggaagagccttccttaattctcattggtttggccaaattgacacgaattgtacgtccaaaaagctcagattcattcatgttgtcgatagctgctgcagcatcctctgccaactcaaattcaacaaaagcaaatcctcggtgcttttctgtttcataatccagaggaatctgaatatctgtgatgtctccaaaaggaatgaacgcagcatgaagaactttgtcgtccacttcctctgccagtccacccacgtacaagacgcgcttggtggtggccatcttgctc

SEQ ID NO: 47136 - DNA, 310 bp, Homo sapiens
gatcttccagccatcattagggctgtaggatttcagtttgctatggcaatacagagataacttctgcagtaccaggaaggaaattcatgctaatttacagatttcatgttgcccaatcaagaagttgagttatcccatttcttttgaccaatgtatatgcaaatgacactaaagtattaccacaaaaaaaacaaagtacttactttgtcatagagactagactaacatatgaaatagactgaggtgagcgttgtttttttgtttgtttgtttgtttgtttgatggagtttcaatcttgttgcccgggctg

SEQ ID NO: 47137 - DNA, 442 bp, Homo sapiens
tacgaatttaatacgactcactatagggaatttggccctcgaggccaagaattcggcacgaggcaactgattctagtggaacaaatgaaaaagaaacagtcaagcacacaatagtgcaaagaacgttcctttgtagatccgcaacttaaggattttgttcctcataaatggcatagttgaaagagcttatacactgcttacccagccaaatgctttgctttgaagtattgggttctgtgaaaatattgagcattgtacttaccttatctaggctgtgaaactgtcctacataccagagaatcataaaaacaaaaacctcactggcagcaagctgccgaataacaacagagtctagaggacatatttgtgggctgcacagatattttaggaatttcagaaattagaacaggagccaaaatgatttacattggcgttggcactg

SEQ ID NO: 47138 - DNA, 1494 bp, Homo sapiens
ttttttttttttttttttctcatttcaaaatatttaattttgtctgaaaaggatacattcccggcttccctcccaccacatcactcccggcccaccagcaagtgacacactcgcacgcacacacgcacataaggccaatgggctacggtctgcttctgccctctctggctgggaagaaggaatttctctcttgcctccttcccccaacaaaggtaaagagaggggcccgctggaatgccagctcccagggaaggacacagagccccacacactctatcacatcacatgcacttagaaaaataaaaccaagtggtgttctggcatccccaacaccgtaagagagcaatatccacctggaagtcatctttgccattttctagaaaaatttattgcacttaattagcagatgttaaaggagctctggagtagagctttgccatgaaaaccagatgctcctcggccctttgcgttccaaggagcacggctcccggggcccaggtagagggctgcccagcttcagaggggttttcccccactggcttgcatgcctcccgccctgcctcaggccaaaggaccgtaggagcggcctgcacagcccctcagcagggttacatgtacccagacttaaggttcactgctaagtgccccctccaacctcagaagccagacaggaaaacctcttcctttggccaagggtaagagttacccaggtcctccacaaagttgccataaaccttgaaaactctccctctctctaaatgcacacgttcctccatcagatgagacatttataatatgaatattcttgcaaagttccagctcattcatgatttgtctgttctgaggttgcactgagggtgccacaaagctttagacaggatgcttaggaagtagacggcacttccaagcccatcgggaacccacagaaagccaaggtaaagtcaacttctctagcctccagtgactgacagatgtcaaagatccaagcacaggagccgcagtctccagcggtcggcctccaagaagcagagggcccaggagggagccgaggagactcccattccctcgacagaaactgagcaggcaccaaccctctcctgcaagcatggatttttttaggacaggagaggagacaaccttacctgagcacttcttttcccccacaggtcagcctctgtggacatcctccatcttgtccccacccaggctcctgactcagaggggcatttcgaaaagagtccagcagccacactctttccaagtaagcactttgggaaagaacccgatacccactgcctgggggaaagaagggagggcaccaaacaggcagagggcgggataaagaggagacacatcgagccaccatcccagccaccgggctcagaacatggacaccagagatttagtgtccatccttaaaaaaataaaactggaaaaaacacaaaccatatactttccggcaaagaaaatgaagagcttttaagctcaaggctc

SEQ ID NO: 47139 - DNA, 2990 bp, Homo sapiens
caggccctggtttcatgtgcctttaatacttgtttttcctttcctctgtattcactaaacaatttttttttttttgtaaggctacttttgtagctttttgttttccctttgtatttatcatgtttttaatttcttctctgaggaggaattctctgaatctgtatcttccaattcaattcgttgccttttgaggccactgtggccatgaacagccctgctactatctgtggctggggtgtcagtggggtcctctcttgttccagcattgggggtctcacaggccatttcagacccgcaacaatctttgtgtaggagtgtccctgtcagggacgagttatcacggtcagtgtctgagtgtcctggggaagagtaggccaccacctccagctcccccaagttctgcccgttattgtgagggtgagggggacgagggtgtaagcgtccattgttgtggttggcacagatggtttcgaggctcctctcctcactgtcatcagaactgggtcctgggacagttgccagacccgctgttgagagtggagccagatgccttggggacaggaggagaaggcggctcctcagcccgactgctcagggcctttccattgagcttcttggtttcaaaagggtgctctacagagccgctattgccagtgtcctgagaggtaccctctggcacctctgcccaagcatggctgctgtgctcatggcctgggccattgctgggagttctaggagtctcttctttaaaagtgtccttgctgcagccttcaggtggcaggtcctggttcctctgggccattgctatgtttagacaggcttccttactggaagaaggggctgggttgtctttgtggctggttcctgctctcccttcatctgcctccccggtcaccaaggaggtctctccatctttgttatttgagtaggagatataagagtagcggagccacttgtaagctttataaatttttcgctcaactgattctatgtcagaagttggtgatgcccggcttggttgaatctctagcgtggaagtgctccgctcaggggacgaggttggggaggaggagaggtcatccactttgatctgggggtaatcatagttgtcttctccaatgtaagtgttggtgggcttgattggggcactgggcttgtcttctcgggttgtcttctgtcggcgccgcatggcattccgctgccaggtagaggctcggcgttcattcagctcctcctcatcctcagagctgctagagctgctggaactgctggattcatcttcggggctgggtgcacgtggccggggaaaaagatctgtgtctaagttccacctcacagacattctcctcagaatcggactcattggaaagggccaggagccgtttgtcttggtagcgccgcagagcagacagacgctgctggcgagaggctgcatcctcacacgtgggtgttggtggagttgaggctactgtgtttgtggtggtgacccgcaggggccccaggtggaaggcgttgtcggcagactcatctactgtgggaggcggggagcgaggcaatgaggccgaagactctgagtcagtgtagcctgagcgcctcgctgaccccagcgtgcagttggaggatagtactctcactgaggtcactgtctgagtcagagctcccagccctcgatctctcggcgtaccagtgagtcaaagaaggccatcatccgggggtcttcctggaccgactggttggcgtagtcatgcgacaggccactcccactgttcagcacaaggctgatgtactcttcatgggtatagaggcagcgggaatcgtcctcaatccgaccgtcgaggtctccagtacatcctggctgcttgtatgggctccagatcttgataatcttttctacaccagaagagcagatcatgtaggtgtggggattaaatcggacttggttaacaatagatcgatgccctttcagcaccatgaaggctccgttgaccaccctaccaatgccacctgcttctggatctgcaggaattctccacatgtacaggttgaagtcatcagagcccgaaaaggatatactggtcacgatctcctgcaaaacagcagcttttcatggtgcatgagttgaagtaaccctgattgtcaaactgaaacacaggcaggcgggaatggatgtcatagagcacagggggcaggcgtcgcctcagggccaggagctgggtcccgttgctgttgaatcgtacactcatggcactttggagggacaggtttccaccatagcgcaggagagaactcctgaggttttcgaatgtcccagagtcccactccttccttttgaattggctgtggccaacaacctgggctccacagggttaaacatgacactatgaaaggctgatggatagtttgccaggcagaagggctctccatggggggattcccgaatgtcccaaatgagaacccggccatcatctgaggaactggcaaaaatgttgtcattcactgggctcacagacaagccatatactgcatcttcatgagcaaacacgtccaatgtctcactgctttcaacatcatggaggataacttgctcatcattgcctccagagaacactttagtgttcccactgttgaaaggccaggcaaaaaatgttggaatggtgctctcctttcagctgtatgggcttgaccctggagtggatggcttgttccatgtgccatagcagaacccggcggtcatctcctcctgagaccagccactggcctccattgttggagaattcaatggcattgacacagccgaagtggccgaggaggtccttcttgtagaggtttctgcagccccgcaggcgtctcctctgaaagtcctgagtgagcagggggtccccatgcaagccccgctgggacaagaagcccaccactgacctcatgctgccccccaggccagctctcctcttcatgctggaaccgccgccgacacgccgtcgcgccgccgc

SEQ ID NO: 47140 - DNA, 363 bp, Homo sapiens
gctagaaagacttggtaatgatggtcagttccttttagatttcagaaaatcaaatgatgacctaaatttcccttaatttgcaaatacagtagtaattaaggtacatctctaaagtggagcacttacaccaggctctaagattcactttgaggtggaacttaaaaccagtgtactgtatgtatgcattggtaatagctacttttgcttcatagcttcataccaacaaaatatatttattagaatagtatgaaagtactggaggagctgaaagaaaaacacccaaggctgggcgtggtggcacacgcctgtaatcccagcactttgggaggccgaggcaggtggatcacctgaggttgggagttg

SEQ ID NO: 47141 - DNA, 906 bp, Homo sapiens
gtcccccgcgggcgtggcaggtcctgagtcagggcctgtccgtggccagcatccctgctgggcgattgagcagcgggaagctgcttggacccagtctcaaacttaaccctcatctagcacccgggcaggcctcctgggttgcagggacttgagaaaaggcagagttctcaggtcctaggaagctggggcacgctggcgtgacaagcgtcccggagaaagccaagccctcggggagctggggaccgcagcagggcttcagtcacatcctgcgcgggtgggcggcgggccaggccttcagttgtttcgggacgcgccgagcttcgccgctcttccagcggctccgctgccagagctagcccgagcccggttctggggcgaaaatgcctgcccttcacatcgaagatttgccagagaaggaaaaactgaaaatggaagttgagcagcttcgcaaagaagtgaagttgcagagacaacaagtgtctaaatgttctgaagaaataaagaactatattgaagaacgttctggagaggatcctctagtaaagggaattccagaagacaagaacccctttaaagaaaaaggcagctgtgttatttccataaataacttgggagaaactgcatcctaagtggaagaactagtttgttttagttttcccagataaaaccaacatgctttttaaggaaggaagaatgaaattaaaaggagactttcttaagcaccatatagatagggttatgtataaaagcatatgtgctactcatctttgctcactatgcagtcttttttaagagagcagagagtatcagatgtacaattatggaaataagaacattacttgagcatgacacttctttcagtatattgcttgatgcttcaaataaagttttgtcttgggaagatga

SEQ ID NO: 47142 - DNA, 469 bp, Homo sapiens
gtcctcctgcagcaccccctgctgaaggggtcccccattgttttgcttccccagcgcccaggatgagcggtttaccatcgagcttacccgggcccggctcctgtcaagcactttagttagctgttggtgtcatgtttggataccagtgttttatatttatacatagagaggattttctaatatagcctattatatataaatagatctatctatatgcacatacatacatatatacacacacccagccgatctcccgctcccagactgctctcgtatgtggggaatgggatgaatccccatctgtgcctcgaccatcaaagccggagctccagggctggagggggggcagccatgtgtcctgacccccaccatccccagagcctgggttttccagggaaaggctttgtgcaattgcctggtcttttttttttttttttttctccatgtgcctccctgtccccaaatctct

SEQ ID NO: 47143 - DNA, 1066 bp, Homo sapiens
  misc_feature (1)...(1066): n = a,t,c or g
tttttagttttttacaattttattccgtttcatcattctcaaaatatatcccccaaaagtaatctacaaaagagtgcaggctgctccccttaaagggaatggacaagtaatatacactacaaaacaatgtttaagatcatgtataaatgttactctgaatctcatttgttgtcatcaatttctttagtatctcagtgctttggggaatattcttaaccaaacccttcaagcttctggtagaaagtataggcttaaaagcttccactgtgattaggtctaatttcatcacatcagtataacacaagtacagaattgctgggattttccatacttgacagtagcttagaactgctgcaggaaggtcgtgtactatattcggttgttctagcaatggacaacacgccgagtctttgaaattctgtgtttttagggctctcaggaaaggagaaggaaggctgccggtggattctgaggttttataatcggtaacatgtcgacatgtgagaatagttatctgcatgttcttccttggacaagagccaaaaaccttttccagccactgatactgttgatcttctgcaacatagcaactgcactgacagagaaaaaccgagggattggattttagatgataaaacacacaaaaagcctctgtggaggacagatgtgtagtgtctgttgttctacaccattcattccagagtttggcacaaccaacttcctcccagactcctgaattcataacaaatgatgacagaaatgctactgcattatttcctatagcaattataaacttggagcacggatatttttctagcaaagaaacttccaaagatgtttttgtttgtcttcgaaggagccgcacttccctcttccgcgccagctgcagacgcacctccctgtcctcgggcgtctccctccgcccctcctcctcctcctcttcgtcctcagtcccagctcggcacggcgccttcaccacctctccgaagaacgtggccgccatagccgccccgtgaccggctgganacaactgcagcgccgcgggaccgcacgccgnttgcgcgag

SEQ ID NO: 47144 - DNA, 507 bp, Homo sapiens
aatcacatataggtgccacagttatccccattttatgaatggagtgatgaaaaccttaggaataatgaatgatttgcgcaggctcacctggatattaagactgagtcaaatgttgggtctggtctgactttaatgtttgctttgttcatgagcaccacatattgcctctcctatgcagttaagcaggtaggtgacagaaaagcccatgtttgtctctactcacacacttctgactgaatgtatgtatgcagtttctacaccaaattcttcagtgctctggatattaactgggtatcccatgactttattctgacactacctggagttagcacagaccccacaagttaggggctcagtcccacgaggccatcctcacttcagatgacaatggcaagtcctaagttgtcaccatacttttgaccaacctgttaccaatcgggggttcccgtaactgtcttcttgggtttaataatttgctagaacagtttacggaactcagaaaaacag

SEQ ID NO: 47145 - DNA, 820 bp, Homo sapiens
ttttttttttttatgcataaaaccacatattctaattaatttaactataaaatgccaagcaaagacagcagatttataatatagaacaaacaccatctgcaccaccttaaatcattgttacagatatatttctaggaaaaaaatacacctgaacaattctcaagcctagattctaagatgctaaagtattaactaaataggattccaaacagacccagagaaagttactgcataattatttaaatattaacatgtactgagttcagaaatataaatataataacacataaacacagtttacaaattcatgtcaccattttcctgtgctccatgatttcttcaatttggctacatacattgggccccaggctttgcccttatctggaatcactaagagcccacattcctggccagtgggagcaaatgtgaagtcgtgggagcaagtccttgctattcctttaatgtccataggcatgatgttaccgtgggagtttaaaatttcactgatcacatcttgattttctgccttggaaagcgtgcatgtagagtatacaagtatccctccaggacgtaaggccttaattgcagaccttaacagctctatctgtagaagaggcaaattcctcctttgacttatcctacaggatgccttctgagagtcagaagaaaacaaccagcttcgatcatttgaacacggagcatccactaacaccttgtcaaacatttcaggctgggcatctcccatttttctgccatccaattcagacactttaattacatttatcaaaggctgtgggatgaaagattccaacgtctgccc

SEQ ID NO: 47146 - DNA, 1528 bp, Homo sapiens
gaggctgtggatcgtttattggggctctgtccagccaggctgcagcacccgcctgggcctggcccggtgccaccaggtgccgggtgggggaggggagaaagtgcaggagcggccgccgccccagggctcgcccggtcctgtctccgtccctgaagcggtgcggcgctcaggtgagcgaggtgtcgtcgtcgctgccctcgccgcccgcgccgcccatccgctcctctctgctctcggccaccgcgctctcgtcgatgttctccagtgagtccgcatgctgcaccgacagctccgacagcgccaggctcggcaacgggctctgctccgggtgcagccacggcttgaagtgaggcaggtgcttctgtttccactcggggtaacttgaggcacgccttgtacatcttcttcatggccttgggagccaggaactgagaagatttattcaccacccacttgggtaaaggagcctttggggtccacctgggccaggtaggtgatgacgcagctcttgggccctgtgctctggatgaggtagcccgtctggatggacacagctcggaccaagtctttccgaaggtgggtatttgggatgtttgactgagtagttcataatgatgtaatcagcgcccatggggagccaggagcggagggtgatgacatcacggttcttcaggggcttgggacacctccaggagtaatagcccacgtcagcgttgactgtcaagcgggcgatgtcaaaagtctcaatgacgttgctgtcccatttcttgcggtactcaatgtcgtgtaggacgtcgtagagtgtctcggctggcacatcacagcacttccatccggcacttgatcttgtgcagcgtccgatccatctccacagcctgcacccagacagacaccccagccctgctataggtcaggttccagcccacctcagcctcacactctgaccggaagctgcgaaagtcttggtcatcgggcacctggacactctcacggcccaggaccggccgaggcccttggggctctgtagaggccgccagcttctccatggggagtgtggggaggcccagggccctggtcctagtccggctctcctgggtcctccgcggaggctccgacaacgtcgacgcggctgcagatcggacgccaccttcctgggacctgagaagcagggtctgtacagctccagcaacactctcctcttcctccagaattctccagatcctcctcagcttcttggctctggtgctcatctcaacacagcagggtcttcctccatcaggccaaggtgggggtaggagaagaattgggaacagggactcccctaggttctcagggtacagtcagtcaatctaagcctgtatccaacaaagacactgacccctggggtacaaggaaggctccagcccaaaggcaggaggattaggctttagctcttgctcacagcctgctgagaccctggtaagcccctgtccctctttgggccctcaggtttgcaatttgcagaatgaggaaatgggttcctcaatcg

SEQ ID NO: 47147 - DNA, 532 bp, Homo sapiens
  misc_feature (1)...(532): n = a,t,c or g
tnnnnnnnnnnnctttggnnnaacagctatgacatgattacgaatttaatacgactcactatagggaatttggccctcgaggccaagaattcggcacgagggaaaaactagctggtttggtagaagagctggaggctgacgagtggcggtttaagcccatcgagcagctgctgggattcaccccctcttcaggttgatactgcctggatggtcacctctggtgcgcagcaagtgcaaagccagtgggggactttctcacagcttacatagccatccagagatccacagctacgtcactgaattgttaatgcacatttgtacttggtttctctgtatctattcacaggcaacaaatacttatatgtgtgatctttcagggaatgttttgtttatttgtttttaaaagtattgggaatcagattaagacaatcagtttcagagaaccaggaggtttggggttaagagatactcaaaaattttcacaagccaagtagggcatatatcagatttggccaactgaatggcgctgcct

SEQ ID NO: 47148 - DNA, 637 bp, Homo sapiens
  misc_feature (1)...(637): n = a,t,c or g
cattatttgacaaatgagagaagtgacatgacttgcctaaggtcatcctgcaaagttagtggcagagttaggacttgaattccagtcttctaattccttggtcagggcaatttctactgtgttatgctgtctgttagaaataatgacttatggaaactttgtctttaagttgtattattgtaaatacccttaaactggccantagattttagaaaggcaggcatgggagtagatgctgagaattctagccataagaagaaaagtattttaaatcttacagaaatgtttaaacaacccaaaatacatgaataaaaatgacatttctttgtaggacctgccaactaactattcacacacatttatagaggttataaggatcttggctctagaacaaatttttgaaattagatcattttaccatggatgttaacaaaattggaaattttttgtcactgagaaaattatcacaaagcacagtaaatacatatacttaccatacattttgtaaaaaacacattttttaaagaaaatagggatgggtatggtggctcacgtctgtaatcccagcactttgggaggccaaggtgggaggttcacttgagcccaggagttccagaccagtctgggcaacatggcg

SEQ ID NO: 47149 - DNA, 503 bp, Homo sapiens
ccacatatgaatgcaggactacccccttaccattttaagaaggtactttatacatttatttaatcctactaatgtgcagccattgcccaagcagtgactgcgttgcatacatttggcactgagtaggacaagacctctcagctatacattgaggggttttagagcatccatgtgggcaacccttttttgtgcgggagagcaggtgttgctcttcagtatgtagcctaaaaaaatcttaattatttcatggatcatgaagcaaggatgaataatatcatgtcttggtaaatactaacaaatttgttaggtttggtgacatcatttacagattatttctttatgttgtccagtggttcttccttattgttgatatccataagctggcactggatgctctcagtaatgttaagtaattgtcaagcagcagttacctactgtgttcttaacactgagttgtgaattttttcttaaaagcagtactgtagtactgaatattcctgtag

SEQ ID NO: 47150 - DNA, 2077 bp, Homo sapiens
  misc_feature (1)...(2077): n = a,t,c or g
ttttttatgcttggaatcgaatttcatgaatttattctaacacataaatcaggtaagagagaagtagatggatagatttttttttttttaaagaaattagcctccctgggtacttacagtagattgagtattgagagatttacaaagatataattctttggaagattacagaagatggaaacaaaatcaaatctttcactttcaggtactggagttcattaattctttcaccaaaagcacatcactgaaggaaaatcagaagtggttttttagttattattaaagtagttcaagacccagggaaccccttgagatgaaaacaaaacagtattcaacttttcttcacaagactaccttgtactggcaagacttagaggacttctggcttgaaaaatattgcttagaaaacttaaaaaaaaatcaacaacaactatattttggacaaaacaatttttttttaatctgtcttgtaaaatccttacttccttttgagtctctgatggccacaacatttcatttgagatgtttggcagtcacagcttcaggggttatggttactgattatctaaaccccttaggtcagaatgaacaaacacagttcatgtaaacctggctgttattggagtcctctgaccaagagataatagtgaagagtgtggagagcctgaatgcccatggtggaaatgctggaaaaattaaaggtaagaaataaaacatagcacaggagattcagagggctgggatgacttctgagctgctctctatacccaaggccctttcaatttctagctgtgaaagatttttcatgcactgtggtgcctgatgtttcctgcaatttgacaaaaataaatactttacacaagaaaaggatgcaaggcttctacgttacactttggggatgctcaggagccaaggctcctgcttggctttcatttcacagggcctgcagccttgtctctggaaggtgctgattaggactgggaatggcctcctctggtcgagactctctgacccctaagtaaatgaacttgttcccatcccagtctcccaaacagatccccaaacactacgtttgtttttctatatcctgattgtcacacctggaagactctccttagtatacatgaggcttactgccatgagaccaaatgactagagagcatcttttaagagaagcttgctcattcaggaaaaattaaggatttggtacaaactgcaggccaaagggaagctgacatattgttttggtgtgtattcttgaaaacgcatcattaaatctacagtcccttgtcagcatgctgacttttacgctgcctcaaggagtcttccaccacctctgtgtcagctgggcagggttgctcagagatgccttcttcagcctcctcaggctctacttcctcccgggtcacaccgtcctctcctgggggcccctgatcattggcctcacttctctcctcatccacaccagcagccaagttgtcctcctcctcttcnncctctgcttcatcctcatcgccaagatcttctttctcttcttcatcatctacaaggctgtctttgttttcttcttcatttgaatcatctttttcctcctccgcatcctgcaactgttcagctctatgagcctcctctgatctccgattctgctcagaacgctcagataaatgccttggaagtggcacacagaaacattctgatattaccaccaagaccagacccataaaaaggccaaaaaccaaggtggctatgacgaaaaagacataagaacaccaagcaggaattccaagagtcactgtgaaatagttgtgaagatgccatatcttgccagagatgctaaaaagaccagccattccagacatcgttagagaagccggggatttccagccagtcagaggctcgactgattgccatttcttctctaagatataattctgcaggtcttcgaagattcctggggccacgataacggcggaatatcccatcctttgcatgaaaaaatgctgggagagtggtgacaaagaagcggccactcaaacctggttcttgaatgacatctaccttccccacacctcgtgcc

SEQ ID NO: 47151 - DNA, 841 bp, Homo sapiens
tttttttttttttgtgtttttgtgtttattttaaaaagttcacacaccttccccatctttgtcccagcactggttttggtgactccacccctactcccctatgagtcagcccagaatgtgaagccagtggccccagggcaggagatggccacccctcagccccaccgcagggtgaagctgggcccgaagctcctcctgtcctagggccacgctggctgcagtgaggcggcggggacggaatgtgagtgggtggagagctcctggcaggaaggccaggtagcacctctgccctcatggcactgataaggagccaggaagcagggcaggtggggcataggccgtggcagggtacctacatgtcaatcacacgtgatgggtgggcctgggtagctgcatgccagactgggcaccagactgtggcacacagctcaagggtaaccttgcatccaggcccttctgtgagagtaggatgggagggagttgcacccatctcctgtccgcccccccccaaaaatatatatgtatgtcgatatataatatagaggtatatacacctgtacataaaattgttgccaccaaccactaaatggttacactacaccaagacactaaaatggcagggagccctgggatcctggggttggacagacacagggaatagggggtagaggcccaggctaatttctcccttcacagcaaagcagggagagaaaggaaggagattcaccccttaacctgtctcagccctgggtcagaagagaagcctcccgcctggccaggcttcacctaccttagccaaattgtagccagacagacagtgccccctgacctcaaaaaaaaa

SEQ ID NO: 47152 - DNA, 1606 bp, Homo sapiens
  misc_feature (1)...(1606): n = a,t,c or g
gggaagtcctctctcaagccagcctgtgaagacagcacctgcctgccctgaccctcctgtggcctccaggcctgtggctctggtaacagtttcttcctccctccccgccacccccttcttcttggtgacagctggaagtagcagtggtcacaactgagagagccaaacatttctacagcccccaggacattcctgtcaccctctacagcgacgctgatgaatgggagatgtggaagagccgctctgacccagttctgcacattgacctgcggaggtgggcagacctcctgctggtggctcctcttgatgccaacactctggggaaggtggccagtggcatctgtgacaacttgcttacctgcgtcatgcgggcctgggaccgcagcaagcccctgctcttctgcccggccatgaacaccgccatgtgggagcacccgatcacagcgcagcaggtagaccagctcaaggcctttggctatgtcgagatcccctgtgtggccaagaagctggtgtgcggagatgaaggtctcggggccatggctgaagtggggaccatcgtggacaaagtgaaagaagtcctcttccagcacagtggcttccagcagagttgacctggggatttctgtcatgggtgtccctctgtactcagaatgggttcaggccaagtcggtgaagatggatgttggcaaaatagggaggatacccctcaatttgctgaaatgggggaaccttcttcttgaaccttgcccaaggggccaagggcttgcttccaggttaaactggacggaaggcccaggtctcagtttctttcaaccaggagaggccgctgcctagagcccctccccaccttttcctggatgggtgaggcaagccaggagagcaagcagtgttgtcctcacgggaggaggactgagcgactgggaaaactcggctctacatctcacccagaacggcttttagaaacaccacagctggagagtcctggctgagccttgggagtttcagctctttggcggggtgcccaggtgccatgcgatcagcgaagcctgcgagttggcaggactctgaggtttcctgcagaccatgccatgagattgaaggtgcggggaaataaagaaaaatcaccatttaggagactccattctttccctacaacccagctgtggtcccagagatcagggggtgttgccaggtgtggctggggaagggtctgggttcacaactcaccggcactctttagtccccgtataacatggtggttaaggataaagatctgaagccagacagcccctagttccaatcccagctctgccgcttactagcagtggcagtttggttcaggacttagccttcctgaccttcacttacctcagctatcttgttatcctaccctcagggagttgttgagaggattcagtgaaattttgtgtgcagaatacccatgccactgagtgcctggaacgtagtaaatgtcaaatcaatggaagttaaaactaggcatgcatatatgccagagagctttcctagcatttactgcaatgccctgtctcattttgggaaaaaggaaatcctggatgctaggttgacacatccnttatgcagggga

SEQ ID NO: 47153 - DNA, 2553 bp, Homo sapiens
tttttttttttttttgaagtttttgctataaaacatttaatgttaacctacaatacaatgtaaacttttatgaaaaaaatttaaagtacactagatttcttcagtaaattatcacatgactattcaggcgcagtacaagttggggcactgcatcctttgtggatggatttccgttgctgtgttcctcacaagtcctaaaaaaaccagttgtagagcggagctccttgttcaagcaccggataatgatgcccctgattttgcattctgggggttatcgctccttctcagtcattttctgaaactctttgcttggccttggcaccattagcaattttcacaactgctcaattgaaggttctaggttctttttagcttagtttttaagagacaagtgttatcctctggccatctcttattccaaatatcatggtggaggcaagcaaggagaaagaagtatttgctagaggaaattctgcagaagtggaagaaaagaccagaagggctccactgagggtacaaatattcaactgactccaatcgagtgtctttgccttggtcacttcccatggttattcagctcaatctacaacttcagtcgtgggagtgcagaacaaaacttgaaacaagtgcttttagttgatgatttgccatttggaaacaacagctgaaatatcccagaggtgatgtggaaacaagagcaaatgcttgcagatcactggcttctcagtgtcttctccctcgcaggtctcatcaaaatccccaaaagtccttaggagtaacacagattgtactggcattaagtgacaaaatgtgcagcctgtatttgactgaggaggaaaggaaatggcacctaggcagcagcgcctagggtcagcaaggagaccggcctagggtctcagtaaagcagaactgtttcaaatgggactagaccggggcatgtgcttccggtgaatcctcttgaaacctaaagtaaatgggaaggccgccctaacagttgtactgacataaagggagaccccttcttaatattctggcagctgacttccttcactgaacaactattatcaaaaggcgagaggcataaagtgcacactgtagaataagaagagactgaattatgatggaaaaaaaaaatcgtaacttccccaaagaggtgtggacagtgtacctagcctcacaaaggtccttaataccctcctgtgtgcctgcccagggaacagctgtgaattccagatggggaggaaggctctgacttaagtggaaaaattcctctgcatggttgtcagcaggaaggtttcacgtaaggttatccttatgtggagaacatgggttatcctgctgttcacgccagatacattttactgacaacagtcagatggtgattccactcatctggccttgggacagcagaaaacgaagtggaagaacaatagctggccagggacagaattaaattttcctagagatggtgttctagacagctatgccaaggccactgggaatttctcaggctctccaagttaatttctgtggggtgccttactctgccatgtgggatttaccccaacaactgaggactgcagtggatagtaaccatataattgctaccaaaaacagtggtccttaggttttagttaagcaagagagaaagccttgagactacaactccagcaagttaggctttatgttgatctgaaccccccgccctcacagcattctaggaactacagtaacgtcagtcggttgcagtggtacaacgagcctgcaccagtctagctacggaacactttggaatacttgtcagagcgcactggcatctgttaatacatggcctgacccatgtacccattaccataaactcaaccacagacgagacatccagaggttaaaaaaaaccctattacttcaacatagcaatagagagaaaggataaaagctgcctccagaaggtggctgcatcagaaatgaaaatgtgccttccaatagattacacaggctgggagttctgtcttggctcccttcaaggcctctggttctatccttaaaacaataatacacttccactgagacaggcagggcactctcctgtggttctgctggctccaccacaggccctgctagtcctttggaaaggcacccaggcttggccaattcaggaaagccccagggctggggggagcagcatgcacatgtcagaagaggaatgaagagctgctatcctttggttcagaccccataaccaccacctggtacagactccaaggaaaagctgcagttgtgtgtaaaggtgagttccaccacatacataggtgtatctttacatatacagcctttgtggggccacaaacccagatttcctcccactgctccaagtggggtgcacaggtggtaagaaaggacagcaagagttggaccaaaaagaatgacctctctgggaacgtgagagggacaatggcagaaataagcacaaaccagcccggggcacttttattacactattgtgggctaaggagcccagggcataaactcatgggtttaaagaattggctcttt

SEQ ID NO: 47154 - DNA, 746 bp, Homo sapiens
cttttcagtccttgcgcaccggggaacaaggtcgtgaaaaaaaaaggtcttggtgaggtgccgccatttcatctgtcctcaattctctgcgcctttcgcagagcttccagcagcggtatgttgggccagagcatccggaggttcacaacctctgtggtccgtaggagccactatgaggagggccctgggaagaatttgccattttcagtggaaaacaagtggtcgttactagctaagatgtgtttgtactttggatctgcatttgctacacccttccttgtagtaagacaccaactgcttaaaacataaggatgtttcagttcctccatttaacagatatgaagagcattttaagaggtgcagcctctggaagtggatcaaactagaacttcatatgccatactagatatgtttgtcaataaacttatctagtatggcatatgagttctagtttgatccacttccagaggctgcacctcttaaaatgctcttcatatctgttaaatggaggaactgaaacatccttatgttttaagcagttggtgtcttactacaaggaagggtgtagcaaatgcagatccaaagtacaaacacatcttagctagtaacgaccacttgttttccactgaaaatggcaaattcgctgctggaagctctgcgaaaggcgcagagaatgaggacagatgaaatggcggcacctcaccaagaccttttttttcacgaccttgttccccggtgcgtcgacc

SEQ ID NO: 47155 - DNA, 903 bp, Homo sapiens
  misc_feature (1)...(903): n = a,t,c or g
ttccgggcgacctaccccgtacgagggagggggcatgacagtgtggattctctagggtgtatgggtaggtcgggggcacagttagttctaagtgggcttttatgctaaaagcctctggggatatctgttttgaaaataaagataggtgtcccctccttgctgtcatctagcccagacactctgcttgctctctggctgtctgctccctgggaaggctttaggaggaccacccaggacaggatgaccatgctgccatctgctctggagctgggtctcagtgcagagggacagtgactgtggatggttgcagtctctggtgggaggtgaggatagaagtgataaagagctaagaggagcttctgggagccttggaggaggtcagtcttgcagtggtgaagccaggacanacgagtngggtggggtttggggtggggtgntcaattccgtttgagctgctgattttcatgagtcgccttcaaaactctcgtgtagggttgacaatgtgggggggtgggggatccagcttattcttttattttcaagtccattcttggggctggtggggaggcaggagaatacccctccctaagcccttagtgtgtgccgagcttgctttgtgatgttggcaggggaggggagacctgggtggtgactgagttccctttatcaaacccttcaatgggcacaaaattgagtgcttgattttaggttttatttttttatgaatgtccaaatctgtgtttccccctgccctcccagactgtgtggccagttgaaagtgtctggtttgtgttcatctctccctcatttctggagcagggcctgagaccctgccacatctcctatgctctgcatccacgcctcttttggacattaaaggttgattgatgcacaaaaaaaaaa

SEQ ID NO: 47156 - DNA, 1359 bp, Homo sapiens
gagaattataaggcagtgatttcccttaggcccaggacttgggcctccagctcatctgttccttctgggcccattcatggcaggttctgggctcaaagctgaactggggagagaagagatacagagctaccatgtgactttacctgattgccctcagtttggggttgcttattgggaaagagagagacaaagagttacttgttacgggaaatatgaaaagcatggccaggatgcatagaggagattctagcaggggacaggattggctcagatgacccctgagggctcttccagtcttgaaatgcattccatgatattaggaagtcgggggtgggtggtggtggtgggctagttgggtttgaatttaggggccgatgagcttgggtacgtgagcagggtgttaagttagggtctgcctgtatttctggtccccttggaaatgtccccttcttcagtgtcagacctcagtcccagtgtccatatcgtgccccagaaaagtagacattatcctgcccccatcccttccccagtgcactctgacctagctagtgcctgggtgcccagtgacctggggggagcctgggttgcaagcccttcactggttccctaaaccttggtgggctgtgattcaggtccccagggggatttcaaagggaggaatatggctgagttctgtaagtttccagagttggctggtagagccttcttagaggttcagaatatttagctttcaggatcaagctggggggtatggaattggctgaggatcaaacgtatgtaggtgaaaggataccagggatgttgctaaaggtgagggacagtttgggtttgggacttaccagggtgatgttagatctggaacccccaagtgaggctggagggagttaaggtcagtatggaagatagggttgggacagggtgctttggaatgaaagagtgaccttagagggctccttgggcctcaggaatgctcctgctgctgtgaagatgagaaggtgctcttactcagttaatgatgagtgactatatttaccaaagcccctacctgctgctgggtcccttgtagcacaggagactggggctaagggcccctcccagggaagggacaccatcaggcctctggctgaggcagtagcatagaggatccatttctacctgcatttcccagaggactagcaggaggcagccttgagaaaccggcagttcccaagccagcgcctggctgttctctcattgtcactgccctctccccaacctctcctctaacccactagagattgcctgtgtcctgcctcttgcctcttgtagaatgcagctctggccctcaataaatgcttcctgcattcttctgcaaaaaaa

SEQ ID NO: 47157 - DNA, 1414 bp, Homo sapiens
  misc_feature (1)...(1414): n = a,t,c or g
ttggaaagattattaaagacaatttccagtttatgtactaccaaaagtagagtatcaagcttgttatggagttgaagctctgactgaaagtgaactttgtcgcttatggactgaaagtttattgcattccaacagctcattttatgttgggcatatcgatgcatttacttcaaaactttttctactggaagaaattacctcagaagaattaaaagaaaagctttcagcactcaagatttccaatttatttaacatcctccaacacattctaaagaaactaagtagcttgcaggagggttcctacttgttatctcatgcagcagaagattcttcactcctgatttataaggcctctgatggaaaagttactaggacagcatacaatttgtataaaacacattgcggccttcctgggtgtaccttccagtctctcagttccctgggtcccattagatcccagcctgttattaccatatcatatccatcatggaagaataccttgtacttttccaccgaaatcactggataccacaacacaacaaaagattggtggaacgagaatgcctacacgcagccacaggaatccagtttccatggaaaccaaaagcagttgcttgcctgctcagcaagttgaaactgaaggagtggctccacataaaagaaaaataacttgaggactgtaccatggaaaactaaatttaaaaaaacagttataacagtgtttaatttagataagtttgagggaaaataatcagtaggcaagaggaacatttttcctgtagtagctagagtgccttgaaaaaatgtgttggctatgtgaaggaatatttcaactaaaatggaatggtatgcttttcacccttaaagtttgaggaggatcttgatatgttttaacattatcatggcagggaaatatataaagaagaaaaatatttttacattaaaccttttctaaaaattgtaaatagaaaaataatttggttttttatcaagaacaacacttatcgttatgtattgtgttagttatattgccagtctgttgcgactgactcaaaaagttaaatgttgccactgctgaagatgattatgagcatcgcaaactttgtttctgacccattttgacagtttttatatactcctttaaaatgatgaatgttacaggttaataaagttaatacctttaaaaacttggtgaaattccattacagaagccaaaaataaaaactccctgcctctgaaaagtcagattacctgacttcttgtttggcaaccatcagtttgtttaataaaagaaaaaatttggtggtataacatgttttgatgacagatggcctcctatctctaagattccaagcctgagttgttgaaatacactggctgaaagnaagagataggtatgttttccagaaaaaaa

SEQ ID NO: 47158 - DNA, 632 bp, Homo sapiens; identical to SEQ ID NO: 2278

SEQ ID NO: 47159 - DNA, 841 bp, Homo sapiens
tttttttttgcttaattacatgtaattgtttatttaaaataattttccaagtcttccaatgatttaacaggctttgcttcacttttatcatctcaaacagctataaatcaacacactttttgtattttattttactactatgtatgctattttaataacatttttctttattaatactagaaccaaatatattgaccaataagcagtatagatttaaattatcttcttgggttggtctgaggttgctgatggattcttgggattgatctgatgctagaagctatcttaggccctgtctctaactcactgtatgtttcaggcaaaacatgccacggttctaggtctgttttctcatctgcaaaataaacacccaaattagatgatacttattgttttaactagctataaaattccaatactatattccccatcattttcacttacttttacttaatctttatttgctacttttccacctataaagcgtaattttccatatcaagtaaacataaattcattaaaaaataaacacaaacccaaaatattcttattctaatatatctgcattaatagataaaaaggctttagctttaattttcatttttcatttctacctcttaaagtcaatgataaactcacaagtgtaaaatgaatgcatttaaaaacataaaagatacatttcaatgacaagaaatatgcaatgatcatgaaaatctactgtacactttgccacggtcaaagaatgaaggacaatatggaaaagccaatcttcaaatatatccttaacaaaaactctctcctgcatagtaaaagcatcatctaaacagcagctccaaccaaa

SEQ ID NO: 47160 - DNA, 437 bp, Homo sapiens; identical to SEQ ID NO: 2281

SEQ ID NO: 47161 - DNA, 424 bp, Homo sapiens
gcttgctttggaatataagaaatacattcttgtgttgatttttcatttttattctttgcctatgtaatttccatgccattttttaatgatagctaaagattatgtaaattctcctatttcagtgactagggatttgttgggacgtaagtagagcttagactgttttcccaaggttgctttaccaataaatggaaagtttccttcttttagctgatgtttccttcaaaaggaaaatcttccatattatttaaaggaaatattttatgttcctttttttcctattgtgaattgaagcttttagattagttttgtgtccttccctagaactgaattgacagctgcagccttaagggattctcgtgatttaaatatgactgagagaggtgccacagtacactaagaaacgctgacacaagtgaaagtg

SEQ ID NO: 47162 - DNA, 655 bp, Homo sapiens
  misc_feature (1)...(655): n = a,t,c or g
gatcatgagtcctgctttaagtatttgcagtgtagtaagagaatccatcttttactaggagaccagattccttttatacctcattcatcatgctggattgtaataaatttcagattttggaatgggcttatttaactgacctaacaatcttgatgatttccattagaataacttattctaaggtcaaaagtggaaagacactgttggtttttattttgatttcactatactcatttttgaacatggaaatacagtggtgaaaccaccttatgcaaaaatgataacagtgaggaaattatgacagtgaaagagatctgacctaactaactatctatcttgcctcgaaactgcccttggtcgttcctgagtgtgggccaagctaactttgggagaaatttactttataggttaaattataatagcccttcccaaaactnnnnnnnnnnnnnnnnnnnnnnnnnnnnnnnnnnnnctttataataccatcagccttatcatttattcgtcatgtatggattgtttcctatatccactatcattaaaatttatccatttggaaatatttttttaatggaaaaaaaaaacacttcttcagtggaaaaaacaggttacaggggggattatattttattcnggctaaattngtacttcacag

SEQ ID NO: 47163 - DNA, 1554 bp, Homo sapiens
  misc_feature (1)...(1554): n = a,t,c or g
tggcacgaggcaacaaaaaggaattttttagtctgctgctattattaacatttattatctgtatcttttggctcaggaaatgacttcacctattttttccataagcagacctttaacagagtcacttaattgggctgcttaaacggatgttctgggagaaaattataatatttagtatttgtacaaaatatcaaaaagtattttgacaagtttctttttaagatagttcctaaagccttaccctggctagaggtgttttgtacaaattatatataagccagcctgatctaccaacatgccacagagaatcacaatcaacagtgtggggaaagtcagggcagtggaagtggatgcactctttttattttgaaggcttaaaccaaattgtcttggaattaaagctgtatttctgcagctttcggtacagagaaaaagaggaaagtgaagctgtgtcagttttaacattagctatatcaacatgtttaagaaagatagatgaagtcatttgcataaaggtacagcattgaaatactatgttgtgtttgtttttacatttttgcattaaaaaaaaacatgccgtaaaagccaagttaaatttcatattaaagcaagttctagtgtatgtgttgagttcctggtaatcacatacttgttcacatctacaccgtacttcatagtatgatttgtcaggggagggattgtggggtgacagttttacatttactttttcttcttaatgcagctggatctaagtaaaatgttttgaagtttatcagaaactaaatgtacttttaaaacgtatagggtcagggttgggggaaaaatacaggtatagtaagtaagaaaagtgacccatgaagaaagcatcgtgaggttgtatgttggttgactgtgattaaaatgcggggctggtgtaagttgtaagtggtggctgattgccgtgtaactatgtacatgattgttgggatggctgtcccatattttgtatattggaataaaaatttctataaattattgtaactaaaagtaaatattctaaattaagtcccacttcttaagtcacatggcttctgtcttggaaattttacctttaaaagattatttaagacaggaaccaggaggcttgggaacagggaaagagggaaatgttgtattatgtgggtcttggggcctctaaccatcagtatagggttttttctttccttgatggcagtagaaagacctcattttcataacataactactcttgatactttctttaaaaacactttttattaaagattctatcatgaggtatttggctgggagctgggaggctaaagcactcatgtcctggctcttcagtgaatttaannnnnnnnnnnnnnnnnnnnnnnnnnnnnnnnnnnnnnttccagtctccctgtcttgtaaaatgggagtaatacctacctcacagggttgttgtggggattaattagagataatgtctgtaaagcatttaaggttcttgaagaaggcactatataaatacaaaataatatctattaaagttggtttatttgtgaaaaaaaa

SEQ ID NO: 47164 - DNA, 1592 bp, Homo sapiens
taccaagatgggtaaatgcccaattattttcagtcctcataatctgtacaaagcctatgaggcaaccagtaggccatatctcactaggcagactttgaggaagatgtttccctatttgaaacacaagaaattatgaaaatatggagatgaagagggagtagttctgtgcttcttgctgtgttacctttattatattcctagtgtcactgacactagtttaaaaacagcctgcaacaagaatattctcatcaccagccaccttttccacctttcttctttttctgttgctgtttcttttttgttgctggagcccctgcaggtttctggtgtcttgggggtatgatgttacttgtagaggcagatactgttgcagcactgccaggtcttggggaggtgggtgggctgctcacagttttactggcatccagttcagatgaagctcctgcagttgctccctgggtcccttttccaatctgatccttctttttacccttctttcttccccggtagtaagaacgttctcgcattggcagccatctttctggatctggggtaacttttgggtcataattcttaggcaattttcccttctttttctttttcttctttttcaaatctccctgtccttgttcctttggttgactatctccagtaacttttccacccttcttccgaatgtatgtagcaccagcagaattttcaagagcctcaacatctacttttagagacatactatctgacgatggcaagtgtttactaagagctttggctttctctggatctacaagtgagtaagcagaaataagctgtgccagggtgtgaatatcttttggattttgtttccacagctgttgtaggtcactaattgcctccttcttccgcccatatttgagtttgaagtttgcagcttctcttatcaaggacaaatgagcaggagattttggctgatggttttgataccactggatagcttgtgtgaagacctcaatggcactatcaatatcttcttcatggctatacatggtaactaatgcagataccatgcctggtttatgctttaactcctctatgcttctcaatattagacatgctttagaaatattaccttgagaaattttcaactgtgccatggtcagcttaatttcagctgcattttctggatgctgatctgaaaattcctgaagcagctctattgcttttgtgtgctgcttttcacggcagagctgggcagcttggattaacacaggtaagagatgctcgggactttgggactgtaaactggcagatattttgcggcattgttcagcctggtttgtgtacatagcaagtaaagctttgttaaattctatagcttgtagttgtttcttggaaagcttaaactctactccttccgcattggttaatttcactttcttcttggagtcaaagacattttggtccttgttaatggtaatgatgttatttgcaattacagctagtaatcccacatctgttggttttagttttattatttgattgtaaagttgcaaagcctcctctgttcgaccctgaagctgcagaatataagccatctgaccatgaatgatggccag

SEQ ID NO: 47165 - DNA, 2525 bp, Homo sapiens
  misc_feature (1)...(2525): n = a,t,c or g
ttttttttcatttttaaaataaagttatttaatagtctccatttaattggtttatttgctgttaataaattggcaacacaaggaagggccccatgtccaggctcaggcaggagcggctgcctcaggcagaggcagggcaggcacagctgccccgtgccccaagggatggagggaaaggcccctcacttctgggagaacccccttggatgaacacagcagccaatgagcaaacagaaccagaggagctacaggaaaatgaggcagaggggcaggcttgggggaaggcagcattctctggtacccaccacccctgcccagggctcagaagcctttgcctgggtccaaaggccagggacaagggaggcttggctcacagatggggggtgggggtcacccatatcttcctccccactctgggactgactgacagccaagaaaccggcaggagctcacacagagctaatgctaaatgtcctcttacctctgggtggccctgggcccccagggttctgaaggaaaggtgggcatggtaccctgtcctcattatggggactgaggctctccatgacctagggccctcagacccagggggaccaagggcttctaggacttccctcccaccaagcctgtacccaaagacctggggcaggcagagagcagcagggaggaacgggaacagggcagggcgtgtggcatcgtacccacgctcacccacactggcccagcagcctcccgaggcctggcccaaggtcactcctcagtgaagtccctgtctatgtccatgtagggctcctcaatgtagctaacgagagcagagggtgactgccggtccgggttcaacaggatggacactgtctccttccagtatgagaagctgatgcaggagctgttctctaggcaggtgctgtccttgtccttgtgcaggtagtgctgctgccagaagcgcagcaggttgtggaagttgttgagcaggaagccggggtacttcttgctgtgctccatccgctgcagcagccgcaggtacaggggcagccgctctttccgtcgggccagcatcaggatcaccaggctggtgttgaggcagctgacgttctcctgggtcagcgtctgcacgtggatgatgttgatgaggcggaagaggaaggacatctgcgtgggcacctgggatatgtaggcgagcaggcggcattcagacagtacctcggcaactttcatatccacctggttttcaaatcggtccagggacagagtgacacagcgcaccagcatgttggagtccaccagggagctgttgatctgcttcaggaatacctggaactttgcatcggtgttgatatatttattgaatctcttgaatgcatcaacgttgaacttcatcagctcccccaggaggtcaaagtaactctggagcacatcccttgacttacacgtcgcntgtccacaatgcagtaaaggatgtgctccaagaggccgtcgcttcagcaggaacatctggtctgcataggaggtggtccctcgggaggaaaactctcccaacagccccgagcttgccaaaacctgaaaagacgactcctgctggctcccttcttccatgaacctgcaaccagacgagttaaataagccccctcttccccatcacacacccaaactcctgtcggtgttgaaggacagcttcccacctcagggatgttggccttgagagagatggcactgagttcattcagctcctggttgttgagtaacaagtacttgttctcgtggtggtcactgaagctctgaagaagcctcaaaaactgtatcttcaaggtgatgtccgggctacagtcacagttctggttgtgaccatggaggacaagggcagatgctgaatgcttcctccaaatcagtttgtcaaacaaattattaagtccagggatcagcttgaactctgcaatcattctgtgaacctggttnttcggacgccccatcagcagcacgcagaggacatagagcacttccagtttgtacatgatctcatgcataatcttcattgactggggcagctggggttctggctgacgtgtgagccaggcccattctcctcagaagcccctggaggagggaacacaatggaggcttgattgtgctctgactcctcattggccactcgcatcagggcatctagcaccaaagcattgtctagccatgtgtaccactcttccaactcctgaaggaagctgctgtgcccgttgactctgacacctttcgagtcgccagtttgcaaagccgctcaacaaagccaggaatgctgagaagggccgcttgattgatttcagctgcagaaggccccaaactcaagctcttcttctgttgagcatttttggcaagaagcgtgtgcttgtcatcattccctgtatccatctctgaaatggtgacagccagaatccggcagaaattagcgagctgctgctgatcgaaattggatactaaggaactcagattggggacttcatctagtcggatcatttcctttttaacacccaaaa

SEQ ID NO: 47166 - DNA, 907 bp, Homo sapiens
ggccaggaagtctgggatgagaacacgggatgttattattattggaatacacaagcaaatgaagtggcttgggagttaccccaatatcttgccacacaggtacagggattacagcattaccagcccagttctgtgccaggtgctgaaactagttttgtggtaaatacagacatatattctaaggagaaaacgatttctgtttccagtagtaaaagtggaccagtcatagccaagcgagaagttaaaaaggaagtaaatgaaggaattcaggctctctcaaatagtgaggaggagaagaaaggggtggcagcatcgctgcttgctcctttattgcctgagggaataaaagaagaagaagagagatggagaagaaaagtaatttgtaaagaggagccagtttcagaagtaaaagaaacaagtacaacagtagaagaagcaacaacaatagtaaagccacaggaaattatgttggacaatatagaagacccttctcaggaggatctttgcagtgttgtccaatctggagaaagtgaggaggaagaggaacaagatacccttgaactggagctagttttggaaaggaaaaaagcagagttgcgagccttggaggaaggagatggtagtgtgtcagggtctagtccacgttctgatatcagccagccagcatctcaagatggaatgcgtaggcttatgtctaaaagaggaaaatggaagatgtttgttcgagctaccagtccagaatctaccagtaggagttctagtaaaactggacgagatactccagaaaatggagaaactgcaattggtgctgaaaattcagaaaaaatagatgagaattcagataaagagatggaagtagaagaatctccagagaaaataaaagtacagacaacaccaaaagtagaag

SEQ ID NO: 47167 - DNA, 1609 bp, Homo sapiens
gagatatccgcgccaggaagagagcaacgaggaaaggagagggactctggcgtcccggcaggcgagaggcgaggctgagcgaaagaaggaaggacagacggacctgtctgtcagagttcggagaacactggcctctcagcccctgagacacaggcctcagttagggacgctcgggcgccccaaatctcatcagttttattgccctgctcgattatatagaaaaatacaaaaaatctgcattaaaaatattaatcctgcatgctggacatgtatggtaataatttctattttgtaccattttcttgtttaactttagcatgttgttgatcatggatcatactccccttgtttctttgggtgagaagggatcgcagtttggaaactccggcggctgcgtgcggggtttcagtcccagctgtaggcttgtaaatacccgccccgccaaaccgcatagagaacgtggcagcaagctgagggtctttgtttgggtttattattacggtatttttgtttgtaagttaaaaagaaaaaaaaaaagaaaaagttccgggcattttgcatcagaaaacaactttgtcttggggcacacttggaagttgcatgttttctttccttcccttatccccattcggtcctctttttcctctctcgctttagttttcaaccttgttggtgctgagagagagaaccgagaggtcccagtacaagggcagggcagggcagggaagctgccaagctccgcaccccagaggagtgttctggactacagccttgtcttatggtcaaattgatacccttaataagaaaggaaaggaaaggaaaacagatcctcccctctgctttttattgtaaccagaatcaccctgaggtcccttctgaaccctctgggcctgcgctaattgtaggagccacagcgctcctagggtgagaggcttagccatccctgaccctggcagtgcactggtaagcagacactgcactgaaccaactgctatgctcagaatgtaccagaaacccaaacattggcaagtaattttgcaactttcaagtgcgttctttagaccaatgcattgcgtttctttccctgcttttgagatagtaggaagagttcttggtggtgtccccccccttcaattcttcagttgtatagtagttatagggaagatatgggtgtttttctttattattacttttttttttctgcaggtcagtaaaaggatttaagttgcactgacaaaaataccaaaataaaagtgtatttttaagttcccatttgaaattgctggcgctgctggccggatgcatttttgagtttgtattagttgataaattaacagtaataacaagattgtatgaaccgcatggtgcttgcagttttaaatattgtggatatttgtcctgcatcagaaacgagctttggtttttacagattcaactgtgttgaaatcaaacctgccgcaacagaaattgtttttatttcatgtaaaataagggatcaatttcaaaccctgcttatgatatgaaaatattaaaacctagtctattgtagttttattcagactggtttctgttttttggttattaaaatggtttcctattttgcttatta

SEQ ID NO: 47168 - DNA, 712 bp, Homo sapiens
  misc_feature (1)...(712): n = a,t,c or g
gacaccagtggcatatcacggccatggggtctcagcattccgctgctgctcgcccctcctcctgcaggcgaaagcaagaagatgacagggacggtttgctggctgaacgagagcaggaagaagccattgctcagttcccatatgtggaattcaccgggagagatagcatcacctgtctcacgtgccaggggacaaggctacaattccaacagagcaagtaaatgaagttggtggctttgatcccacacagtgatcagagattgcgccctcagcgaactaagcaatatgtcctcctgtccatcctgctttgtctcctggcatctggtttggtggttttcttcctgtttccgcattcagtccttgtggatgatgacggcatcaaagtggtgaaagtcacatttaataagcaagactcccttgtaattctcaccatcatggccaccctgaaaatcaggaactccaacttctacacggtggcagtgaccagcctgtccagccagattcagtacatgaacacagtggtgaattttaccgggaaggccgagatgggaggaccgttttcctatgtgtacttcttctgcacggtacctgagatcctggtgcacaacatagtgatcttcatgcgaacttcagtgaagatttcataacattggcctcatgaccccagagcttccttgggagacacatcactatgtnggattgtgggaggaaa

SEQ ID NO: 47169 - DNA, 288 bp, Homo sapiens
tgtaatttaacttaccacatctttatatattgtctttttaactcttctacagttatctcaaaaagaaagttttagtataatatcttataagtagtagaagtcattaataattttttgattgatttagccaggaatcctgagttctggcttctggctcccaatcaatagtaaatcatgtagactttatctgcctccgtttccttacctgtcacataatactctttcctctccaccttctacactgctaggagagagaaattaggtcttaattataatgctactttgaga

SEQ ID NO: 47170 - DNA, 1472 bp, Homo sapiens
ttttttttttaaaaaagggtcctatgtggaaatgagtgggacaatgataaaaataaacaaataattaaaattccaaatcaaaacataactcctggccctgagatccccagttaatcctctaagaccacaatctccacattgtgaacttgatgctggtgttcttccatctcagccacaactttctcctcagtcctcagctctgtctccaagatgactgctttgccctcagtatcttcagcttctgggtccggggctggatcaatctcaatgatggtctgcccatcctctgaggtgctttcaacagcctgaattgccgaggttaggccggactccatggccaccaattccacagggctaaccatggtggtcatgttgcccagtgtactcccatcctgcatggcagtagagctcagcagcgccaagctagatgaagggtggatggtcactgtgtctggtgagctgctcttggcagaggagaccactgtggcatagcggaagagctgagggccagaaggcagtgtgtggacagtcacaggactggagccctggctgagggtggccactggaatattgcccatggaaaatgactgacccactggggtgatggtgatgggtgagatgactgtgaactgaggctgctggacaggaggagaagggctcaagacagtggtggaggctggccgctggagccggggcctttttggaggcttaggagtgctcacaggcatcagtaccacattttgaactgtctgagatttcagcctgtgatcctggccttgcttcttctgctcctccaactggcgttccaagtctgtcagagtatagagaaactgttcttctccctgctctacttggttccttctgttgtctaaaaccttcttgactgtgtccattaggccaaatgtgtgtgctacattgttgagaacagcagcatctgtgacttggaagggagcctggatgagccgctgctgaactcccctgagtagctcctctatttccttctgtatattgcagacaacctcttccatcagccctacatcagctattcctttccagaacatcaaagtgtcctctgaaatttcctctgagtctttctttacaccctcctccgtggccatggtgacagcagcggtgagagctgagttccattccagccctgcctcttccatgctctcttctgagatggcaatctgcgtgatgctaccatcagccgaagtgggtgtctgcaccacacttgtctgctgtcctggcactggagctcttgcactgctgatcagaagatcaaatttggtgcttctgcaggtattggagcaaactttgtcatgttggtaaaaatcaatctgtccggagtccatcattttcctgagcatgatcccacccagacgaatagctctcttccagtccttcagagtggacttgccagccagatgaacaaagtgcttggggctgatcaactgatcattgaacttgac

SEQ ID NO: 47171 - DNA, 2110 bp, Homo sapiens
  misc_feature (1)...(2110): n = a,t,c or g
gcaattccgttacatacagtagttttttttcccaaagctatttttttttagtatcgttaatataaagcagttgcacaaaaagcaaaggtgttttgacaaacaggtgtatgcatttattcctttttaggaacaatatctaaaaaaagaaccgccctctgccctcccccaaaaaagacaaagattcacacagacacatcgggatatatgtacaacgtaataaaccccatcctaaagaagcaactgggataacccccaggggatacagaatcagaattgtaaaaatcatagtgaagtttgcttgctgtaaagcctgagaatttttttttcagttggttcttctgcaaggctgtgatacctgcaaagatatgtaaaatctaatttttctttttttttttttttttgctacagtctttagactaagcatgcaagacatacgactaagtgcaactgagtgaaatgttttttttttaaattttaatcattccctaaaggtttgaactgaggtatgcgtactaacagtttctcatgctgttatctttactcatgtctagctacacatgctgagaatgaactaatctaccagatttttatcctcttttgaataccaaactaaccagcaaccactcagtttagaagcacagggcccccttcccatgaccctgtctggctactgcatgcacatcatgaagctgcctggaaaagtttttttttnttttnttttttttttttaaagtcttgcgtgaccacagactgccctttatacagaaagcagagtgaagcttcaaaagtaactgccagagaagtttttgtaccaagcttatgagtggatgggagtgttacttttctttaaatgaaaaatgctgaccaaagcctaatcggaaaaaaaggaaaaattaaaaataaaaacaaactgaaggatatatgccaagataaaccaaaattaatacagtgatcacagcacagttcttaaacaaaagtggcatacaatctaaaaatatctctttttctagaaatactattatgtaatctagttcaattatggaagcttttctgtcctgactctaaactgtctcctttattggatactctaattgcagtggcatacattcattttttttttgagatgggactcccttccttctgtagctcctttaatattgtgtcctatttttatctgcagtagccccataaaatctctttaagagaatgagttttggtctctgtagaggtacacaaaaagaaaaaggaaaaataactactagaaaaaagtaacaactttggttccattatctacttggtcttctaaatttacgatgaaggagcagttctctttctcaggttgcaatagcctatcgcttgtcatttgcctctaaattcttttgcctcctttgatcaacaataagaggatatttggcttcatcagataaagcataaaacagagaacataatttacctttgtgtaatatctttggtaattttagaaaaaaggtacaaagaaagaatataaattaagcttcgaaaggctctcgaactaaaaaaaactacagtcctatataaataaatgacaggaaagtgggtgcagagctgaagtgtggaggggttctaaggactgaggttgtactgacctgtaaccatcacatttctgcataccatgtttgggacccccccaaagcccagggcctacatgatatcttctatgagtttttgtgatactgggttggtgatataatattgcataacaaactgcagtaccaaatttgcatatttgaaattaacactttagcatttgctgaactcagccctcgttaactcccttaacaagttcaatctgaaatcgaatttgcattcaaacagtttaatgccaccaagtaggtctgaactaatgtataaactcagcgccgccgccgccacccctactttcagggcagctgctcggggaagcccggtttttttttttggccattttgcaaacaaaaccaacccacacccgttatcgcagagcacccaagcccatggcaacttggttccacaagggagagccttccaaggccatattgtcagtctaattaatatgagcttttttttttttttcagtgctgcctatgtttcc

SEQ ID NO: 47172 - DNA, 3884 bp, Homo sapiens
atcttatttttctttttggtggtggtggtggaaggggggaggtgctagcagggccagccttgaactcgctggacagagctacagacctatggggcctggaagtgcccgctgagaaagggagaagacagcagaggggttgccgaggcaacctccaagtcccagatcatgtctctgtggggtctggtctccaagatgcccccagaaaaagtgcagcggctctatgtcgactttccccaacacctgcggcatcttctgggtgactggctggagagccagccctgggagttcctggtcggctccgacgccttctgctgcaacttggctagtgccctactttcagacactgtccagcaccttcaggcctcggtgggagagcagggggaggggagcaccatcttgcaacacatcagcacccttgagagcatatatcagagggaccccctgaagctggtggccactttcagacaaatacttcaaggagagaaaaaagctgttatggaacagttccgccacttgccaatgcctttccactggaagcaggaagaactcaagtttaagacaggcttgcggaggctgcagcaccgagtaggggagatccaccttctccgagaagccctgcagaagggggctgaggctggccaagtgtctctgcacagcttgatagaaactcctgctaatgggactgggccaagtgaggccctggccatgctactgcaggagaccactggagagctagaggcagccaaagccctagtgctgaagaggatccagatttggaaacggcagcagcagctggcagggaatggcgcaccgtttgaggagagcctggccccactccaggagaggtgtgaaagcctggtggacatttattcccagctacagcaggaggtaggggcggctggtggggagcttgagcccaagacccgggcatcgctgactggccggctggatgaagtcctgagaaccctcgtcaccagttgcttcctggtggagaagcagcccccccaggtactgaagactcagaccaagttccaggctggagttcgattcctgttgggcttgaggttcctgggggccccagccaagcctccgctggtcagggccgacatggtgacagagaagcaggcgcgggagctgagtgtgcctcagggtcctggggctggagcagaaagcactggagaaatcatcaacaacactgtgcccttggagaacagcattcctgggaactgctgctctgccctgttcaagaacctgcttctcaagaagatcaagcggtgtgagcggaagggcactgagtctgtcacagaggagaagtgcgctgtgctcttctctgccagcttcacacttggccccggcaaactccccatccagctccaggccctgtctctgcccctggtggtcatcgtccatggcaaccaagacaacaatgccaaagccactatcctgtgggacaatgccttctctgagatggaccgcgtgccctttgtggtggctgagcgggtgccctgggagaagatgtgtgaaactctgaacctgaagttcatggctgaggtggggaccaaccgggggctgctcccagagcacttcctcttcctggcccagaagatcttcaatgacaacagcctcagtatggaggccttccagcaccgttctgtgtcctggtcgcagttcaacaaggagatcctgctgggccgtggcttcaccttttggcagtggtttgatggtgtcctggacctcaccaaacgctgtctccggagctactggtctgaccggctgatcattggcttcatcagcaaacagtacgttactagccttcttctcaatgagcccgacggaacctttctcctccgcttcagcgactcagagattgggggcatcaccattgcccatgtcatccggggccaggatggctctccacagatagagaacatccagccattctctgccaaagacctgtccattcgctcactgggggaccgaatccgggatcttgctcagctcaaaaatctctatcccaagaagcccaaggatgaggctttccggagccactacaagcctgaacagatgggtaaggatggcaggggttatgtcccagctaccatcaagatgaccgtggaaagggaccaaccacttcctaccccagagctccagatgcctaccatggtgccttcttatgaccttggaatggcccctgattcctccatgagcatgcagcttggcccagatatggtgccccaggtgtacccaccacactctcactccatccccccgtatcaaggcctctccccagaagaatcagtcaacgtgttgtcagccttccaggagcctcacctgcagatgccccccagcctgggccagatgagcctgccctttgaccagcctcacccccagggcctgctgccgtgccagcctcaggagcatgctgtgtccagccctgaccccctgctctgctcagatgtgaccatggtgggaagacagctgcctgagccagccagtgacagcgtttcctcagggcacttgggattgggtgaagacatattccctcctctgctgcctcccactgaacaggacctcactaagcttctcctggaggggcaaggggagtcggggggagggtccttgggggcacagcccctcctgcagccctcccactatgggcaatctgggatctcaatgtcccacatggacctaagggccaaccccagttggtgatcccagctggagggagaacccaaagagacagctcttctactacccccacagacctgctctggacacttgctcatgccctgccaagcagcagatggggagggtgccctcctatccccacctactcctgggtcaggagggaaaagactaacaggagaatgcacagtgggtggagccaatccactccttcctttctatcattcccctgcccacctccttccagcactgactggaagggaagttcaggctctgagacacaccccaacatgcctgcacctgcagcgcgcacacgcacgcacacacacatacagagctctctgagggtgatggggctgagcaggaggggggctgggtaagagcacaggttagggcatggaaggcttctccgcccattctgacccagggcctaggacggataggcaggaacatacagacacatttacactagaggccagggatagaggatattgggtctcagccctaggggaatgggaagcagctcaagggaccctgggtgggagcataggaggggtctggacatgtggttactagtacaggttttgccctgattaaaaaatctcccaaagccccaaattcctgttagccaggtggaggcttctgatacgtgtatgagactatgcaaaagtacaagggctgagattcttcgtgtatagctgtgtgaacgtgtatgtacctaggatatgttaaatgtatagctggcaccttagttgcatgaccacatagaacatgtgtctatctgcttttgcctacgtgacaacacaaatttgggagggtgagacactgcacagaagacagcagcaagtgtgctggcctctctgacatatgctaaccccccaaatactctgaatttggagtctgactgtgcccaagtgggtccaagtggctgtgacatctacgtatggctccacacctccaatgctgcctgggagcccagggtgagagtctgggtccaggcctggccatgtggccctccagtgtatgagagggccctgcctgctgcatcttttctgttgccccatccaccgccagcttcccttcactcccctatcccattctccctctcaaggcaggggtcatagatcctaagccataaaataaattttattccaaaataacaaaataaataatctactgtacacaatctgaaaaaaaaa

SEQ ID NO: 47173 - DNA, 610 bp, Homo sapiens
  misc_feature (1)...(610): n = a,t,c or g
caaaaacagaaatggacagcaggacaaagagcaaggattactgcaaagtaatatttccatatgaggcacagaatgatgatgaattgacaatcaaagaaggagatatagtcactctcatcaataaggactgcatcgacgtaggctggtgggaaggagagctgaacggcagacgaggcgtgttccccgataacttcgtgaagttacttccaccggactttgaaaaggaagggaatagacccaagaagccaccgcctccatccgctcctgtcatcaaacaaggggcaggcacctctgagagaaaacatgaaattaaaaagatacctcctgaaagaccagaaatgcttccaaacagaacagaagaaaaagaaagaccagagagagagccaaaactggatttacagaagccctccgtcctgccataccgccaaaaaagcctcggccacctaagaccaattntttcagcagacctggcgcactgcccccgagaaggccggagagaccggtgggtccgctgacacacaccaggggtgacagtccaaagattgatttggccggcagttcgctatctggcatcctggacaaagatctctcggaccgcagcaatgacatt

SEQ ID NO: 47174 - DNA, 375 bp, Homo sapiens
caaggctgtaggagttctggagctgctggctggagaggagggtggacgaagctctctctagaaagacatcctgagaggacttggcaggcctgaatatgcattggctgcgaaaagttcagggactttgcaccctgtggggtactcagatgtccagccgcactctctacattaatagtaggcaactggtgtccctgcagtggggccaccaggaagtgccggccaagtttaactttgctagtgatgtgttggatcactgggctgacatggagaaggctggcaagcgactcccaagcccagcccctgtggtgggtgaatgggaaggggaaggaattaatgtggaatttcagagaactgagtgaaaacagccagcaggct

SEQ ID NO: 47175 - DNA, 2464 bp, Homo sapiens
  misc_feature (1)...(2464): n = a,t,c or g
ttttttttttttttttcattcttaaagagatttaattatttgaagtgcataaaaggggagggtacatttaaacctctgctatatcacaaactgctgtttttgttgttgttttattaaagacccaccagttttactcatcttcaggtttatggctatagaatgtggggaaaacaaaaattggcaacagaataggaaaaggtaagcaaaagtctggtcaccagaatgtcttctccactgcagaacagacccctttaaaaaagaaaagcaaggaaaatagctatgggctatccacagccagtaatgatagctacagttagaaagaaatgagaaaggaaaccaggaggcagagtctgggaattcacaagtctcctctcaagacatatactaaacccggacctctgtgaggattaattttccttagatttccttccaacgtcttaaccctaaaccaagttcccctgtcaattcaaatataataaaggcagcattccacaaggaagactgatttgaggattgaagtgatttgccaacattctgagaaagcttattttaaaagagcacggctttaaagataggttctagtccttgaagacagaggggttctttgttagtgagggctgtaggcatatggcccaccaaacagagcaggacacaaaagaagaatcccctaatgttgtttgcaggctaacatccactgctactgcaacctggttgggcagaggcaaaagcaagcagccccttctggctgtgcaaccagtagaggggcagaagaagctgtgctctaatggctctaaataatcagcatttagtgttatgttaggacgaaggatttattccacaatataaactgtaacatttgatacaagctaccaaaaaataggggagaaaggaagggacagggagaaagccaaaatacagctgtggcaattacttacagagaagtctcttttctacatcactagttcatcagtgacactagaaactagacatttgtgttctgtacatcaatcaatcgctaaagcaccaacacactgtttggaagtttgttttgttttgttttaattccagccactgaaaccaacatagaagttattgctcagataaataaacctagtctaccaggaagaagaaaagtggataaaggaaaagaagaaacaaacaaaaactcccaaagtgaaaaacttaaaaatttccccaatgtggtaacagagtaaacaagggagagcttcctcaaatgaggatttactggaatttctggtgggtgcccttttgggcactggaagtgagttggactcttaagctggtaaatcccagagagaggtaaaattttaatgctgtacatgaaaaggtgcaagcttcaatgccttccaaattggtgggaacccctgcaaaaaaaaacagtcagcttttcaaacctcaacaaccacaaatagctcttaaggaaaaaatacaaaaagtgtcaaaaatttttttagttgttttttcttttcttcaaagagtcctggaaaaatgatcccataaggaatagaaatagcaccgtttacaggctggcttgagtaccagtcctgtagctttgctgagatttgaagaaatcctcttggttggagtcctgaattacattaagtaggggggtatctgtttttgtgtttttactttcggcttggtgcgtccttcacagtacagcgcacacagatgtagtcttctttctctgccatctctggggagacaccaacacagacctgatgaaaccactgattgcagctgccatcacactggacccagtccacctcatctccttctggctgcagggcagctcacagctgggcagatggcatcttcatcctcagagtcttcctgttcggaataggatgtgtctgagggcagggaatgagtttcagcagaacgaactaattgnatagctacgctctctctctaacttgaaattgttcatgtccttggggtggctcagtttgattttcttctttttgggggtccgcattttcttaactcgttcccaccgctcactggagaggccctctctttccaggcgtctcttcagttttctctcaagactgttaattccatctcgcttccctcggcaacagtcattcttctcactgctgggtctcactggtgagcttcggtcagtctgctgagcagggcttggctttgcaagtaaagtctggtaaagttcctgaatttcaggaagggatacctggagcagctgggcttccatcaatagttcattcacttctggactaacaccatggagggggatacaacttcgtccagttgagaagggggagtgcaaatatgaggttctgttgtcccagtcatcaggcaaagaaaatgatgttgtgccaggaggttgagataccttgtttgtgtctgacacctgtcctgctgaggcttgccatctgctatataacagtcctgagcccactcgatcttgcacaaatttaag

SEQ ID NO: 47176 - DNA, 430 bp, Homo sapiens
gacatcattacgaatttaatacgactcactatagggaatttggccctcgaggccaagaattcggcacgagctttttcacatgtatatgagttagcaaaaatcatacacctctgatggtaaccaggaaggaaaacagcaatcggaactgtttatctgtgtagtcacttgaacacagctttgatttaagatcctcctctcgttttcatacgtagcctgttttgggccaaaatgttcagaataagctatcatttgctaagtgaatttgagttctgctggagatttattttaaatgcggtccaagattcaaagagtctgcttcctcagggaacaagcagaacccttggtacaaaagcctgtatttaattgccctggaaagtatgctctctggtcttcagctgcacggcactactgtctgggtcgatgggaagtg

SEQ ID NO: 47177 - DNA, 2759 bp, Homo sapiens
atggcctcggaagacattgccaagctggcagagacacttgccaagactcaggtggccgggggacagctgagtttcaaaggcaagagcctcaaactcaacactgcagaagatgctaaagatgtgattaaagagattgaagactttgacagcttggaggctctgcgtctggaaggcaacacagtgggcgtggaagcagccagggtcatcgccaaggccttagagaagaagtcggagttgaagcgctgccactggagtgacatgttcacgggaaggctgcggaccgagatcccaccagccctgatctcactaggggaaggactcatcacagctggggctcagctggtggagctggacttaagcgacaacgcattcgggcccgacggtgtgcaaggcttcgaggccctgctcaagagctcagcctgcttcaccctgcaggaactcaagctcaacaactgtggcatgggcattggcggcggcaagatcctggctgcagctctgaccgaatgtcaccggaaatccagtgcccaaggcaagcctctggccctgaaggtctttgtggctggcagaaaccgtctggagaatgatggcgccactgccttggcagaagcttttagggtcatcgggaccctggaggaggtccacatgccacagaatgggatcaaccaccctggcatcactgccctggcccaggctttcgctgtcaaccccctgctgcgggtcatcaacctgaatgacaacaccttcactgagaagggcgccgtggccatggccgagaccttgaagaccttgcggcaggtggaggtgattaattttggggactgcctggtgcgctccaagggtgcagttgccattgcagatgccatccgcggcggcctgcccaagctaaaggagctgaacttgtcattctgtgaaatcaagagggatgctgccctggctgttgctgaggccatggcagacaaagctgagctggagaagctggacctgaatggcaacaccctgggagaagaaggctgtgaacagcttcaggaggtgctggagggcttcaacatggccaaggtgctggcgtccctcagtgatgacgaggacgaggaggaggaggaggaaggagaagaggaagaagaggaagcagaagaagaggaggaggaagatgaggaagaggaggaagaagaggaggaggaggaggaagaagagcctcagcagcgagggcagggagagaagtcagccacgccctcacggaagattctggaccctaacactggggagccagctcccgtgctgtcctccccacctcctgcagacgtctccaccttcctggcttttccctctccagagaagctcctgcgcctagggcccaagagctccgtgctgatagcccagcagactgacacgtctgaccccgagaaggtggtctctgccttcctaaaggtgtcatctgtgttcaaggacgaagctactgtgaggatggcagtgcaggatgcagtagatgccctgatgcagaaggctttcaactcctcgtccttcaactccaacaccttcctcaccaggctcctcgtgcacatgggtctgctcaagagtgaagacaaggtcaaggccattgccaacctgtacggccccctgatggcgctgaaccacatggtgcagcaggactatttccccaaggcccttgcacccctgctgctggcgttcgtgaccaagcccaacagcgccctggaatcctgctccttcgcccgccacagtctgctgcagacgctgtacaaggtctagactcaaagcctctcccatcccttggcctggaccagtgagctggggagggactcggatgaactgaggcgcagcctacgccattgccttggacaggactctggccacaggcagggcgggtctgtgtcccatgtgtcctgtcagtcccctgagtatgtgtgtgggtgtggcgcatgtgcaggtctgtgcctcctgtcgggatttgggttttaacgtcttctgctggcccagccctgctctgttgtggggagttggcccccaggggaaagggctgtgagcctgctccgccattaaactcacctccacctgagggcgctctgctgatctccgcctgggccctgatggccgtccccacccacctgccttccggcccggctccctgggcggagccagaacccagggagttgcccgcgtgctgtccttcccctctgtgttgtgattgggttgtttcctgccctgcctggggctgcttctcgtcaccaagccctggtcctgcggcagctgtcacccctaccatccataccactgtgctgaccgctcagcctgaagagcagagaatgccatgggtgggactgtgggggtcggatcgtggggttgttggcagagggcaaccctgggccccacaccgtgtggacaggcagacaccagattgtccaggagcaggagctgctgggactgcgctggccccggacctagtgggccttctcctggctgctgagatgtcgtctgtgactggcctggctggagggggagtgttgacaacccaaagctgttctccagtctggggagggagaggcagggtccccaatgtccgagctgcatctggacgctgctcttaaaggacctcctggggcaggggagcggtagggtctggactgggcagatgctgtatgacctccctgagcacccgtgactgccccatgctttcccctttgtgctctgtgtgtgtctgggctgtgcccgggggcttcacaaataaagtcgtgtggcagcttcaa

SEQ ID NO: 47178 - DNA, 1499 bp, Homo sapiens
gcatctcttcagggaagagagaagcaatgggcatgttagtatacaatgatcacagccacgcaggcctgcaagctgccttttggacaggctgttgactgccgttccaattagctgattggagaatgtggaatgcagagtgataatgctgcatatctgctatcaggcagcagcaaaggtttttgtcttgggaaggcaagctttccctgcaatattatctcagcagctccctagctgcttaccctgaaaacgagggatccaaacggagggtgttgcactctgctaacgctggtcctgtgcgtggctgtggcatatgagcggcaggtctgaaaaagcaggtgtgtgctgggacgggcactggactggaacgcaggcggacgctctcgggtttacctgcttcctgttaacagattgtgggctcccagggcatatgtctgcacgctgaggccgaggcggagaaggggcttcctgagcgtcccagtacactgacagagacacttggattggacttaatcttaaacctctggagttcaagaccttttaaaaagggctaaataaacaatctctacatgtaaaaggccactgactcctacttcctctgtatagagcaactgttgaactcagctgcctgtaggaaaactgaagactttaataacaaactctccaaggtgaaaatgaacacagatagcggtgggtgtgctcgcaaacgtgccgccatgtctgttacgctaacatctgtgaagagagtgcaaagttctccaaacctattggctgcagggcgtgattctcagtcaccagactcagcaaaaggttttagaagcgttcgaccaaacctacaagataaaagatcaccaactcagagccagataacagtgaatggaaactcaggaggtgccgtgagtcccatgagttactatcagaggccgttttccccctcggcatattctctcccagcctcactcaactccagcattgtcatgcagcacggcacatccctcggtaagtaatttactcaccgtgatttccatggcaacctcaatgcggcaagtacaaccacaggagaaagatatgcggcatcaaggtgaggcgggagcgctcagcactcatgaccctatccccagggagaaactggggcagaggacccaacatgggaggaaatgggcaccatgctatccaagacatgtctccacctgtgtctgagcctggtgtgggcacttagatgtctaggtggtgagtagaagagaaaaaaaaaagtgttattacggcgcagctattctttatggggttaatagctgccggcgcgttaaactgtctggaacttggttcaatatgctgggaatcgtttgcgggtttcgggccgccgtcttccaatccggatggttggccctcctgggttgagggttttggcagatgcccggttgtctcttcggggctcgaaagctggtttttcccaatgggcgtgccagtttgcgtttgttaaaattttgtggaaaaaaagcgta

SEQ ID NO: 47179 - DNA, 330 bp, Homo sapiens; identical to SEQ ID NO: 19512

SEQ ID NO: 47180 - DNA, 1104 bp, Homo sapiens
ctgttcttcatatacaaaaaagaatgtgtgaaatttttaaaatgtacattgcaaaagacgattattctactcaaaatttatttggtaagattttattaagactctaagttcaaacacccttcttgggaaaagctctacaggataaccacacatgctcaactacggggccagctgctgcagctgtgggaccccatcctgtggaagaggagagaggcactaaaaagatgaggtagccaggcctgtgcccacactacgagacctgcatcaccatggtgtgaggagcagcaacgtgggtcaactcggggctgggacgagatggaagagtaaaaggcctttcttcataggcctgcctattttatgaccaccagggtagacttttgtaattaaattaaggtccacatgactttagaaagacaaactaaaaaaccccaaccaaacgagtcctagctgtagctaactctgatttctgtaaattggatctgactttttctgcttacattcacttaaaatctcaaagactcaatgggtgtgaagtgctaacaccttgcggcaaaatctcaaattcatctgtgcccaggccctctgcacagcagggctcagcagggcaggccagggctctggtccctggtcccttgctgggggaggtgttccatccggccagcgcccggccatgcagccacgtgactcaagcacgggaagtgcaggggcccagacacatccaggctaaagggcagtgactaggggagggctgaccccaagctgaacagggttctaaccaaacgctcaggagctcccaggtgacagcaaccacgccaccatgaacacaccactgggtctgtactggaatttgggggcctcaaggcttccaggtggcagcataaacagggaggtggggcaggataggaatgcccccctctgaggctcggcagccgggtggaatgaaccactccctctcattcagtgacagcacaggcaccctcctcattctgggctacccagatcttccagccctgtccctccaccccacctctcttagcctaagcagcactgagggcctggagtggtctctgtccaccccacccccacatgcggggagccttcccc

SEQ ID NO: 47181 - DNA, 1366 bp, Homo sapiens
  misc_feature (1)...(1366): n = a,t,c or g
gccttaaagtaatatgaaaggttttatatgtatattaaaatgtttgtaccttttaaatctgtaaaggttatctggaatttttactgtgttaacttcagaattatatgggcattatgactttttccattgtacaaaaaattattcataaatgttagaatacagatgttccttgacttacaatagggttatgttccagtagacccattgtaaattgaaaataccgtaagttgaaaatacatttaatacgcctaacctactgaacatcccagcttagcctagcctatcttaaatgtgttctgaacacttaacgttggcctttagctgggcaaaatcatctaatacaaaacctattttataatgaagtgtttaatatctcaaataagagtattgtaccacatatcgttatcccaggataatatcagagtacaaaatttgaagtacagtttttaactgaatgtgtattgcttttgccccattataaagttgaaaaaccataagtcaaaccattgttaagtcggactgtttgtgttacatatatttgggattttttagtggccctttttaaaaagctgtttcttatttctgatcattgtgagtggggatagatgtgggaagnnnnnnnnnnnnnnnnnnnnnnnnnnnnnnnnnnnnnnnnnnnnnnnnnnnnnnnnnnnnnnnnnnnnnnnnnnnnnnnnnnnnnnnnnnnnnnnnnnnnnnnnnnnnnnnnngnnnnnnnnnnnnnnnnnnnnnnnnnnnnnnnnnnnnnnnnnnnnnnnnnnnnnnnnnnnnnnnnnnnnngantgancgaatgaatgtactatgagctgatactgggatttcaggtaccgcagtttgtgctgaatgatatgtttggggtaaatcagtttttttcttatagaatttcggcgtttttgctgcaactgccactaattttgcatttaaaagaacaaaagaggaatgtatttttcaaaggagtgaatgaggttaaaatcaagattttgaatggtataaatatgcaactaattcagttgtaggatattattaaattttttattgctaaatatgtttctttcatacgttgcagtgcttacagttccaacagctttccaagaaaacatttccatatttgtgttatttgtaaagtatacataaataatgtaaaataatttgggattatttcaactttacattgtatgtctgaatttcatcgatgttgtacctgggctcagtcaatagttgtcacaggtattaagccattttgggaatttgccacttttttctggggtaacctgttttagtttagtttacaggcatttaggaaacagaagggtaactttataggaggtaacaccaatatcctagtctg

SEQ ID NO: 47182 - DNA, 310 bp, Homo sapiens
  misc_feature (1)...(310): n = a,t,c or g
cctaatttctcttaccctgtaaatttctgtgtgggtgtgtgtgtgtgtgtgtgtgtgtgtgtgtgagagagagagagagatagatacagggaaagagtgagtttaccanatntattatataggaaggtttgncgtatcntntnccatctctcaattctnaagtccccattttcatccntgggaganntttctaggatagggtanctnatggnncntattaanttttantnntggaattntctaattgtngntngtggttacctgaanaactntctcntaaaaanggnccngtntantgnnatataatgtg

SEQ ID NO: 47183 - DNA, 1478 bp, Homo sapiens
  misc_feature (1)...(1478): n = a,t,c or g
ctacccagaatgctcagattatagctgctgttaccttttattgagtacccacaatgtgctaggcaactgtgctagatacttttacataatctcatttannnnnnnnnnnnnnnnnnnnnnnnnnnnnnnnnntttgctccattttacaaatggagaaatcgaggcacaaaagattaaacatcttaccaaagtctgcacagccacttatatgctggagctagaatttgaacccaggtgtgcctccactttttaatactagaccaatcttttcacgggggaagtttcctagattaacaccctcacatcttttaagaccattccaaaacctgcgttctgttttgcaggaaggcgctcactgtgtttctgctgccctgaaacagtggaggcagacaaaggtgagtgccaagtgaggaaccataagaagtggtagatctctgtggagtgccataagaaccctcaagagccttaacaaaggtagttgggggagaggggaagaggtgtttcagcagctctgctcccagcagccatttcctctctccagggcaaaggggtggggctgcgaggccagctgaccaagaaacccctccagctcctccagtccaagtccagcatctttcctacaactattctgccgttccacttcgtcttcttccttgcctcactctatgtcatggttacccttaccaactggttcaggtaagatggagtgggccttagatactctcctgaagagctagctattttaaggaaagagcaattcaaggccattccagacacacatgggtctgccattatatttggtgaggaggtagaacaggtctaaaagctaaggcccttcatattctctaaccagagcctttggttacacagctatgagggagcagaactggaaaagaccttcatcaagggtagctgggccaccttctgggtcaaggttgcctcatgctgggcctgcgtactcctctatctggggctgttactggcaccactctgttggccccccacccagaaaccccagccccttatcttgaggcgccgccgccaccgcatcatatccccagataacaaatatcctccagtgtaagtccttttcacaaactggggttcccctgacattgtactcctagagttggctcaaggggagctgtccagcccagctcaatccctcaaggacacccagggagttatctccgtttgggctgaagtcaatactatgaactggaagaagtggtcaaacacagtctaatgtgctgggcagagtgtctgactcactggagctactgttacatctgcatcccagctcaagagcctaacacccaaatcagcagctcaaagaaccaccgctgatcccagcagacagtgtgcaccagccctttcctggctcttgggcttcttatatccgtgtnccagggctgaactccttattttcctttctccanaggcagagccgagtcttcagtccctgttggtctttcccc

SEQ ID NO: 47184 - DNA, 662 bp, Homo sapiens
gtctaatgaaaaggcactcgggagctatttctgaacggacctgggcttgtcggaccagtgagcggcggcggctgcgcggcggcagcggcagaaagcgtagctgcctttgctgtagtccacgccccctttgccgctccgggtgacagtctctgcggaaagtcacgtttgtgatttcgggagagcacagaacgggacgacggcgctcttgctgggtcatctgggccaggtgacgaagaaacagtttcctggtgaagcagtccctcacccctagtcagcccacacccctagggcctaaagatgctgaggtctgtatggaattttctgaaacgccacaaaaagaaatgcatcttcctgggcacggtccttggaggagtatatattctggggaaatatggacagaagaaaatcagagaaatacaggaaagggaggctgcagaatacattgcccaagcacgacgacaatatcattttgaaagtaaccagaggacttgcaatatgacagtgctgtccatgcttccaacactgagagaggccttaatgcagcaactgaattccgagagcctcacagctctgctaaaaaacaggccttcaaacaagctagaaatatgggaggatctgaagataataagtttcacaagaagtactgtggctgtatacagtac

SEQ ID NO: 47185 - DNA, 3697 bp, Homo sapiens
gaagagccgcgggttaacggcagccatcttgtttgtttgagtgaatcggaaaggaggcgccggctgtggcggcggcggggagctgctcggaagctacacctcgcaagggctcccccctttccccaccccctcccccgacccttttcccctccccgggccacccagcccgcccaactcccagcggagagcaaggttttcttctgttttcatagccagccagaacaatgttctacgcacattttgttctcagtaaaagagggcctctggccaaaatttggctagcggcccattgggataagaagctaaccaaagcccatgtgttcgagtgtaatttagagagcagcgtggagagtatcatctcaccaaaggtgaaaatggcattacggacatcaggacatctcttactgggagtagttcgaatctatcacaggaaagccaaataccttcttgcagactgtaatgaagcattcattaagataaagatggcttttcggccaggtgtggttgacctgcctgaggaaaatcgggaagcagcttataatgccattactttacctgaagaatttcatgactttgatcagccactgcctgacttagatgacatcgatggtggcccagcagttcagcttgaatcagagtagagtggaagagataaccatgagagaagaagttgggaacatcagtattttacaagaaaatgattttggtgattttggaatggatgatcgtgagataatgagagaaggcagtgcttttgaggatgacgacatgttagtaagcactactacttctaacctcctattagagtctgaacagagcaccagcaatctgaatgagaaaattaaccatttagaatatgaagatcaatataaggatgataattttggagaaggaaatgatggtggaatattagatgacaaacttattagtaataatgatggcggtatctttgatgatccccctgccctctctgaggcaggggtgatgttgccagagcagcctgcacatgacgatatggatgaggatgataatgtatcaatgggtgggcctgatagtcctgattcagtggatcccgttgaaccaatgccaaccatgactgatcaaacaacacttgttccaaatgaggaagaagcatttgcattggagcctattgatataactgttaaagaaacaaaagccaagaggaagaggaagctaattgttgacagtgtcaaagagttggatagcaagacaattagagcccaacttagtgattattcagatattgttactactttggatctggcaccgcccaccaagaaattgatgatgtggaaagagacaggaggagtagaaaaactgttttctttacctgctcagcctttgtggaataacagactactgaagctctttacacgctgtcttacaccgcttgtaccagaagaccttagaaaaaggaggaaaggaggagaggcagataatttggatgaattcctcaaagaatttgaaaatccagaggttcctagagaggaccagcaacagcagcatcagcagcgtgatgttatcgatgagcccattattgaagagccaagccgcctccaggagtcagtgatggaggccagcagaacaaacatagatgagtcagctatgcctccaccaccacctcagggagttaagcgaaaagctggacaaattgacccagagcctgtgatgcctcctcagcaggtagagcagatggaaataccacctgtagagcttcccccagaagaacctccaaatatctgtcagctaataccagagttagaacttctgccagaaaaagagaaggagaaagagaaggaaaaagaagatgatgaagaggaagaggatgaagatgcatcagggggcgatcaagatcaggaagaaagaagatggaacaaaaggactcagcagatgcttcatggtcttcagcgtgctcttgctaaaactggagctgaatctatcagtttgcttgagttatgtcgaaatacgaacagaaaacaagctgccgcaaagttctacagcttcttggttcttaaaaagcagcaagctattgagctgacacaggaagaaccgtacagtgacatcatcgcaacacctggaccaaggttccatattatataaggagctagaagcattatagctagtgtttgattcactagtgcttacaaattgcccccatgtgtaggggacacagaaccctttgagaaaacttagatttttgtctgtacaaagtctttgcctttttccttcttcatttttttccagtacattaaatttgtcaatttcatctttgagggaaactgattagatgggttgtgtttgtgttctgatggagaaaacagcaccccaaggactcagaagatgattttaacagttcagaacagatgtgtgcaatattggtgcatgtaataatgttgagtggcagtcaaaagtcatgatttttatcttagttcttcattactgcattgaaaaggaaaacctgtctgagaaaatgcctgacagtttaatttaaaactatggtgtaagtctttgacaagaaaaaaaaacaaacaaacacttctttccatcagtaacactggcaatcttcctgttaaccactctccttagggatggtatctgaaacaacaatggtcaccctcttgagattcgttttaagtgtaattccataatgagcagaggtgtacgcgaaattgtgttatgactgatagccttcagctacaaaaagataggactgacctggtttaaagtgttctattttgtaaatcattccatttgagtctttctgatgaacttggctatactgaaatctgttattttagtgaggctccaaaatgagcaaagctaggcctgattagagtagagtgactattaaaaaacataactttctaggagctataaatcaaagttttaaaaagatgtttggatatatttgagtattccgatcatgaaaacagaaattgccctgcctactacaaggacagactgatgggaaattatgcacctggtcaacttagcttttaagcagacgatgctgtaaaaactaacggcttctctgatatttattgtaagttttagtactgatctccttttccagtgctgcacactcctggtttggaactttaatagcgttgcaacgaaatcctatatccagtttcctgtaatttaattgaagaaaaatacatccaaataaagactttattattaacagaccagatagcatcagaaatcatgtgactgttatgattatcagaatatgtcttaactttttagggcaaagttaacactgaaagttctagcttaagtgttgaaacttttgtgggaaaaaaaaatcacttttgaaactcagacttcagtgtatacccaataatttaaaattatgtgaaatgttttaaatttgtgaactcgtaattactgttttaatgattcagtttcttcagagtggtaattgtataaaattgctattgcagctttatattcaatatgatgtgcctgtaaaccaaggagttttcccccgtttgtaaaaagacattgtagataattgaatgtttgattttagaaaggtcattagtttcttgttacacattttgttagtctggtttttgttgcttatcgggtttaatattgttcttgaaaatagttgatgctatgttatgtataacttttctaataaaagttgtgttataagctgtaaaaaaaa

SEQ ID NO: 47186 - DNA, 322 bp, Homo sapiens
gcagatagtgttgctatttagcaggaatggatgtattctgatccattaaattcaggttaatagaactctatatgtaaaattacccatttggaatgatcttttacctttcaccttatcctggattctaaaatgtgcaaggattgtagtcattaaatatattggccttttgcttttactgtcctaccaatcaatccatgagtttttttgtgtgtgttgttaaaaagctcattgatacaaaacatgtagcagtatacaaaacatgtagcagtatataagaagacttgagtttggagagacttaattgcttgctcttgtcttgtat

SEQ ID NO: 47187 - DNA, 1375 bp, Homo sapiens
gagtgaatatgatactaatgaagatgggtttttcagggattgtggtccatcaggagtctgtgtgtgccacctatggaagtggcttaagcagcacgtgtattgtagacgttggggaccagaagacaagtgtatgctgtgtggaggatggggtgtctcatcggaatactcggctttgtctggcatacggaggatctgatgtgtcaagatgtttttactggctaatgcagcgagctgggttcccttacagagaatgccagttaacaaataaaatggattgtcttcttctgcaacaccttaaagaaactttttgtcatttagatcaggacatctctgggcttcaggaccatgagtttcagattcgacatcctgattctcctgccctgctttaccagtttcgattaggagatgaaaaactgcaggctccaatggctttgttttaccccgcaacttttggaattgttggacagaaaatgacgactttgcagcacagatctcagggcgatcctgaggatcctcacgatgaacattacctgctggccacacagagcaaacaagaacagtctgcaaaagctactgctgaccgaaagtctgcatccaaacctattggatttgaaggggatcttcgtggccagtcctctgatcttccagaaagactccattcccaggaggtagatttggggtctgcacagggagatggcctgatggccggcaacgattccgaggaggccctcactgcactgatgtccaggaagactgccatctcgctgtttgaaggaaaagccctgggcctggataaagccatcctccatagcatagactgctgttcatctgacgacaccaaaaagaagatgtacagctccatcctagtggtgggaggtggtttgatgtttcataaagctcaagaatttctgcagcacagaattctcaacaaaatgccaccatccttcaggcgaattattgaaaatgtggatgtgatcacaaggcctaaggacatggacccccggctgattgcatggaaaggaggggcagtgttggcttgtttggatacaacacaggaactgtggatttatcagcgagagtggcagcgctttggtgtccgcatgttacgagagcgggctgcgtttgtgtggtgaatggggaggaaatgtcactgccgaagaccaaaaacaagcttcttggtataaaagactcttacagaatatgtgtattgtaatttattgatctggatgcttaagtgtcatggacagtaaatgaatttgaactttatgttgaggacatgacattggtttgaaaatataaactgcttttgagcagtttagtcagggcatttgagaataaataggaactttctcttcagttgtaaaaaaaaaaaaaa

SEQ ID NO: 47188 - DNA, 844 bp, Homo sapiens
ttttttttttttttttgcactatgaggtttaattggaaacattaaaatggttaactcataatgaattataaaactttgatagttacattgtactatcatttatgaggcatttatttttcattatttacacctgaaagaaaacttcatacttgtgtgttctgttccccatctcagagcaagattatgaagagaaggtctaaactacttatataaatcaaaacccaactgggctagaaatgaagtataaagaggaactaaatctatacacagctgtgcccataagagcattaggtggttttagctcttatctgggggtatgaaagcaattttaggctcatctcacagaaaccaaaagcaggtgctgaatcatggaaaacctcaattatttttaagcatgcctcttaatttttctttcccctgggtttcttgtcgtctgtgcttgattcttgaacaggtaaccacttgagaggatgccggcgatagatgggccatggaggaagtgtcagcaaacatgaaaaagcaaatccggccataactatatagacagtccacccgaactgttcagccacggtacccgtagataaatccaactattgcagaaaaaagaataattccctgaaacatctgttcagctagcttctggcccttgtaatccagtctgcgtgggcagcgagctcagatgcgtccagcatggctggctgaggaggcgggcagctgagcgcgggtggcaggctgcgaggcgagggcgaccgagacttaaggaccgtgagggctaaggtctggcactgcgcgtcagtagccgggccttctaagcccgggagagcgatggcggcggccccggaat

SEQ ID NO: 47189 - DNA, 904 bp, Homo sapiens
  misc_feature (1)...(904): n = a,t,c or g
tttgtctcaataatttatttattgactttattataatttcaaacatgcagacaagttaaaaatcatgtacaatataacccacatacccaccacctagatttaacaattgtaaccgtcataataataatgtagagagtaatgatgacattaccaaaatttcctaagtatattattttctgatcccttgaagggtatccaaaacccaccaacagaaatcatccaaaaagtttcttcactatgaacccttcagtgaacttttccccattcataacatgggggcatcgctgagggagaactaccaaggagcacacagggtgagttactcttttccgtaatgacgcctcttggtttcttgacttagggagtcctgggcctgctcacttctattactcatatggcagattctgcttcttccttctttgtacactttcaggttttcaatgaaatagcacagttgccagatttagctaagaaaaatacaggatgcccagtcagcctgaacgtcagataaacaatataaaaatataagcatatcccaaatattgtatgggatatgcttatactaaaaaaagtatttattgtatatctgaaattcaaatttaactgggcatcctgtatttttatttgctaagtctggcaactttatccctgaggcccttttaggagttgcctgagttcaaaaatattttctgataatactaagtgattaattgccatttttcactgtgttgacatttgcactgttgggtgcaggcaggcattgagggagtaggaactacttgtatcttaggccaaggaatcaagggcaggagggccaattaaattactnaggtaggatgtccaccaattaaaaaaatgttttaatggcccattttgganctttagggacttccctttttggagg

SEQ ID NO: 47190 - DNA, 1310 bp, Homo sapiens
cttggaatcaaacctggaaaatcttttgacgagagagaccaaaatgaagtctttaatccggaccctggaacaagaaaaaatggcttatcaaaagacagtggagcaactccggaagctgctgcccgcggatgctctagtcaattgtgacctgttgctgagagacctaaactgcaaccctaacaacaaagccaagataggaaataagccataattgaagaggcacggcctcagcagaaagtgctccttagaatactacagagaggaagagcctgcatgtcgctggcccaaggctggaccctgaagctgatggaaccacctaatactggtgctgagctcctagtcacagcaggtggacctcgtgctcatcagagcatgccaatcctaagccattggacatatgtagactggtttttgttgttgctatgtacatataaatatatatataaaatgaacatagttcatgctttcagataaaatgagtagatgtatatttagattaatttttttagtcagaacttcatgaaatccacaccaaaggaaaggtaaactgaaatttcccttggacatatgtgaaatctttttgtctttatagtgaaacaaagccagagcatctttgtatattgcaatatacttgaaaaaaatgaatgtatttttttctccaaagaacagcatgtttcactcaatggtgaaaaggtggaaacatttatgtaactttatgtgtatctgtcttgatatctactgacattgtctatatgaggaaaatgattactggtcatgctcctgtgagttttttgggaaggtagggtcatttctccctgcctgctttgtgccaactagcatgttgcatctacatgcattatgagtctggttaggcattactttaaacatacataaagagacagtaggacattgtggctgagtctacccagctcaaggtaaaggagaatgttgctaattttttagcaaactagaccagcattattactcaaactaaaaatatcacacctgaaaaatttaatttaggacctaaaatgtctagattagctttctgctttttttatttgaataactcattcagttgtgaatgaattcctctttatttggtgccacagtcaccaaatgacaaggatttgccactttcccaccaaattgtgagtgcttgtaatttaggtctctctaccttaaattcagtataaggaaacgtaattatgattgattttttccaaagatgacaagctgtgttgaaatacatttttttttttgaccaattgacagaatctaataagctttaataatcttccccttttatg

SEQ ID NO: 47191 - DNA, 861 bp, Homo sapiens
gcggcacgagcggcggccgctgggtgcagccgagcggtgtggagcggagagaatactcgaagggctctcctgatactaacagttttacgatttaaaacttcgccagaatttcgacagggtctcactgtattgcccaggttggtctcgaactcctggcttcaagcgattctcccacctcagcctcccaaagtgctgggattacaggcgtgagccaccacgcctgggcctcactcaaacagtaaacgaggtatgtgacgcattcccagactcttcagccaactgagcatcagcttcttcacagcaattgggtcctgattaatgtcctcccaagacagacttcattggatccacgatcaagaggactctgccaggtttttctgacccctctacattgctataaagtgccaaggccttaagacttgggtaccgtgtgttacaacggcaagagtgccagcgccaacaaaagacccattggacctgtcagctcctctgtttcaccaagcagacacaataaccttaccaacaaagcagagtaagccaagtgcctctgtgtgacaccaccagcagctgatgacgcataagaaaaatataactaatttagactagagccctatctcttcttgagaagctgggatttgaaggagctatcctgagatctgtactgctagtaagtgactgataacattataaactggatcggtccctgagttcagagactgagttgcaattgagtgaaaaatagacaacgaaatcttgaagaattgcacggaggtgcaagccaagtttatttggctctccaaataatattggttgaactaagaaattggtaaacgaaacctgtaataggactggtgtttgggc

SEQ ID NO: 47192 - DNA, 9950 bp, Homo sapiens
tccgaattccttttttttaattgaggaatcaacagccgccatcttgtcgcggacccgaccggggcttcgagcgcgatctactcggccccgccggtcccgggccccacaaccgcccgcgcaccccgctccgcccggccggcccgctccgcccggccctcggcgcccgccccggcggccccgctcgcctctcggctcggcctcccggagcccggcggcggcggcggcggcagcggcggcggcggcggcggaacggggggtgggggggccgcggcggcggcggcgaccccgctcggcgcattgtttttcctcacggcggcggcggcggcgggccgcgggccgggagcggagcccggagccccctcgtcgtcgggccgcgagcgaattcattaagtggggcgcggggggggagcgaggcggcggcggcggcggcaccatgttctcggggactgcctgagccgcccggccgggcgccgtcgctgccagccgggcccgggggggcggccgggccgccggggcgcccccaccgcggagtgtcgcgctcgggaggcgggcaggggatgagggggccgcggccggcggcggcggcggcggccgggggcgggcggtgagcgctgcggggcgctgttgctgtggctgagatttggccgccgcctcccccacccggcctgcgccctccctctccctcggcgcccgcccgcgccgctcgcggcgcccgcgctcgctcctctccctcgcagccggcagggcccccgacccccgtccgggccctcgccggcccggccgcccgtgcccggggctgttttcgcgagcaggtgaaaatggctgagaacttgctggacggaccgcccaaccccaaaagagccaaactcagctcgcccggtttctcggcgaatgacagcacagattttggatcattgtttgacttggaaaatgatcttcctgatgagctgatacccaatggaggagaattaggccttttaaacagtgggaaccttgttccagatgctgcttccaaacataaacaactgtcggagcttctacgaggaggcagcggctctagtatcaacccaggaataggaaatgtgagcgccagcagccccgtgcagcagggcctgggtggccaggctcaagggcagccgaacagtgctaacatggccagcctcagtgccatgggcaagagccctctgagccagggagattcttcagcccccagcctgcctaaacaggcagccagcacctctgggcccacccccgctgcctcccaagcactgaatccacaagcacaaaagcaagtggggctggcgactagcagccctgccacgtcacagactggacctggtatctgcatgaatgctaactttaaccagacccacccaggcctcctcaatagtaactctggccatagcttaattaatcaggcttcacaagggcaggcgcaagtcatgaatggatctcttggggctgctggcagaggaaggggagctggaatgccgtaccctactccagccatgcagggcgcctcgagcagcgtgctggctgagaccctaacgcaggtttccccgcaaatgactggtcacgcgggactgaacaccgcacaggcaggaggcatggccaagatgggaataactgggaacacaagtccatttggacagccctttagtcaagctggagggcagccaatgggagccactggagtgaacccccagttagccagcaaacagagcatggtcaacagtttgcccaccttccctacagatatcaagaatacttcagtcaccaacgtgccaaatatgtctcagatgcaaacatcagtgggaattgtacccacacaagcaattgcaacaggccccactgcagatcctgaaaaacgcaaactgatacagcagcagctggttctactgcttcatgctcataagtgtcagagacgagagcaagcaaacggagaggttcgggcctgctcgctcccgcattgtcgaaccatgaaaaacgttttgaatcacatgacgcattgtcaggctgggaaagcctgccaagttgcccattgtgcatcttcacgacaaatcatctctcattggaagaactgcacacgacatgactgtcctgtttgcctccctttgaaaaatgccagtgacaagcgaaaccaacaaaccatcctggggtctccagctagtggaattcaaaacacaattggttctgttggcacagggcaacagaatgccacttctttaagtaacccaaatcccatagaccccagctccatgcagcgagcctatgctgctctcggactcccctacatgaaccagccccagacgcagctgcagcctcaggttcctggccagcaaccagcacagcctcaaacccaccagcagatgaggactctcaaccccctgggaaataatccaatgaacattccagcaggaggaataacaacagatcagcagcccccaaacttgatttcagaatcagctcttccgacttccctgggggccacaaacccactgatgaacgatggctccaactctggtaacattggaaccctcagcactataccaacagcagctcctccttctagcaccggtgtaaggaaaggctggcacgaacatgtcactcaggacctgcggagccatctagtgcataaactcgtccaagccatcttcccaacacctgatcccgcagctctaaaggatcgccgcatggaaaacctggtagcctatgctaagaaagtggaaggggacatgtacgagtctgccaacagcagggatgaatattatcacttattagcagagaaaatctacaagatacaaaaagaactagaagaaaaacggaggtcgcgtttacataaacaaggcatcttggggaaccagccagccttaccagccccgggggctcagccccctgtgattccacaggcacaacctgtgagacctccaaatggacccctgtccctgccagtgaatcgcatgcaagtttctcaagggatgaattcatttaaccccatgtccttggggaacgtccagttgccacaagcacccatgggacctcgtgcagcctccccaatgaaccactctgtccagatgaacagcatgggctcagtgccagggatggccatttctccttcccgaatgcctcagcctccgaacatgatgggtgcacacaccaacaacatgatggcccaggcgcccgctcagagccagtttctgccacagaaccagttcccgtcatccagcggggcgatgagtgtgggcatggggcagccgccagcccaaacaggcgtgtcacagggacaggtgcctggtgctgctcttcctaaccctctcaacatgctggggcctcaggccagccagctaccttgccctccagtgacacagtcaccactgcacccaacaccgcctcctgcttccacggctgctggcatgccatctctccagcacacgacaccacctgggatgactcctccccagccagcagctcccactcagccatcaactcctgtgtcgtcttccgggcagactcccaccccgactcctggctcagtgcccagtgctacccaaacccagagcacccctacagtccaggcagcagcccaggcccaggtgaccccgcagcctcaaaccccagttcagcccccgtctgtggctacccctcagtcatcgcagcaacagccgacgcctgtgcacgcccagcctcctggcacaccgctttcccaggcagcagccagcattgataacagagtccctaccccctcctcggtggccagcgcagaaaccaattcccagcagccaggacctgacgtacctgtgctggaaatgaagacggagacccaagcagaggacactgagcccgatcctggtgaatccaaaggggagcccaggtctgagatgatggaggaggatttgcaaggagcttcccaagttaaagaagaaacagacatagcagagcagaaatcagaaccaatggaagtggatgaaaagaaacctgaagtgaaagtagaagttaaagaggaagaagagagtagcagtaacggcacagcctctcagtcaacatctccttcgcagccgcgcaaaaaaatctttaaaccagaggagttacgccaggccctcatgccaaccctagaagcactgtatcgacaggacccagagtcattacctttccggcagcctgtagatccccagctcctcggaattccagactattttgacatcgtaaagaatcccatggacctctccaccatcaagcggaagctggacacagggcaataccaagagccctggcagtacgtggacgacgtctggctcatgttcaacaatgcctggctctataatcgcaagacatcccgagtctataagttttgcagtaagcttgcagaggtctttgagcaggaaattgaccctgtcatgcagtcccttggatattgctgtggacgcaagtatgagttttccccacagactttgtgctgctatgggaagcagctgtgtaccattcctcgcgatgctgcctactacagctatcagaataggtatcatttctgtgagaagtgtttcacagagatccagggcgagaatgtgaccctgggtgacgacccttcacagccccagacgacaatttcaaaggatcagtttgaaaagaagaaaaatgataccttagaccccgaacctttcgttgattgcaaggagtgtggccggaagatgcatcagatttgcgttctgcactatgacatcatttggccttcaggttttgtgtgcgacaactgcttgaagaaaactggcagacctcgaaaagaaaacaaattcagtgctaagaggctgcagaccacaagactgggaaaccacttggaagaccgagtgaacaaatttttgcggcgccagaatcaccctgaagccggggaggtttttgtccgagtggtggccagctcagacaagacggtggaggtcaagcccgggatgaagtcacggtttgtggattctggggaaatgtctgaatctttcccatatcgaaccaaagctctgtttgcttttgaggaaattgacggcgtggatgtctgcttttttggaatgcacgtccaagaatacggctctgattgcccccctccaaacacgaggcgtgtgtaacatttcttatctggatagtattcatttcttccggccacgttgcctccgcacagccgtttaccatgagatccttattggatatttagagtatgtgaagaaattagggtatgtgacagggcacatctgggcctgtcctccaagtgaaggagatgattacatcttccattgccacccacctgatcaaaaaatacccaagccaaaacgactgcaggagtggtacaaaaagatgctggacaaggcgtttgcagagcggatcatccatgactacaaggatattttcaaacaagcaactgaagacaggctcaccagtgccaaggaactgccctattttgaaggtgatttctggcccaatgtgttagaagagagcattaaggaactagaacaagaagaagaggagaggaaaaaggaagagagcactgcagccagtgaaaccactgagggcagtcagggcgacagcaagaatgccaagaagaagaacaacaagaaaaccaacaagaacaaaagcagcatcagccgcgccaacaagaagaagcccagcatgcccaacgtgtccaatgacctgtcccagaagctgtatgccaccatggagaagcacaaggaggtcttcttcgtgatccacctgcacgctgggcctgtcatcaacaccctgccccccatcgtcgaccccgaccccctgctcagctgtgacctcatggatgggcgcgacgccttcctcaccctcgccagagacaagcactgggagttctcctccttgcgccgctccaagtggtccacgctctgcatgctggtggagctgcacacccagggccaggaccgctttgtctacacctgcaacgagtgcaagcaccacgtggagacgcgctggcactgcactgtgtgcgtggtctacgacctctgcatcaactgctataacacgaagagccatgcccataagatggtgaagtgggggctgggcctggatgacgagggcagcagccagggcgagccacagtcaaagagcccccaggagtcacgccggctgagcatccagcgctgcatccagtcgctggtgcacgcgtgccagtgccgcaacgccttctgctcgctgccatcctgccagaagatgaagcgggtggtgcagcacaccaagggctgcaaacgcaagcccaacgggggctgcccggtgtgcaagcagctcatcgccctctgctgctaccacgccaagcactgccaagaaaacaaatgccccgtgcccttctgcctcaacatcaaacacaagctccgccagcagcagatccagcaccgcctgcagcaggcccagctcatgcgccggcggatggccaccatgaacacccgcaacgtgcctcagcagagtctgccttctcctacctcagcaccgcccgggacccccacacagcagcccagcacaccccagacgccgcagccccctgcccagccccaaccctcacccgtgagcatgtcaccagctggcttccccagcgtggcccggactcagccccccaccacggtgtccacagggaagcctaccagccaggtgccggcccccccacccccggcccagccccctcctgcagcggtggaagcggctcggcagatcgagcgtgaggcccagcagcagcagcacctgtaccgggtgaacatcaacaacagcatgcccccaggacgcacgggcatggggaccccggggagccagatggcccccgtgagcctgaatgtgccccgacccaaccaggtgagcgggcccgtcatgcccagcatgcctcccgggcagtggcagcaggcgccccttccccagcagcagcccatgccaggcttgcccaggcctgtgatatccatgcaggcccaggcggccgtggctgggccccggatgcccagcgtgcagccacccaggagcatctcacccagcgctctgcaagacctgctgcggaccctgaagtcgcccagctcccctcagcagcaacagcaggtgctgaacattctcaaatcaaacccgcagctaatggcagctttcatcaaacagcgcacagccaagtacgtggccaatcagcccggcatgcagccccagcctggcctccagtcccagcccggcatgcaaccccagcctggcatgcaccagcagcccagcctgcagaacctgaatgccatgcaggctggcgtgccgcggcccggtgtgcctccacagcagcaggcgatgggaggcctgaacccccagggccaggccttgaacatcatgaacccaggacacaaccccaacatggcgagtatgaatccacagtaccgagaaatgttacggaggcagctgctgcagcagcagcagcaacagcagcagcaacaacagcagcaacagcagcagcagcaagggagtgccggcatggctgggggcatggcggggcacggccagttccagcagcctcaaggacccggaggctacccaccggccatgcagcagcagcagcgcatgcagcagcatctccccctccagggcagctccatgggccagatggcggctcagatgggacagcttggccagatggggcagccggggctgggggcagacagcacccccaacatccagcaagccctgcagcagcggattctgcagcaacagcagatgaagcagcagattgggtccccaggccagccgaaccccatgagcccccagcaacacatgctctcaggacagccacaggcctcgcatctccctggccagcagatcgccacgtcccttagtaaccaggtgcggtctccagcccctgtccagtctccacggccccagtcccagcctccacattccagcccgtcaccacggatacagccccagccttcgccacaccacgtctcaccccagactggttccccccaccccggactcgcagtcaccatggccagctccatagatcagggacacttggggaaccccgaacagagtgcaatgctcccccagctgaacacccccagcaggagtgcgctgtccagcgaactgtccctggtcggggacaccacgggggacacgctagagaagtttgtggagggcttgtagcattgtgagagcatcaccttttccctttcatgttcttggaccttttgtactgaaaatccaggcatctaggttctttttattcctagatggaactgcgacttccgagccatggaagggtggattgatgtttaaagaaacaatacaaagaatatatttttttgttaaaaaccagttgatttaaatatctggtctctctctttggtttttttttggcgggggggtggggggggttcttttttttccgttttgtttttgtttggggggaggggggttttgtttggattctttttgtcgtcattgctggtgactcatgcctttttttaacgggaaaaacaagttcattatattcatattttttatttgtattttcaagactttaaacatttatgtttaaaagtaagaagaaaaataatattcagaactgattcctgaaataatgcaagcttataatgtatcccgataactttgtgatgtttcgggaagatttttttctatagtgaactctgtgggcgtctcccagtattaccctggatgataggaattgactccggcgtgcacacacgtacacacccacacacatctatctatacataatggctgaagccaaacttgtcttgcagatgtagaaattgttgctttgtttctctgataaaactggttttagacaaaaaatagggatgatcactcttagaccatgctaatgttactagagaagaagccttcttttctttcttctatgtgaaacttgaaatgaggaaaagcaattctagtgtaaatcatgcaagcgctctaattcctataaatacgaaactcgagaagattcaatcactgtatagaatggtaaaataccaactcatttcttatatcatattgttaaataaactgtgtgcaacagacaaaaagggtggtccttcttgaattcatgtacatggtattaacacttagtgttcggggttttttgttatgaaaatgctgttttcaacattgtatttggactatgcatgtgttttttccccattgtatataaagtaccgcttaaaattgatataaattactgaggtttttaacatgtattctgttctttaagatccctgtaagaatgtttaaggtttttatttatttatatatattttttgagtctgttctttgtaagacatggttctggttgttcgctcatagcggagaggctggggctgcggttgtggttgtggcggcgtgggtggtggctgggaactgtggcccaggcttagcggccgcccggaggctttttttcccggagactgaggtgggcggctcagcgttggccccacacattcgaggctcacaggtgattgtcgctcacacagttagggtcgtcagttggtctgaaactgcatttggcccactcctccatcctccctgtccgtcgtagctgccacccccagaggcggcgcttcttcccgtgttcaggcggctccccccccccgtacacgactcccagaatctgaggcagagagtgctccaggctcgcgaggtgctttctgacttccccccaaatcctgccgctgccgcgcagcatgtcccgtgtggcgtttgaggaaatgctgagggacagacaccttggagcaccagctccggtccctgttacagtgagaaaggtcccccacttcgggggatacttgcacttagccacatggtcctgcctcccttggagtccagttccaggctcccttactgagtgggtgagacaagttcacaaaaaccgtaaaactgagaggaggaccatgggcaggggagctgaagttcatcccctaagtctacca

SEQ ID NO: 47193 - DNA, 1830 bp, Homo sapiens
ggacgcgtgggggcggaggcggggctctggcgagttctccttccaccttcccccacccttctctgccaaccgctgtttcagcccctagctggattccagcagtgtgctgcagctgctccacagcccttttcaggacccaaacaaccgcagccgctgttcccaggatggtgatccgtgtatatattgcatcttcctctggctctacagcgattaagaagaaacaacaagatgtgcttggtttcctagaagccaacaaaataggatttgaagaaaaagatattgcagccaatgaagagaatcggaagtggatgagagaaaatgtacctgaaaatagtcgaccagccacaggttaccccctgccacctcagattttcaatgaaagccagtatcgcggggactatgatgccttctttgaagccagagaaaataatgcagtgtatgccttcttaggggtttgacagccccacctggttcaaaggaagcagaagtgcaagcaaagcagcaagcatgaaccttaagcactgtgctttaagcatcctgaaaaatgagtctccattgcttttataaaatagcagaattagctttgcttcaaaagaaataggcttaatgttgaaataatagattagttgggttttcacatgcaaacattcaaaatgaatacaaaattaaaatttgaacattatggtgattatggtgaggagaatgggatattaacataaaattatattaataagtagatatcgtagaaatagtgttgttacctgccaagccatcctgtatacaccaatgattttacaaagaaaacacccttccctccttctgccattactatggcaacttaagtgtatctgcagctctacattaaaaaggagaaagagaaataacctgtctctcattcctaagttgcctcattaattttcatgaacaagaatatgtacctttttgatgctatattactgcgattaaaaagttcttgcaggtaatgtttatgatatgttaaacgttgtaatttcttatcgtaattataacattcccattcttttgtagatgaaacttctacatattgaaccacagattttctgagcttctaaatgtagcctttcattgcacatttcagtgatcagaatagatatccttttacacgcacaaaagcaatagattcattcagtgggacaagttccttgtttaactacacagctatgatggaatgatatatccaagttccttgcctcagtgaaatatgcatatgtatatcatgaaagtgggatgccaagtaagcttaaaatggcattctctagcaaagagattagacttttaaataactcttataaaacaggttggcgatcatttcccaagattggtttcccttgagtttttgctaaaacaaatcttagtagttttgcccgtttaaaacaactcacaatcgtaaatgctactattcctaagatatcttacctttttatttcagtttagccatgtattgtatgagtgtattagtctaagcagtgagaatcttttctatgcctctattccagcaaaaagtagaagtatcaaataaaaagggcaacttttaaaatattaagcctgaagacttctaaaaagacaagaaacatggcctaaataaccaacatagatttacatagtaagtttcacactaccttattaccaaaagcaaacacctcttactttaaactacattatcatgtatatctattgtatgctggtctttactttttgccaaaatcaacatataatgaagagatgcctttgtttcatgagattcaaacttgatgctatgctttaaaataaactcagtacttttagaaacat

SEQ ID NO: 47194 - DNA, 1304 bp, Homo sapiens
ttttttttttcagaatgaaaacacttacaaatcatttttattatgaataatttaggatatttgggacattcatttctgagtaaaatagttcaaaataggattttgttgatacctgttgatacatatttagaaacaaaaatgagatatccttttgaaagtttgcctttgtagtaaattcagtcattcaaattgttttctctcaagacccaaaaatgccaggggcattgccggctttgagtttattctttgtttcttcatcaaattcttccatgggactctattaggtttcccaggttccagctcacctaggggggaaaggggggtaatcgggttcccaaaatgactttatcctttcctatggacatctggttaacagcttgaggggacagaggatcatgaaccaaagcatctgtgtaaaaggaaccaaggtatttctccgggttcatggggttgtcctgggcacacagatctgggcgcatgctgaatccatgggagattcttcccactgtgaaggggaaggcaccaccaccatgtgcgaaacacactttcagtttgggaaacttctcaaatactccacccatgatcatggagcaaatggctatggtggtctctgctggcattcctacaagccaagggagccagtatttggccattcgtccatccatctgcatgtcccagggatgcacgaacagggaacacttcagcctttcggctgccgcatagacaggaaagagctcctgcgcgttcaggtcccactcgttgacgtgggtgccaatttggaccccgggaaagcccagctctttcacacagcgctccatctccttgaccgccagctcaggggcctgcatgggcaacgtccccagacccacgaacctcctggggtagctcacaacggtgctggcaaggtcgttgtttaaaagctggcacaggtttaaagtgtcctcaggtttggcctttttggtccatttctctaatacgaacttctggatcccagcaattctctcgcaccactctgaagactttcccatctttcaacaactttgcttctcccttgctgtggtgttggagctgcacccagcctccgtagccaaacctctttcactggctgccctgttttccctgtctcacttcctcactctactggtgtttcctgggatcacctccaaagcaaactacttgcatctgaatccttgtctcagggtctgcttttttagatctggccattcttttggtagaatatgactatggatgtcaattttcatctccacaggatcagagaagcatgcaaggaaagaagttttgat

SEQ ID NO: 47195 - DNA, 1155 bp, Homo sapiens
gtgcttgaaatagatttaattcttattccccacagtttaggtatttttcattagtacatcaatttgacacactgaatgcaagactattaaggaagaacgattaaatattattttattttgtgaagagttggcagcagattacatctcaagaacttgcagagagaggaaggtagatggacaatcctaaattgtaagatgttacaaaaaacagtgaagtaagagtactcctgaagactaaaatagagaggctggggtttgagccattttactgagtagcttagctggaacctgatatcagaagtagcctttaacaaaaagcctcttggcaattgtatggtactaacaactagagtactgaagtgtaagttgaaaccaagttgcagtgggaaatcaaaggtgaggtagcttatttgaaaccagcaaatgagacaggttggacagttttaaaatctcttctaacaaagaaactgcacggtagcaaggactagcggttctcaaagcccttctttttcagtgttctcattcaccttggcacccaagtatgtttaacaggccatgcattaaaaataaatacaaaaatataaaagccgcttaaagggaacttacaaactgacaatctctcctctgtatttgtgttcatagtggctgggagtttaattatatgcacaaaagttaggagccacttgtttctgcacagactgtaggagcaagatgaggagatgggcaggttttggtaagagcccccagttctggtggacaggcatacttgtggcattgggtgcggcattgctgggaggaccacgtcttgggaggcgattgacttttggtttgtaatttccctttaaacaagaagagatggctcacattttccatatatatctcaatgaatgtactgtattactgttttaaaaatttgatgaaataataatgaattggtctccttttgttatctggtccttgtttaatttgtttaagggtttttgtatacaaaagtttacatttttatgtatatttttcttgtgtaaaaactgatgtaatatgtgtatgaaacactgtatgtattatctgtatatagtgtgacaaaatcattttttttttttcttttggatgtattaataaatcttgctgtgaagtaaaaaaaaaaaaaaaaaaaaa

SEQ ID NO: 47196 - DNA, 1809 bp, Homo sapiens
  misc_feature (1)...(1809): n = a,t,c or g
gtctcctgcctggggggccctgtgctcagtggtgtgtgcaggcacctggctgctgactttcgacactgtcgagggggcctccccgacctggtggtgtggaactcccagagccgtcactttaagctggtggaagttaaaggccccaatgatcgtctttcacataagcagatgatctggctggctgaactgcagaagctgggggctgaagtagaagtctgccatgtggttgcagttggagctaagagccaaagccttagctaaaagattccctacaggagaaaatggaaatnaggaggagagaaactccggtgtccccgaggtgtcggtgtggtgagggccgctggcgttgaagtacatcctgctctggcccagctccccatagcaggcctccagggggccactgcgctgttgccgcagcatcctgctcagtacgtcgacttcatcagccaggagggagagcttgtgaaaggctgtgatggagccacccaggctgatctgggcctcgggaacccagcggaagtagcacagtttccacagttttatgtgtgttccagagacacgtggcagaataacaccgtgcaggttggcgggtttggaaaaccattctctaaaatactgctccgtatcactgttctggctgtcggtttgctgagctggatctggctttggttttaatatcaatgaatttctccttggaagtaattcttggtcactgatgattccattctttaaggcagacggcattcctcttagtgtggagctgtagcttttctatacagaagagattttattatgttccggggattccctttttagaaagattgaaggatgcaatggcaaatataaactcaatactatgaaaaattaatggaatttcagcctcaaagaacattttcctcccttcctttgtgtccttattctaatcctcctcccctggaattacacttttttatgtgttgactctacctaggctgttactatcagcctgaatgggggcgggatgagagtacctcctatccactaatttgcttaaggataagttctaagacgggctagaaaaaacactagacctggtcgattctatcaagaacaatggcaaactgaacagaggcagtcaggaggccaaatgtctgattctttgttctgtacctttcagtagtctgcaaattttctaccaaaaaaaatcccaagaatttatttgggaattattaaaaaggcaaacaatgaatgttattaggacaagaatatagcagtcgggaggcccatgactacatcacagccaggcggcattccctgcccacagtggcggcttgaatcatcaagaaatggataaatggggctttagtaaatcaggcttgcaggctcaaagctgcaatctgcccactctcaggtactgagactttgtgggcctcagacaccaggaagaaagttgggatacagtcatttgagttaaaaagggaatgacccctcagaaacccgcattagcagtgttactcttggaagtgcctttacttttaacgctctctgttctgaaaaagaggtgtttggttacgtgtgagccaacatcacgttttgttagctgtgatttacctttgtccgtttaaaagacttcacggagccattctgtatacaaggtgtgctctttccaatgtagaaggggttatggaaaagggtgcgatcctttgctgtaaactggagagaccagtcccaaacagaggggaattttaagcccttctcatcacccaattggatgtttttgcttatagcaaattcctgcaaaataaataaataaatatttgcaaaactaaa

SEQ ID NO: 47197 - DNA, 709 bp, Homo sapiens; identical to SEQ ID NO: 2353

SEQ ID NO: 47198 - DNA, 1145 bp, Homo sapiens
gcaagaatggcagcacaggcccccacttagataagaagaaggtccagcaactccctgaccattttggaccagcccgtgcctctgtggtgttgcagcaggctgtccaggcctgtatcgactgtgcttatcaccagaaaaccgtcttcagcttcctcaagcaaggccatggtggtgaggttatctcagccgtgtttgaccgggaacagcataccctcaacctcccagcagtcaacagcatcacctacgtcctccgcttcctggagaaactctgccacaaccttcgtagtgacaatctgtttggcaaccagccctttacacagactcacttgtcactcactgccatagagtacagccacagccacgacaggtacctaccaggtgaaacctttgtcctggggaatagtctggcccgctccttggaaccacactcagactcaatggactctgcctcaaatcccaccaaccttgtcagcacctcccaaaggcaccggcccttgctttcatcctgtggcctcccaccaagcactgcctcagctgtgcgcaggctatgctccagggggtcggaccgatacctggagagccgcgatgcctcttcgactgagtggccgggacccctcctcatggacagtcgaggatgtgatgcagtttgtccgggaagctgatcctcagcttggaccccacgctgacctgtttcgcaaacacgagatcgatggcaaggccctgctgctgctgcgcagtgacatgatgatgaagtacatgggcctgaagctggggcctgcactcaagctctcctaccacattgaccggctgaagcagggcaagttctgaaccaggagaggcagcctagacaaccaagtgcatgcagccctaggcctcatctgtgggaagggagtccctggctcatactgcccccaccacagctccttgccctggccagaactgctgtcgaagaaaatcacgccggaaggccaagaaggcgctaagggggatgggagggcaggttttccaggctggagtcggttccacccactcgcctgtccacaggcttccttgtaagcaagtcagcagcacagctactcacgctgccatctggacttattttatgtcaatctgtttataaataaaaaccaatatagataaaaaaa

SEQ ID NO: 47199 - DNA, 416 bp, Homo sapiens
gaatctgctaagaacattatgaatcctgatcttgtgaaaactaaccattgctcgtattaaggaactcattccatttctcttgaggaacattttactgctgaaacagttggttcttttttaaaattttaaaaattgagatataattcacatatcttaaaactcacccttttaaagtatgtgatttgatgctttttggtatgttcacaaggttgtgcagtcattactactgtctacttacagaacattttcatcaccccgaaagaaactccatacctctttgcagtcacttctcattttctggtccccctagtcactggcaactaatttactgtctgtatggattagcttattctggacatttcatataacatgtaaatgaaatgtggccttttgtggctggcttctttcatttaaca

SEQ ID NO: 47200 - DNA, 1605 bp, Homo sapiens
gaggacttccctcgcttgaactgttacacatacgatgtgtgtgtcacatcacatattgtgcagctgttggttttcatgtagtgccctgcgatggaaattagatatatttcatgtatttttccattgaaggtggagtttttcaatgatcatgtgttttgtcctcctaaacagtataccaaagtttgtttttatagttgaggattgtattgataaccactggggttccgcattgaagcaggaacaaattgcctctttttctggccttctctgtgggacctctgcttttgtgaagcaactatttatttgaagaccagggtatgggcacttttgccttctctcctctctgacttttgagggtattgagggcgcccttagtcatagtctcgactccgccattgccttctcctcggcgtcctcacaactcttaattgggcctagtgaaaatgggggcaggtgagaagtccattttgagaatcagcatagtaaattacatttctaatcccagaggacttaatattttcttttgtcaccccagaggtgaaaaatcagcagttgaagcctgacaggcctcagtggtgaccaggaacagaagcagccttcctgttagtagatgggggtacttctgtggtgggcagaagccttactaaaggggaagacagactttgaagtttctagacgagaaggaggctagcttctagcctgggtggccattattccaaaaggtcattgtttctcactagaccccagggcaccagatgaatttccaagtttaaactctttcctgcaggtgattactttgaaaaaggttggtccagaccattttgatcaagaacctgtatatgtgttgtgttagaggcatctgcctcaagtctatgtacagtgtttgctgcgggtgtgttccaatattcattttacctctgcttgggggttttgtgtgttcccctccccccatgccctgcctacccccttttccctgaaccacgtccttttgaataatttccagatggatttctgtagccataccaaagccagggtgttttcattcatgcggatactagtatttatagatgtctgactacctaacttaatttttgtttttgaacttctaattggggccagtgtaaggtcgatcccagaggctgatctgcaaatcaagctacatgtatttgtgtataagaccctgtgttcaggactgggtgacttttctaagaaatatggggtttagaatggggttgactgtattttttaacctaattctggagagaagattgtattttttacagttttttgggtttggcttccttctcacatttctttagctttgaatttttactaaataaatttcctcctgattaattttttttttctcatctgggaatttgaaatctcggtgcttactgttacaccaatttgtccaaagagttgaaatcactttaatgccagaacatggtaaatttgcagccatttcaagcaggtgatggtctttttttataacatcgttaacgggtaccattaaatattctgagaggtgaatgtaaaatataaaaggtataggtttttttttttttttaaagaaaacaataaactttcaaagagaaaaccagc

SEQ ID NO: 47201 - DNA, 1520 bp, Homo sapiens
acatttcatataacaaatggggcttaattaaaaactttaacttggaataaaggaacagggatcactttatcttctgccttcatttaccttagtccaagattcttgcaaaacaggcaactgaacaaacattaggtttatgtaggtaaaatgtgaaagcatttctcctccactttttaaaatttaatttacccagtacagcggggcaccagattacttgatctttgtattttgcagttttgagcctttgtgtcaatcccaagcacagagaggatctgccaaggaaaaacatttgcatcttcggagtagacattttgcagtttgtttaataacaacttctaaagtaagttgaattcatccattgtcactgattcaccaagtggatgttgcattgtggaatttgcctgagtactgttgtcattctgctcagccagggcacggtcagtttcttggccagggacattgctatgtgctgtgtgcaagctctttagaagagagattggatttttttggcattatcagcactcatgctatttagtctacttctattttgactgactctttaaattagtacaatttttctacttgtcatataactcctggaacaatagtacgggaagccgtgatccttttccctgactcatgattttagtctttttccaaatcgctgtaattaaaaagataattttttttttttgctgctccaacgaccagcatgtgttggagcagatctccatggtaagccaaaagtggacttgtcagcctataactactctgcagctgccactaactctacaggcacagtaactacactttatacaggagcacatgccaaagtgcctgggaggtgccaataaaatcaagaaataagaaaactacaaaaaaagatacggtattaaccttggacataattttttttagggaggcagctttcccacttttataaagggggttgtaaatctcaagaggtcatttgttccccatagcagcatatctcattttttaaattgaagcgaattaaataggattttactactcaacattcattatactgttaatctttgctgaaatatatgctaacaaatgttaagcaagggaaactgaagacttagtcatgtggattgttagcagtgatctgcattctgtaaaagaggtactttcccatgatgtaggcatgaagtggtgccagtaagcgtagagcggaaatgttgactttagttaacattgggtttagcatttccagtgcagcattatcagtgggcctttaaaaatacttcgtaagtacattagctttcactttgttgttaaattatagcagactcattatagagaacaagtttgccttgattttgtttaaaatgacttctgctaagcacccagaagataaaattgacatatttttataatataagcatactttttttgtacattgtgttcattcttgaataaaatgagttctgtgttggccttgtagatactaaaaagaaagtattgattttgattcaataaatgttttctttcaa

SEQ ID NO: 47202 - DNA, 1449 bp, Homo sapiens
gtcgccttctgtccccaagtctcccactcccaagtcgcccccgtcccgcaagaaagatgattccttcttggggaaactcggagggaccctggcccggaggaagaaagccaaggaggtgtccgagctgcaggaggagggaatgaacgccatcaacctgcccctcagcccaattccctttgagctggaccccgaggacacgatgctggaggagaatgaggtgcgaacaatggtggatccaaactcacgcagtgaccccaagcttcaagaactgatgaaggtattaattgactggattaatgatgtgttggttggagaaagaatcattgtgaaagacctagctgaagatttgtatgatggacaagtcctgcagaagcttttcgagaaactggagagtgagaagctaaatgtggctgaggtcacccagtcagagattgctcagaagcaaaaactgcagactgtcctggagaagatcaatgaaaccctgaaacttcctcccaggagcatcaagtggaatgtggattctgttcatgccaagagcctggtggccatcttacacctgctcgttgctctgtctcagtatttccgcgcaccaattcgactcccagaccatgtttccatccaagtggttgtggtccagaaacgagaaggaatcctccagtctcggcaaatccaagaggaaataactggtaacacagaggctctttccgggaggcatgaacgtgatgcctttgacaccttgttcgaccatgccccagacaagctgaatgtggtgaaaaagacactcatcactttcgtgaacaagcacctgaataaactgaacctggaggtcacagaactggaaacccagtttgcagatggggtgtacctggtgctgctcatggggctcctggagggctactttgtgcccctgcacagcttcttcctgaccccggacagctttgaacagaaggtcttgaatgtctcctttgcctttgagctcatgcaagatggagggttggaaaagccaaaaccgcggccagaagacatagtcaactgtgacctgaaatctacactacgagtgttgtacaacctcttcaccaagtaccgtaacgtggagtgaggggctgccctgggcccaccactgcccaagagttcttgctgttggcgtactggaccctcctccgaactgccttaccctgcttattcctgtctcttgcactgtgctctcccacaagtccagctgcaacccagagatagtggaaactgaaattaggaaggaaatcatcaataactcagtgggctgacccatccctcccaggcgctggggaccaacctagcaatgaaggttgggaaggttgttcccttcccggtgccaggtccagatttccctccatgatttgggaaccagcttaggcaaaagagtccccacaagatgaaaataaagatcctagttaccattcaaaggatgct

SEQ ID NO: 47203 - DNA, 871 bp, Homo sapiens
ttttttttttttttagatgtgttaattacctttatttcattatttcacaatgtgtgtatatatatatatatatttaaaaatcacattatatacattaaacatattttatttttatttatcaatgataccttaataaagctaaggggaaggaggtatttctctaactatctttgcaaaatacaattcatccattaacaaatcacagtaaattaggaagaataaaacttacatttcgacaaaaacctatgccatatttctgaaagcatcttccaaatcctattaaaaacatctttaaatatatttctctcagcttcttcccttatattttttattttttcatcatattttaattttagtaatttaatttctttctccttttcttcctctgatttatgcttatcctcttctactagtttaatttcttcatttaattggtcagtgtagattttcctcaaaacctcttcccgttgtttcagcctttcctctgtgtccttgtatatgtcatcagaaaagtaagccccttcgttgcactgcaccattttctctatcagctccaccaactcctgcacttgactttccttctctgccttactggttttcttgctgttgctaaaggcacagcagcggttcccgcactccttgacgatgctttttaggcccacatccgcatctgctatgaagtcatggaagctctggccctccaactcttctttgcgagtgaacaagatgaccatgtgcttcatggctgacttcccaaagacagccttgatcaatgcaacggttttctgctcctcctctgtgtagcggcccagcagcagaactaggacaatagcatggggccctgggcaggaggagatgatgcagcggctga

SEQ ID NO: 47204 - DNA, 660 bp, Homo sapiens
gaggctaggtgagccgtgggaagaaaagagggagcagctagggcgcgggtctccctcctcccggagtttggaacggctgaagttcaccttccagcccctagcgccgttcgcgccgctaggcctggcttctgaggcggttgcggtgctcggtcgccgcctaggcggggcagggtgcgagcaggggcttcgggccacgcttctcttggcgacaggattttgctgtgaagtccgtcccgggaaacggaggaaaaaaagagttgccgggaggctgtcggctaataacggttcttgatacatattttgccagacttcaagatttcagaaaaggggtgaaagagaagattgcaactttgagtcagacctgtaggcctgatagactgattaaaccacagaaggtgacctgctgagaaaagtggtacaaatactgggaaaaacctgctcttctgcgttaagtgggagacaatgtcacaagttaaaagctcttattcctatgatgccccctcggatttcatcaatttttcatccttggatgatgaaggagatactcaaaacatagattcatggtttgaggagaaggccaatttggagaataagttactggggaagaatggaactggagggctttttcagggcaaaactccctttgaagaaaggctaatc

SEQ ID NO: 47205 - DNA, 1888 bp, Homo sapiens
atctttttttttttttttttttgaaaaatgtaagttttatttacagatcaggccacaggttacaaaattaaaaccaacagcagttttgaattatctgtaccagctagctgaactagccatatcagttcttctttccagtcattcagcattgtagtaagaaaacacttggtaaggcagatggagacatatttatagtctatagtctgtctgggaagctgactgccagacagggcagtttgtcatctttacctagctgacacatctttttccatggcttgctaccgataggcattgaagcctagcaactgttacttcccacgcatgctatcttccaggacttcctgagaaatgcttgcttacagttcaaattctgtttcactttatgtttgagatctcggtatatcttcggattaggttgaatttgcctgttgggtctggaatataccatttttccccaaacatcagtatatgaagcagtccttccccatggcttcaaatgtccattccaatggagtaacttggcagcctttacaaactgaggtgaatatcgttttccagcactggaaccaaggtggcggacattccacataggatcgatggtagagtgctgttgataaaatacgataagcagaggaggtgttgtgatgctaccagccagggttctgctatacagtccctcttctacattgagtttcatccatttttccagttggttagttatattctgtcgtttccattccgtcaggtttgcaacaaaaactccaggattaaatgagcaagtgctggctttcatggaaagcttacgaattctttcctttttatagtcaagatagccaatgtaattgtactggtttcctgctccacggatgacaactttagtagaggctgaatcacaatcttctgaaaatgcagctgtcatgtcctggcttcagtgctgtattgtaaagggcaagaatatcaccttgcacaattacatcatcatccatgtatatggccttctttgcgctgggaacccagaattggcaaagtagaaccttgcaaaaggttaaaaggtttccatggaattcccccctggtcaggatcctcctttacttttcccttcccaaaagtttagggtcaaaattgacaattttgtatctgatgccttttcagggaatcactgttgagcccaggaccggagatggtctgctgtattgttgagagtaacaatgtagaaaatcacattggagcgagtgttgtgctgaatgctgtttatagctgcaatggccccccccaagcctgtcttcagatgcagcgatgaccacaggaatctcctcttgtctcccatctactgcatgtcggagagcatttgggacaaagtcctataggttgaggcccctacaattcctgaatctgtaacctcattccttaacaaactgcctcaagctgaggaagttatggtgcaaaacccagtaagaagagagcaacagccccaggacccaagatgatgatgtttactttacggaatgaacatctttttccttctgtcatataaatattagtttttaacccctttcatctggctggctccccacttggcattcaaaggtcaaggtagcctcctcccaaactcccacgttgagctgcacctcccctgagctcccacatctgggcctccctctccccagggctaatccagctgtcatgtatttctggcgtgatgtggctgtctcccttgacacgctctgggctcttccaaggcaacagcctggtcttggtaacaaccgtgtcctcggtctgactttgaagtgatcggaaagtgatgtgacgctccggggatcccaccaggctcagagatacccctggttagggctccgacaagtcgttcccctcaaaggtcccgcggcgc

SEQ ID NO: 47206 - DNA, 837 bp, Homo sapiens
ttcaatagagaatctggatctattgaaacatgtttaaaacggggttggtcacaacaggatgggcacaaatgggagcgggggaggggagtggggccgcaccagcccctgccagtgcctgaggctgcagcctggcgagtgcttttgcttctgcttctccacgctggtggttcgagatggtcccaagccccactggggcaggccctgccttgccctgcagaggcagggtggctccacttccccatctcctcccccatgggctgcaggggcatttatgatgcccaacaggtggcactgtcgcgctccttcctccctgtctccgtggctcagaaacaggttaagggtagaggtagatggggagacgtgggggccacacagtctccggtggcagtgagggagcttgggaccctgaggggggcatgctgactccttgctggagaaaaggcacctagataggggagctgggcttgggggcctcccagggggtcctggggtgaggtggggagggaggctgaacgaagcaggaagcagggtggtgggcagaccccaatcctggtttccaaaccctcaccggctgcgggagaaggaagaaggaaggagtcctggagcagagccctgccctggtcccctacgcctgagcaagcctcatccccttcccacctggcccccacgcaagcccagctcgacctccttcccaccttccccctgccggctccaggccttccgcagagggggtggaaggttacagaggcctcaggccgtcttggtgccggggtccacctccttgtgggcccagagctccttgtgctgcttgcggccaaacccctcgtcgtagttgcc

SEQ ID NO: 47207 - DNA, 2912 bp, Homo sapiens
  misc_feature (1)...(2912): n = a,t,c or g
cgtaacgcgtcacgggcggcctggcagctggcggcattgaggcggacgcgtctagaggtccgtctgaccgcggcgtcgggacctggtttccgggcatgagctgagagcaccacgccgaggccacgagtatttcatagacattgatggaagcagaaaccaaaactcttcccctggagaatgcatccatcctttcagagggctctctgcaggaaggacaccgattatggattggcaacctgggaccccaaaattaccgaataccacctcctcaagctcctccagaagtttggcaaggtaaagcagtttgacttcctcttccacaagtcaggtgctttggagggacagcctcgaggctactgttttgttaactttgaaactaagcaggaagcatgagaaagccatccagtgtctcaatggcaagttggccctgtccaagaagctggtggtgcgatgggcacatgctcaagtaaagagatatgatcataacaagaatgataagattcttccaatcagtctcgagccatcctcaagcactgagcctactcagtctaacctaagtgtcactgcaaagataaaagccattgaagcaaaactgaaaatgatggcggaaaatcctgatgcagagtatccagcagcgcctgtttattcctactttaagccaccagataaaaaaaggactactccatattctagaacagcatggaaatctcgaagatgatggttgtgaattactgtagcagcaaaagcaaattggtctccacacctaaaatcgtctgcctgtgtactttgtagatgtgaatggtactattcaacggagcacaatcacatgttagcatttggtaacataatgtttttggatgttcttatggatgtttcttccctaaactatgtatggaattgagcatcatccagaataaatagcgttgtatcccaaattgtgatttgaaccctgggatgctctaattggctggttggtttggatttgtaactccagaaacattctatagtgtgccagagcaaaaggcaaatacacaaaatattatttaaatcaggaaactaaaaatattaacatctattaaaaaattgagcatttttctacgctcgtgtgtcttttacaacataaagaaaaagtaaaaggcagggagggaagtgagagacagattttaaatcatgttcagaactgttgttccagaatttactacggcaatccctccaactggactgaaaaagagaaagttcttggcaaaaaggagctgattctttgaacaaatgttgtagtaatctgtttaagaattatgcttattgtttcaaaatcccaactaggaaaacatggtgtatatcttaaaattgttcgtgttgacaaaactagaatcaaatttaacattttataccacaacacaagttctatttggaaattgaacttttattctatagcaaccatttttttcaaatctaaataaccatgccttctataataacaaatgttgctattatcatgggacttttaaaattacatttattgcatgggattgtttttatagcatgagaatgttctgtttggaattatatcatggtcagtctaaatagaaaaagcaaaatttctttgaaaacctaaacattgctatattggtcactatcaaacatacaattttctaataattgtgtagcggtctaagtggaagagtttgcattatcttgtgcaggacgaggagaggacatgcagtgggcacagaaagtcaatggaacagatgccactgtggcaccaagactgtaatgactctgtgtggtaggtagttttaaaggactgcatgccttggaaatgattcttcacttggagaacatacttgcctctagatatgtttgtcactctaagcatcctgaatataacaatagagaaagataagtcaaccaacagatttagggatgtgtttcttcagcacattttggtcattttgatgccaagtttgacatactgtttaattgggcagcacctttgctcctttaccaggtatgtatcactttgttactccaggtgccattcttggtgatgacagaatgtttatcactatcgttgttagcaagaggaagctttcaatataggaacttaacatcttcccatgagtataaatgaatttaagacatttgaatcaaaacttcagtagagggaggttttagaattcataaaactggtttaaggaaattctttttacttttcccaaggttaatctttttaaatatctctagacatcaaatactttctgtatgtattagctgtgtctgtctatgatgcaagtaactctcctcctatttgggggatagttcagagaggtaggagcattatctcccatttttctggtgacttcttggagtatagaattcaccattttatccgtaagtcttcaaaggattatggtggactagaacttacatagtgcaaaatagtcttctatttttaataggaacttagaaaaaacttagaattatatatagagttgtttcctttagaaaccagagctatttatttgtatttaaagcactgtttattatttgtactgattcttatccctctgtgtgaataaatgtaagacggtgtccgtgtggttatgtcttctctcgttcacttactggcatagactgcagttctctgacaggcttgtttccagtcaggactctggccagcatgtccacgtggggtgcttcttctaagtgccttctctgcagagggttctggctaggagagtccaaactgaggagggcaactctctttaccctttatgcctgcctacctctgttgttaggaggatgaggaatagagaccagctgtttccattgcaaatgtcactatttgaaaaggagttgttaatgggaatctctgcaagtatcgtactgtgtttagtctctcatggnagggg

SEQ ID NO: 47208 - DNA, 725 bp, Homo sapiens
  misc_feature (1)...(725): n = a,t,c or g
gttcaatagaagaaattaaaaaactatgccaggaacagttagagctcctgtctgaaaaaaaaattttgaagattcttgagggtgacaatggaatggactctgatatggaagaggaagcagatgatggttctaagatgggatctgatttagtcagtcagcaagacatctgtatagattctgcttcatccgtgagagagaataagcaacctgaaggtttggaattaaaacaaggaaaaggggaagatagtgatgtactcagtataaatgcagatgcttatgacagcgacatagaaggcccatgcaacgaagaagcagctgctcccgaggcaccagaaaatacagtccaaagtgaagctggtcagatagatgacctggagaaagacattgagaaaagtgtgaatgagattctaggactggcagagtctagcccaaacgaacccaaagcagccaccctggctgttcctccaccagaagatgttcaaccttctgcacagcaactggagctgctagaacttgagatgagggcaagagcgattaaagccctaatgaaagctggtgatataaaaaagccagcctaggtatttaacttgattttgaattttaggtatgtttgaacaaagccacatcatttaattttgtatctaaatttatttggggtcttatatgtngtttctcatgtaacccttatttgggcncctttttggccctnaattaccngtggccgt

SEQ ID NO: 47209 - DNA, 1438 bp, Homo sapiens
cctgctctatcttgtctcggtctctcactctgccttatacccctcagttgaattatttcttctgaggaggcaagaactgaggctgctgcagactgatatggattcaccactgctaacacctcctggttggaactacaggaatagaactggaaagggaaaaaaggcagcattcaccacatcccaatcctgaatccaagagtctaagatagtcccccactcctatctcaggcttagaggattagattaatctcctggaggggaagactcttccttgaaacatttttttttatctgcctgtagctattgggataattcgggaaatccacagggacagttcaagtcatctttgtcctctactttctgttgcactctcagccttgttctctttttagaaactgcatggtaactattatatagctaaagaagagcattctgacctctgccctgggacttcctggatcctcctcttcttataaatacaagggcagagctggtatcccggggagccaggaagcagtgagcccaggagtcctcggccagccctgcctgcccaccaggaggatgaaggtctccgtggctgccctctcctgcctcatgcttgttgctgtccttgggatcccagggcccagttcacaaatgatgcagagacagagttaatgatgtcaaagcttccactggaaaatccagtagttctgaacagctttcactttgctgctgactgctgcacctcctacatctcacaaagcatcccgtgttcactcatgaaaagttattttgaaacgagcagcgagtgctccaagccaggtgtcatattcctcaccaagaaggggcggcaagtctgtgccaaacccagtggtccgggagttcaggattgcatgaaaaagctgaagccctactcaatataataataaagagacaaaagaggccagccacccacctccaacacctcctgagcctctgaagctcccaccaggccagctctcctcccacaacagcttcccacagcatgaagatctccgtggctgccattcccttcttcctcctcatcaccatcgccctagggaccaagactgaatcctcctcacggggaccttaccacccctcagagtgctgcttcacctacactacctacaagatcccgcgtcagcggattatggattactatgagaccaacagccagtgctccaagcccggaattgtgtagcttcatcaccaaaaggggccattccgtctgtaccaaccccagtgacaagtgggtccaggactatatcaaggacatgaaggagaactgagtgacccagaaggggtggcgaaggcacagctcagagacataaagagaagatgccaaggccccctcctccacccaccgctaactctcagccccagtcaccctcttggagcttccctgctttgaattaaagaccactcatgctcttca

SEQ ID NO: 47210 - DNA, 1750 bp, Homo sapiens
agaggcctctctggaagttgtcccgggtgttcgccgctggagcccgggtcgagaggacgaggtgccgctgcctggagaatcctccgctgccgtcggctcccggagcccagccctttcctaacccaacccaacctagcccagtcccagccgccagcgcctgtccctgtcacggaccccagcgttaccatgcatcctgccgtcttcctatccttacccgacctcagatgctcccttctgctcctggtaacttgggtttttactcctgtaacaactgaaataacaagtcttgatacagagaatatagatgaaattttaaacaatgctgatgttgctttagtaaatttttatgctgactggtgtcgtttcagtcagatgttgcatccaatttttgaggaagcttccgatgtcattaaggaagaatttccaaatgaaaatcaagtagtgtttgccagagttgattgtgatcagcactctgacatagcccagagatacaggataagcaaatacccaaccctcaaattgtttcgtaatgggatgatgatgaagagagaatacaggggtcagcgatcagtgaaagcattggcagattacatcaggcaacaaaaaagtgaccccattcaagaaattcgggacttagcagaaatcaccactcttgatcgcagcaaaagaaatatcattggatattttgagcaaaaggactcggacaactatagagtttttgaacgagtagcgaatattttgcatgatgactgtgcctttctttctgcatttggggatgtttcaaaaccggaaagatatagtggcgacaacataatctacaaaccaccagggcattctgctccggatatggtgtacttgggagctatgacaaattttgatgtgacttacaattggattcaagataaatgtgttcctcttgtccgagaaataacatttgaaaatggagaggaattgacagaagaaggactgccttttctcatactctttcacatgaaagaagatacagaaagtttagaaatattccagaatgaagtagctcggcaattaataagtgaaaaaggtacaataaactttttacatgccgattgtgacaaatttagacatcctcttctgcacatacagaaaactccagcagattgtcctgtaatcgctattgacagctttaggcatatgtatgtgtttggagacttcaaagatgtattaattcctggaaaactcaagcaattcgtatttgacttacattctggaaaactgcacagagaattccatcatggacctgaccccaactgatacagcccccaggagagcaagcccaagatgtagcaagcagtccacctgagagctccttccagaaactagcacccagtgaatataggtatactctattgagggatcgagatgagctttaaaaacttgaaaaacagtttgtaagcctttcaacagcagcatcaacctacgtggtggaaatagtaaacctatattttcataattctatgtgtatttttattttgaataaacagaaagaaattttgggtttttaattttttttctccccgactcaaaatgcattgtcatttaatatagtagcctcttaaaaaaaaaaaaacctgctaggatttaaaaataaaaatcagaggcctatctccactttaaatctgtcctgtaaaagttttataaatcaaatgaaaggtgacattgccagaaacttaccattaacttgcactactagggtagggaggacttagggatg

SEQ ID NO: 47211 - DNA, 317 bp, Homo sapiens
  misc_feature (1)...(317): n = a,t,c or g
aatctccaaatgtaatctggttcaggagggcctttattgccagctctgcttgcctcttagagacacaacccttgctttccaaggttatgcactcatttctaggagtactttattagcactaagatctctgcctcccccatgccccacccaggcactttctcattctgctttcttcttccatttctaccatatcatcctcttcatttttagggtcnnatactttttncnnctattnannanntnggtcttctanntnnngntnntcnnnnnntgnnnttnnnttnnnnnngtttnatnntnnnantnnnnnnnntttt

SEQ ID NO: 47212 - DNA, 3165 bp, Homo sapiens
cgcctgccgggccggcgggcggggtgattgatccgcgttccctggagctggaggctcgggggaaagggccagcacggagcgggcgctcggttgctgcgcacaaaggctgaggctccaagagctgcagggcgtgtttgggaccccagagtcagaaggagtgagaaccctgacccctaatcccactgcatccagccaataggagcccagccaccatggcggagctgcaggaggtgcagatcacagaggagaagccactgttgccaggacagacgcctgaggcggccaaggaggctgagttagctgcccgaatcctcctggaccagggacagactcactctgtggagacaccatacggctctgtcactttcactgtctatggcacccccaaacccaaacgcccagcgatccttacctaccacgatgtgggactcaactataaatcttgcttccagccactgtttcagttcgaggacatgcaggaaatcattcagaactttgtgcgggttcatgtggatgcccctggaatggaagagggagcccctgtgttccctttgggatatcagtacccatctctggaccagcttgcagacatgatcccttgcgtcctgcagtacctaaatttctctacaataattggagttggtgttggagctggagcctacatcctggcgagatatgctcttaaccacccggacactgttgaaggtcttgtcctcatcaacattgatcccaatgccaagggttggatggattgggcagcccacaagctaacaggcctcacctcttccattccggagatgatccttggacatcttttcagccaggaagagctctctggaaattctgagttgatacaaaagtacagaaatatcattacacatgcacccaacctggataacattgaattgtactggaacagctacaacaaccgccgagacctgaactttgagcgtggaggtgatatcaccctcaggtgtcctgtgatgctggtggtaggagaccaagcacctcatgaagatgcagtggtggaatgtaactcaaaactggaccccacccagacctcgttcctcaagatggctgactccggaggtcagccccagctgactcagccaggcaagctgaccgaggccttcaagtacttcctgcaaggcatgggctacatggcctcatcctgcatgactcgcctgtcccggtctcgtacagcctctctgaccagtgcagcatccgttgatggcaaccgcccacaggcctgcacccactcagagagcagcgaggggctgggccaggtcaaccacaccatggaggtgtcctgttgaagcccttgatcccgctgacgacgcccacgtcgaggccccaccgccatccttgcgccggctcatgttccctttagtttatttttgtgagggcaaaggggaggaaatggggttctgtttgaaaaaaatgaggggatcttagatgctgcagcagaacagtctccaggtgttttaaggggctcagtcctcctcatcccatctcactctccgtggtaacttagccaacttgacccctctcatcccactcccggcggcccaggcacagaagggcagggccattagggagggagattcgctacggatccaggccattcctgggtgagcccttgggagggcatgtttggagatgagagaggcttcgagagggtgggtgctgggccacaggggtgcggggccagcttcaggcactggcgtggggagccctggggagaccccttcccccaccctccaccaagcacacctgtttctgtctcatagcacatgtgacaatcatctgggacaacagccacaagggggcgcttcgggaccagggcagccactttcctggtgctctctggggcccagctgggtgcttgtagggccacgcaggcagggggggtcaaggggtttctctgcccaaggaagacagaacatggagaaccgtcagggcaggaaccccacagactgtcccttccagcccacactctgccacctcctggccctgtcccaattctgagccaaggcctccccgaggcagaagttgcctggtcctctgtccccacagtgacctgactgggggtgagggagaaggaggagagagcccatgtgtggtgtgtgtgcccctgagaacttcgtggtgactgcctttgggagcccgcaggtggccagaggcaggggtagctgagttcctggagaccccttttttgcccccaggttccccagagggcaacgccatcagtagcagtgtggtgtttcaggcagagctctggccaggctgtgccagtgtgtcccggacgcatcactaaggaagagagagtttatttagtcaactggcccaaggaagcgaggcttctacagtcccacaccccatagccgcctgggctggggcttactgggggctgaaggttctggacatgaacaagggtcaggtagaagagaaaggcttcccctacaccccagcctcctgctgtcccctgaagcccaggactgcgttgtatgctttccatccactcaccttaccccatagcatcttgcggcccagaaaccagagccatttgtctcagaccctaaatcaataatcacaaaccccaaaacgggagagagcagtgaaaacatgcagggctgtggacgggggaagggttgtggcgggtgttctgaggctgagaggacacctatatgcgtatttcctctacacacatcaccccccttctataatcttaagccatgactagcctggtggcgtgttagtttctgcccagttctaccccctcatgtgcttcttctgaatactgaatgtgactgtttgaaagctggtagaattcatccctcttactgtagataacactgcaaatcttggaattttgttttttgctgtttccagatgtatctataaatatctatacattatatgtgtgtgtgtgtgtgtgtgtacatcgggtcctcccatgtgtggtgttcttctggaggttgtctctttggtcaaggtgaacttttaatgtttattattttcttctccgcacaaagtaaagagcctaattttgtgtattctggtggctgctgtcatgagatgataaaatgtaaaacaaaactctagtcaacgtagaaagagttaactgtgctgaaaaactaataaagaacctaagaagaaaaaaaa

SEQ ID NO: 47213 - DNA, 1578 bp, Homo sapiens
cgatccgagacgtggctccctgggcggcagaaccatgttggacttcgcgatcttcgccgttaccttcttgctggcgttggtgggagccgtgctctacctctatccggcttccagacaagctgcaggaattccagggattactccaactgaagaaaaagatggtaatcttccagatattgtgaatagtggaagtttgcatgagttcctggttaatttgcatgagagatatgggcctgtggtctccttctggtttggcaggcgcctcgtggttagtttgggcactgttgatgtactgaagcagcatatcaatcccaataagacattggacccttttgaaaccatgctgaagtcattattaaggtatcaatctggtggtggcagtgtgagtgaaaaccacatgaggaaaaaattgtatgaaaatggtgtgactgattctctgaagagtaactttgccctcctcctaaagctttcagaagaattattagataatggctctcctacccagagacccagcaccgtgcccctcagccagcatatgcttggttttgctatgaagtctgttacacagatggtaatgggtagtacatttgaagatgatcaggaagtcattcgcttccagaagaatcatgggcacagtttggtctgagattggaaaaggctttctagatgggtcacttgataaaaacatgactcggaaaaaacaatatgaagatgccctcatgcaactggagtctgttttaaggaacatcataaaagaacgaaaaggaaggaacttcagtcaacatattttcattgactccttagtacaagggaaccttaatgaccaacagatcctagaagacagtatgatattttctctggccagttgcataataactgcaaaattgtgtacctgggcaatctgttttttaaccacctctgaagaagttcaaaaaaattatatgaagagataaaccaagtttttggaaatggtcctgttactccagagaaaattgagcagctcagatattgtcagcatgtgctttgtgaaactgttcgaactgccaaactgactccagtttctgcccagcttcaagatattgaaggaaaaattgaccgatttattattcctagagagaccctcgtcctttatgcccttggtgtggtacttcaggatcctaatacttggccatctccacacaagtttgatccagatcggtttgatgatgaattagtaatgaaaactttttcctcacttggattctcaggcacacaggagtgtccagagttgaggtttgcatatatggtgaccacagtacttcttagtgtattggtgaagagactgcacctactttctgtggagggacaggttattgaaacaaagtatgaactggtaacatcatcaagggaagaagcttggatcactgtctcaaagagatattaaaattttatacatttaaaatcattgttaaattgattgaggaaaacaaccatttaaaaaaaatctatgttgaatccttttataaaccagtatcactttgtaatataaacacctatttgtacttaattttgtaaatttggatttttatatatcaaaaa

SEQ ID NO: 47214 - DNA, 2701 bp, Homo sapiens
gtcgactcttaccggttggctgggccagctgcgccgcggctcacagctgacgatgggggaccccagcaagcaggacatcttgaccatcttcaagcgcctccgctcggtgcccactaacaaggtgtgttttgattgtggtgccaaaaatcccagctgggcaagcataacctatggagtgttcctttgcattgattgctcagggtcccaccggtcacttggtgttcacttgagttttattcgatctacagagttggattccaactggtcatggtttcagttgcgatgcatgcaagtcggaggaaacgctagtgcatcttccttttttcatcaacatgggtgttccaccaatgacaccaatgccaagtacaacagtcgtgctgctcagctctatagggagaaaatcaaatcgctcgcctctcaagcaacacggaagcatggcactgatctgtggcttgatagttgtgtggttccacctttgtcccctccaccaaaggaggaagatttttttgcctctcacgtttctcctgaggtgagtgacacagcgtgggcatcagcaatagcagaaccatcttctttaacatcaaggcctgtggaaaccactttggaaaataatgaaggtggacaagagcaaggaccaagtgtggaaggtcttaatgtaccaacaaaggctactttagaggtatcctctatcataaaaaagaaaccaaatcaagctaaaaaaggccttggggccaaaaaaggaagtttgggagctcagaaactggcaaacacatgctttaatgaaattgaaaaacaagctcaagctgcggataaaatgaaggagcaggaagacctggccaaggtggtatctaaagaagaatcaattgtttcatcattacgattagcctataaggatcttgaaattcaaatgaagaaagacgaaaagatgaacattagtggcaaaaaaaatgttgactcagacagactcggcatgggatttggaaattgcagaagtgttatttcacattcagtgacttcagatatgcagaccatagagcaggaatcacccattatggcaaaaccaagaaaaaagtataatgatgacagtgacgattcatattttacttccagctcaaggtactttgacgagccagtggagttaaggagcagttctttctctagctgggatgacagttcagattcctattggaaaaaagagaccagcaaagatactgaaacagttctgaaaaccacaggctattcagacagacctactgctcgccgcaagccagattatgagccagttgaaaatacagatgaggcccagaagaagtttggcaatgtcaaggccatttcatcagatatgtattttggaagacaatcccaggctgattatgagaccagggcccgcctagagaggctgtcagcaagttcctccataagctcggctgatctgttcgaggagccgaggaagcagccagcagggaactacagcctgtccagcgtgctgcccaacgcccccgacatggcgcagttcaagcagggagtgagatcggttgctggaaaactctccgtctttgctaatggagtcgtgacttcaattcaggatcgctacggttcttaatactgaagtcatgatgtgtatttcctggagaaattcctctttaaatgaacaagtaaccacatctcaggcggcagtgaagtccagatagttttgcagattgttttgctactttttcatatggtatatgtttctgatttttaatatttcttttgagaaattctgagttctgatgtaggagctttcctgtgatttctgtttcacgttccttcctgtcacaccctcctttggcgtctctgtgtatatccttgctttattttcttggaacctttgatttcaacactgagggcctggagacctcggctcctcctgctcctgaaccaggaggcttcatgtgggggaggaggagaggtctccatgtgacacatgggctcagggctgccagaatcagcggatgctggatgggcctgcagaaacaacactcaccacacacacttccttcaaaagaccaaaagtgactggtgtctcgtgtgacagattgcttcatttatgtttctacatagtaaggtgactgccaaataatatttgaagtcatctgtctctttgtaaattattttatatgacctataaatttaaaaatgtttttcagtgagtgcttttaacaaacttaggcttctgcccctgccccaggggaattaatgttatcttgtgaaaggtgttgctgtttgaattgatgagaaatggaagatgagaactcccctaagagtttctcataataaatccatcccccatcacaaatcaataccggtataccagagttaaagtggaatgaggtaagaagataccagcctacagaaaatagttgccgtgtatgggagaacagtcattgtaattgggtagttttgttaataaatatttttaaatccttgccttttcagaaattaccgaatgtgtataaacaaataaagaaaaataatttagctgtgttttagacagcattagaatatattgttcagcacagtaaaatatatttgaaatttgataagccaaaaatgtggttttgaatgaatattttgtgaatctttcttaaaagctcaaatttgtagacttctaaatagaataaacacttgcagcagaaaaaaaaaaaaaaaaaagtcgacc

SEQ ID NO: 47215 - DNA, 1418 bp, Homo sapiens
attcggcacagggaatctttaatgttcatcccaaaccctaaaggtagacattacccccattttatggaaaaggacactgaggctcagaaaggtgctgtgacccggccaaggcccccttgctagtgagtgcaaagccaggactcgaactgtcccccagcttctgtctcctcctgggccaggcttcccctgagctcctccctgcccccagccctggcctgcagctgcaagggttattttcatctctcctgtcattccagcaaaaccactgggccagtgagtcagtcttgtggttaagggaggaagggtactgttggggagcccgcaatggaagacgtttcttcagcgggtgggcccccgggccctgcagtacccctgcaccgagagaagagccatgttcctctaggcctgcccatggctttgggaagtcagtgccctggataagccaccagccttccccacaaaggctcaggagtggcagttgagaagtattcactcccaattcacttggacccccttgtcctctccacccaggtgtcagcggtgcccactgtgctggccatgaagaatggggacgtggtggacaagtttgtgggcatcaaggatgaggatcaagttggaggccttcctgaagaagctgattggctgacaagcagggatgagtcctggttcccttgcccgcgtgggaccccaatagaactcagcccttccatgccagcccttcctgctgcctccctcctgtctggctcctggggcccatgcttagagcccaggctccagccctgaagtgcttccgagctggcggactgcccaggggccatcagaggatggtggtgctgctgctgatccggggaccgctgtcttccctcccatacgcctttcatccctccttctagggcctatggcagttctcccaggatgtgtggcgagagccctgggccagcccacagcgttcctagtcaggcagccacaccttggtcctcatcttggtcccttccaatctgaaacctcgtgcctggctcgtctgccacctacatttctctttccagctgctgttttgtaaaaagaaaaagaaaaaagaagcccaaactagtgagagtaatatctaattatctcattttttgtaggtctgtgataaagaacttagtcatcccttccacctcctactgtgaagaacagaccctgggtcccacactgaaatcccctctagtcacccattcccaccccccagggagctgcctcccaggcagggggtgcagaaaatgattgatgggctggggaaccctggagagcctcgactccggaagtctcaaggtgcctcctcctctccttagctggcccgttggttttctgagcagggggctgaactgtgaacaagtcagacaaataaagcaagggtctgcaccatctgcaatgtcaaa

SEQ ID NO: 47216 - DNA, 1977 bp, Homo sapiens
atttagttgcttatcaagtacttattcttggttttaaaaaaaattaatggtaactgtatttttctcatttttagcattattcaaatgtttatattttaatacctttaaaccactttaaagctttttcatgtttaattatagttttaagaaaaactattttgaacaaccccaaatatagtgcatctagaaactaatgtatatttgattagacatcatttatagtggaacagtagactgtagtacatggtaatttttcttttactattaagatacaataaaacatgactaattttgctgtcaaaaatgtaaagaataatgataaatggagtttttatattttacttttaagattgcctgtctttaataagacaaagccttaagccttatgttataattttggttctaaaaaccatcatttcagtataaggaataagtatatttcgtcctcctctttagtttttttcttcctatttatttttattttgaaaaatttctacaccttctttgaattccttgtatgaatttttgtttcttagaagttaatttgtgtgaaatgagattcttcaaaacgatgaaacctcatagctctgagaaaaggttttagggttttaaattctaagcaaagcgtgactatggctgacagactacacatttaattatacagcttctctttcttaaccacaggcagattaacctcattgtggattgtccttcaggaccttagtcctcaggcatggtttctggtgcccactcctggaagccgctgttccctttctaccttcttaccagagcccaagggcaggcctggtcccggggaagcagcagcttgctgacataagtcagctgcaaaggctgaggagtgtgccctcagagaagcaccgccccccagtcttgtgccagcgcctagagccgcagctcccagggatgctccttccctggaggcagcccaggagagggactctggcagcgttcttcagatttgtggccactgtttctcatttgctggttgactgtttttatttcttaggcttttgctagttttagaaaatagggaagcagcccttgatttgtggattaaaagcaacatttgagcgatgatgcacaacagtccaggaaaatgggcggtggacacttgaggctgaggatgggagttgacatgagcagggagagggaggtgcgcgctgcttatctgtgattgttgctcacctgagtgtggctgattgtgtacatccagcagttacaatttttaaaaattatacttttacatttattttatatttttctcacccccagtaatttccttccaaagaagttcacatgtaataagtagaaattctgtataggaaaaaagcattaaaaatactattataactgcttcatttgctgggaacccattaaaagtaatataaattagctttttccagaaggatccttttgtagccagtgtttatgaatgtaacccccagcaaaatatggctatatattaggggagccagtttggagcagaggcctgaaggtcccccgctatgcagccgtggccacagctcgcagcccaagcactgtggagcatccacacctttgatggcaatgcagattggtagcaggttccataggcgtacaaaacagtattaaagctcagtgttttgcatattgttagcatttacaaatatttttgctttagtatgaggaaagtaaggatgggcaaagaagcgatcaaaatagctattgctacaacattttcgaaaacaaagttggggctgtatttctttaaaaagataagcctctaaaaatgcttggcaaaaaaaatatagtgttaaaataggccagtgatattaatgagaaaatgaaagtatgtatcaggaataaagtgatattgcataggagtattgtatttttatgaattttatgccagttgtttacatgtactatatatgttaaattaaaaaaaatcatgagtaatgagaaaaaaaaaaaaaa

SEQ ID NO: 47217 - DNA, 416 bp, Homo sapiens
gcggcacgaggaaaatcaaaggagaagaatttcctctgactctgggtcgggatgtctctggcgtggtgatggaatgtgggcttgatgtgaaatacttcaagcctggagatgaggtctgggctgcagttcctccttggaaacaaggcactctttcagagtttgttgtaatcagtgggaatgaggtctctcacaaacccaaatcactcactcatactcaagctgcctctttgccatatgtggctctcacagcctggtctgctataaacaaagttggtggcctgaatgacaagaattgcacaggaaaacgtgttctaatcttaggcgcttcaggcggagttggtacttttgctatacaggtaatgaaagcatgggatgctcatgtgacagcagtttgctcccaagatgccagtgaactt

SEQ ID NO: 47218 - DNA, 501 bp, Homo sapiens
ggcggccagcctgtggatgggcgacctggaaccctacatggatgagaacttcatctccagagcctttgccaccatgggggagaccgtaatgagcgtcaaaattatccgaaaccgcctcactgggatcccagctggctactgctttgtagaatttgcagatttggccacagctgagaagtgtttgcataaaattaatgggaaacccccttccaggagccacacctgcgaaacgttttaaactgaactatgccacttacgggaaacaaccagataacagccctgagtattccctctttgtgggggacctgaccccggacgtggatgatggcatgctgtatgaattcttcgtcaaagtctacccctcctgtcggggaggcaaggtggttttggaccagacaggcgtgtctaagggttatggttttgtgaaattcacagatgaactggaacagaagcgagccctgacggagtgccagggagcagtgggactggggtctaagcctg

SEQ ID NO: 47219 - DNA, 1759 bp, Homo sapiens
acttttcccacattgtatgagattttccaaaattttggtgtgaattgggcacttttggaaaactcctgaaaaagaattagtttccttcatctgcagacctttgtccaatacggttaccatttctttatagtaactcgattagccatatatgtttgtttctagtcctgctcctttgctcctctcctatgccttcccagtgctggctccattttgaagactcaaggacagaggggaagcagatcataaagagaaaaaggagacagaagaaaggatgaaggaaggaggtcatggggagtgtggcttctgagcagtttagttgctggggagagcagacagtcactgcctacaatacagacagaaccttcctgctcactttctgtcctatctcttcctgaccttatgaaccagtgttagtagatgattaaaacatgacaagcaatggctccttattttcacaggactaagtccgggccttcgtatcactagctgttgcccttttacaccctgcttcagccaccctgtccctgtcattggccctggacttcctctctgtgcccgtgtgtcctctgcctgggagccctctcctcccatagtcactttctctctgccaaactcatttcttcttgtgcccaagacctctctcctgagcccctgtggaaacttcaggaaggatgaatccgtctttgtgctccacggctcgtaccttgatcaggctgtgcatcacagtaattccgttctaggtaggcagagttgatctttgtctcatctgccaggctgcgggctcttcaagggcagggaccttgtcatagtcatttttattttcacagtgcttggaacatggtggaaaatgaatgttggaattattggagtaatataatttgtatcaaatgtccttttgaattaagagatttagttatgtttactaagaatgtaaactttgaattggtttgcattttaacaattaggatggtttattgatgtgaattttgaaatgtagaggtataatgttaaattattttatactttatggaaatcaagtgaaatgtttgaaaaaatgccgccattatcctctggtattttctactctctggaattatgtgctgtaaatgatcggctgtaaatgtgaggcacaccacccacccctgtgtgggaaagtgttgtgggcgcttcctgccacccacccacctctctgcccgttgctccttgtgacacttgtctgtcgtctcccatccaaactccaagcttacagctacctcagtactgctttgcttgtctgaaacacctcctttgccttccttccagtgtcccgctcaggtgcaagcctcctccctaaaggctcatctcagcttttgatctgaatgatgatgggaaacatgcagacagcctctcagtcttactatttaatgttgtagctgggaaaaaacccagagaggttaactgatatactgggttgggactaggatgtgggttttgtgactctgaatcccatgttcctcaaactacgctgccttccgaagtctggcatttgttagctcatgcttccttgtagtccagcttcttatgtgcctgttatattctccagtaagattgtaagcccttaagggcagggacgtctttgcatctctagcactgctatagtgttctatccttagttatgaactagataaataaatggtggtggcaacaatcctagtttcctaactcagattgtttcacgataaacacagttttgtatggcatgcttggccataatgtctgg

SEQ ID NO: 47220 - DNA, 978 bp, Homo sapiens
gtcgacttttttttttttttgaaaaggtatctggtttatttaggttgctgtgatctccctgagaaataagagtcagtatagaccaacactgtccaaccaatagaactttctgccatgatggcatatcctgtagctgcactgtcccctcatgtggctgtctgaacacttgaatgactaatgtgactgagaaactgagcttttaatcttaattaacttaaatttaagtttagccacatgtatttagtggctactgtactggacagtgcaggtctagctagaccagtggttctcaattgaggggcaattttcccccacaggataacatttggccaaggtctgggaggatatttttgggttgtcacaactgggggagtgcttctgatgtctagtgggcagaggcaagtgatgctgctgagcaccctaccatacaccagacagccccacaacaaagaattatcttggccccaaatgtcaagtacgagtttgagaaaccctggtctagactgtctagcacctgccttttgacaaggacagaccctcaactgcagcctgggaactgggattggccaaaggtcctgggctgccctcaggaagacagatgggtccagaggcctcagggaagtccctaagccctttattccatcagccaaacaacacgcattactggggcatgtgctgagcttgtgccagtgccaggacaggacagagacggatcctatcctgtgaaggggctgcctgctctccctccttccagggtccttcaaggatcttggcagggggatgggaggttggtgcagggagcactaaaggtcctagcagccattcataagtccatctatgtctccagccccacatggtatcagccgcttccctcatcctcataggcgatggcaatccctcgtcttccactcacagcttctgtcactggcgtctgacccaggcggggctccagcccttgccagctcccccacgcgtccg

SEQ ID NO: 47221 - DNA, 470 bp, Homo sapiens
ttgctttgaaaccgttatgacatgattacgaatttaatacgactcactatagggaatttggccctcgaggccaagaattcggcacgagtgggtgaaagggggaggggggaaaggttcccggggtacctagacccgagagctggcctgccgggtctggcccctgtccaccttcaaaagttttccaactttcccggaaagcccccaggggtctgcttcctcatctcagagcagagatacctggagctaaactctaggttacttggagacccaggcgtccgggccctaacagctcctgcagaacctttgaccaaataagggcaaagttgcttctcttgcctcgcccgcccccctcccttcccctctccgcttctgcttttcctgaaggagagttctgagcatccaaaggctcctcacttacctcactgactccctttatttcctgggtttactttccccattaacactgacat

SEQ ID NO: 47222 - DNA, 1382 bp, Homo sapiens
ctagtctcgagttttttttttttttttttctgtctctgtgtttgaagtttcagtttctgttttctaggtaaggcttatttttgattagcagtcaatggcaaagaaaaagtaaatcaaagatgacttcttttcaaaatgtattgtttagcacttaactcagatgaatttataaattattaatcttgatactaaggatttgttacttttttgcatattaggttaatttttaccttacatgtgagagtcttaccactaagccattctgtctctgtactgttggggaagttttggaaacccctgccagtgatctggtgatgatctgatgatttatttaaagagccgttgatgcctcgcaggaaacttaagtattttattaatatattatataggaatttttttttattttgctttgtctttctctcccttcttttatcctcatgttcattcttcaaaccagtgttttggaagtatgcatgcaggcctataaatgaaaaacacaattctttatgtgtatagcatgtgtattaatgtctaactacatacgcaaaaacttcctttacagaggttcggactaacatttcacatgcacatttcaaaacaagatgtgtcatgaaaacagcccctttacctgccaagacaagcagggctatatttcagtgacagctgatatttgttttgaaagtgaatctcataatatatatatgtattacacattattatgactaggaagtatgtaaggaaatgatcaggaacaaaaggaaaatttctattttcatggcaaatatttttgcatcagtcatcactctcaaatataaattaaaatattaacactcctggaatgcctgaggcacggatctgggatttttaaatgtgtggggtatttcattggaaaaggaaggctcttccacccacttggtatttcaagaaaatttaaaacgatcccaaggaaagatgatttgtatgttaaagtgactgcacaagtaaaagtccaatgttgtgtgcatgaaaaggattccttggttatgtgcagggaatcatctcacatgctgtttttcctatttggtttgagaaacagggctgacactattctctttgattagaaaataaactcataaaactcataatgttgatataatcaagatgtaaccactataaatatgtagaagaggaagttttaaaagaccttaagctggcattgtgaaggaacaccatggtagactctttttgtaaatgtattttgtatttaatgaaatgcagtataaaggttggtgaagtgtaatataattgtgtaaacaaatcctgttaatagagagatgtacagaatcgttttgtactgtatcttgaaacttgtgaaataaagattccacctctggttatcctgt

SEQ ID NO: 47223 - DNA, 3799 bp, Homo sapiens
gaattccgagacttgttttactcagagtggaaaattttgccagggacaaagtcaacacaaagaaacaaacaacaaaaaatagccagaaagagaacagttaagtgcagctcggtgagtcccggcagttccttcccggcactggctcgtccctgggttctcaaggttccatgcggccacagcgtccgtccacctgtccacgcgagccacatgctgaaatggaggtggataaaattcatcaggcagctgctgtaacacggaaatgtgcagatgccagagtagcttcgtctgaacttgaacaagacagacaaaaggaaatcattccataggctgaaaacaaaaacaaaactacgttgtttctttgccccaaatgaaatccacggaaagggcctgtgtgattctgaaagtctcagtagaaatggagtgatgtgaaatgcccaagaccccattattttgtaaagaaaggacacctcaaaatactctaattccacatgtctccgctgcctggtgggtcctgtgagggcggcggggatggctccccccgcgtcctgaggcctagtcttgggagacccactcacagcaggcgctggccgtgccgtcctcacacagcgatgcctggtcctcgcgggaggacagagtttcactcgtaggtagaagctcagccccagcaggtgctcagtggagacaccgtctcccaaatcaggttttgttgtgtgtgggttttgttcaagtgtgacttctgtctttaaggagtgttaaggccagctgggttttgggttttcagtgctgagaggtgaagtccaaccacagggccctgcacccccgagtgctggcgggaggccgcgtctccttttggcaccacagagttgatatcgttaaagaaaagctctcccggtcgctagttctggacacccttttcccttacggctgccggtggcgtgtccacgctcagggcaatgacgatgccctcgccgtcttctgtcttgatccgcttcagctccggctgctccggctggtcaccgttgtggcgctttgtgggcagggaggccgatgcggatgcgtgtgttgccaacatgtgcaaaggactcgccgcggctgcagttggtgtgagctgggcaaaccccgtgaccacctcagatgctcctccctgcaatcgcggtcgcagtctgtggccgcaggtgtggccgcaggtgtggcctcaaccgactctaatgtgtctacaaaaaatgtgcagacagccggggccactgcggtaggccagagatgcacagacgcgcagtgtgactctggtttccagtggcctttctcctacgctgactcggaacagcatccacgctgtaggtgtctctggacaaccttccacctgtcgtttctcatcccaggttccgggctgccggaaaaggctttgtctcttgtctccagaagcacctgctggtctgtctggatggggcctgctgtgtcaactgaggcaactccagtctgagctggcacatgggggccttctgaggcccaaggggcccattgttcacctggccgtggaccgcagtggggactgatgccacgtgagtgccgttttgtgttacagtttttattggtagctggtgttgacctagaggtgcctgttgtactatggtcaccgtctggaccggggtggtctgtgccgtctgaatgatccggctggcagtgccgagcgtggcgtggccaatggcgggaataggctctactttcactttgacttccctgtggtctccattctcctgggcctctgccttaggaggggccagcacggctgccggggtgaccacagcttgtccagagacagtgtacgtgttcgctggggccagtccggccacactggtgaccgacaccgctgggatctggtggacgacgtgaaccgtctgcacgacggcgtggctgggaggtcgaggtggtcactggggtggccacagtgtaggtgacaggcttgatggcctgtggtagctgccgctggacggtgattaagactggctgactggacagaggtgaccctggggcgctctgggcaaaccgggcttcctggatgacagcgagtttgggctgtgcagcgccaggctcaggctccaggggggccggcgaaccttccctcgacaggctctcaggggtctgggcgccactagagtgagcagacagcactcccgcgtgattgggagaggctggggcactcctagaagagagcggtcccagaggggttctaaagcagggcacgcccctaggccgtcgtttcctaaaagcctgttctattaatttgctttcagaggctgggtctatcctccagaacgagcctttgcctggttcttcctgggaacgcggcactttgatgaaataacgattcagagagagattgtggcgaattgaattctgccagcccttgtccgcagtcctgtagtagggataatttttagtgatgtgtgtataaatcccgttcagggtgagctgtttgtcgggagccatcgtaatcgcctgaactatcagctgcgcgtaggagtaaggcggctttgaatcatccttcgggctgtctccacctgaagcttccttttcattttcaggctgtgagttgtcagccattaaattgaggtcagatggcatcactcggcccaccttgtaccctgaagaccccgctccccgggggctggaggggcaggagtttgcagcgctgatggttcccgtgggggagggcagagggctgatgaggtgggccatggtgtctggaatgttgatggtcaggggcgagatgtgtggctgtacggccttcactggagactcagacgcctcctgcttctctctcttctcgctggacagggcagtgaacgttatcttgatgtttgtgctcgggaacctgaatgtgcacacgcgcggcagctgcagcggcggcgccccgcgcctctggaacacgccgtccacgaatacctgagccatgtcatctgtaatcctcactttctgtcgaggagggagtaaagcttccagctgaggaagcttttccagagaaagccagtgtttttcaggaaagattactaaaaactgtatgatcagagccaaagcggagctgctgctgaccgaacctcagcctctcagacttgatgatgaagtaggtggtcctgaaagttaacaggagggctggggtccctgccaccagttttcacctagccagtcttgagtcttgtccgtgcaaaaaggattcacagaaatggaccagttctgttctccaaagactgcagcaatgatatttcagtctgtgaacttctattatgtaaagaatctctagtgtacaaagggactacatcgttggcttttgaccttgctgaaaaggaacatataattgtatggatggtaggattaagttgttgagtagttttgtaatcaagattttatgtaacatttgtaaagggaaaattagcacttttgtggttcttaagggaaaagaaacagaccttgtggagattataatttccttggtttctgttaccactgttagagggagttgtatcatttaacatatagtaggatagtttaagtgtagggaggacaattattgtctgaagctaaaatgggttatttataggactgatggaaatgatttcatctctgccatctctaaagcacttttcattgaacatgttagcctaggatacgtacagtaaattaacaatgatagcagcagatgcctagcttcatcctggggtttgcttctgaccttgttcatgtgtgtgccaccaaacacgttattggcaccttttaaataagctctcatgatccaggtggtgtt

SEQ ID NO: 47224 - DNA, 1852 bp, Homo sapiens
ttttttattttttttttttcaagctttgtctgctttatttcactacattaagttaagcaataaggcaaaacagtaacctgtcattcataaagatcaaggagtacctctctgtcccaaaagggaccaaaaagggtgtttcttcacaaatatgcatgacacttagctcattatgctgataagcacttcaaacaaaagaaaaggtcagtaggtgaatcaagtaacaaatccaaattaacttagcctaagtttccaaagctgtagtttcaagtgctaatgggatctaactttcctgtggtggtgcatactgactagcattaaaatttttgcacctcatctaatataaaaaaggcaacaaatacaattcctaattcaccagctgcaggtattgaatcatttctacgaacacacagaatactagcttacactaaaacctatcttgaggaaacattaaaccagtggctctattattctgcaagttagtttggcttctgaagaaaaaagtttatgatcaaagtgttttgtgtttctgtgtatgggaatgatgagacccatacttcaacattattactttggggaataaataccagctacctgccataaacgcatgacatgtgtgtagtctatgcaaacgtgtaaacatatgaagctattctctactctatgcccatttcctccactggcaaatatggagcagtgatttcacagtaggctctagcaggtagtgaaataaaaatttgagactctgtggggtcacaaaaaaatgaaactctttctatagtctgcaaatctgtaattacccatccccctgctccaactcctaagaggctaaatgttattaccataatgttagagatgagtattttccttcttacactgcatcacatatattactctgtaggactgtttcataaaattggcttgacctttgtacaattagtacaatttagtgtcttttagagtacaatttagtgtcttttaaaagcttcctaaatatttaaaacattttcaagggaagcttacaaggactatgtccccatctgtattctacattataatgttatctttaattttttaagacttaaaacaagaccaaggtaaacaaaaaatctgtattttcctcaagtctcttggccacttactaacaatacttttacagaaaacacggtgcagctggtggtctactttatcaagtttcattttagaaaacatcatagaaattaaggttagcaacccaactccaggataccaagtgaaaacagcaagtctgctgttaggccagaactgtgggctacttgctgaactattttatggtttacaatcaaaatggtcttatttgactcaccacatgacaaaagtcttaaacttagtaagggggaaagttcttaatatccagttttggattcaagagattataatagttaatttccccttcaaatcaatggaaagaatgctagttgagaatattctaaaaatctagcctttaaaatgttttctgcattccagaaatgaacctgtccactcaggttttctttgggttcttttccaggtcccaaacagaacaacttaactgagttaaagaggcagaacagggaaggggtaggaagtaagacaaataaagattgcccccctgtggcagcattaatccctgggtattgtggcaatattgaaaacgaatggaatctgctacccccttgacatgacatgtaattgtttgcttctcaaattcttcttaaaagatccatattttactgggaaaaaaattaagaacaactaatacgtgtcctgtattcacttagaaaaagagggcaaatgagagtgccttaacaacttcacaggtttttccaatcatcat

SEQ ID NO: 47225 - DNA, 409 bp, Homo sapiens
  misc_feature (1)...(409): n = a,t,c or g
ctttgagnaccanctatgacatgattacgaatttaatacgactcactatagggaatttggccctcgaggccaagaattcggcacgaggcccaggagccagaatcatcttctttgggtctacaaccatcttaatgaacttcctgtacctgctgggagaagttctgaacaactatatctgggatacacagaaaagtatggaagaagagaaagaaaagcctaaattggaatgagatccaagtctaaacgcaagagctagattgagccgccattgaagactccttcccctcgggcattggcagtgggggagaaaaggcttcaaaggaacttggtggcatcagcacccccctcccccaatgaggacaccttttatatatnaataatggattaaccntagaatacagttgtttcc

SEQ ID NO: 47226 - DNA, 743 bp, Homo sapiens
gcggcacgagaactggaaagaaagattgaaacagagttgtgaaattattcagagtactccctatgggcgccccgcaaatattagtgggagtacctcatcacaaagaatttatatcacttaccgaagagcctctgaaaacatgactcagaatacgttggctgtcactgacatatgtattattatacccagtaaaggagaaagcccaccacacacgttctgcaaagtcgacaagaatctcaataacagtatgtggggatcagcagtatacttgtgttataaaaaatcggtggcaaagacgaacactgtatcttacaaagctggcctaatttgtagatatcctcaagaagattatgagtcattctcactaccggaatctgttcctctattttgtttaccaatgggtgcaaccattgaatgttggccatcaaatagcaaataccctctgcctgtattttctacttttgttttaactggagcctcagctgaaaaggtttatggtgctgctattcagttttatgaaccatactctgaggagaatctcacagaaaagcagagacttcttttgggtttaacatcagcagatgggaagtctgatagttccaaaacaattcatactaacaaatgcatctgtcttctttctcactggcctttttttgatggcattcaggaagtttctgacttttctgtatcgttaattccatctctggggctcatgtccttccaattgaggaggataattccca

SEQ ID NO: 47227 - DNA, 1143 bp, Homo sapiens
agaggcttttacccatttcccccttaaatcgtgaaggcttccccttccactttttggccagcacccaacttttgcaactatgggcatttgtactttcacaaccttttgtgctaggtagatgcctgtgactttttaacttggggggtggggctgttgcaaatgaaggaactttttacatggatctttttaatctcagttggaacgcgggaggggggaacttggttcttgggtcacacaagctctatcccaaagcaaaatccaaatgttaataatattagcctgatgcagataccaaagataatttctttcctgcagaaccttagactcgtgtattaagtacgattacccagcacttgcattagtctaacctcagtaattccaaagcttagatgtatattttggtatatttctgggatattaaaaaaaatgtcgtttaacttcttgtttgtttcagtgtaatgctcttaaagtcatagcatgaaaataattgaactgtcctattcttagtagtttgaaataatagtatttttgtatgttttgggtgtgtctatgtatgtattaacataacagttttcactgcctaggtgttcataataaaaaagaaaatgaaaaaagttctgagtgtacataatattcaataataatctcccaccaggtgtcaatttagattgcatattcctcattactgttcccaactgggattttgttttcttttaaagagacagtgatcgtgtttttctaaagatgttttttttctctctttcaatatcttaactcactttttttttcttccttttttgtcttaattattaattcaggggtgtttgtccactgttgtcaaacgaggggcacaaggggaattggcccccgctacctagaactttttgttttatgtactttaaaatgtgagtttgagttcttctttgtggaaacttaagatgtggtgtaaatgattctttccaaaattgtccagcagcttgaatgaggcagtgacaattctgaggtggtttattgggagtccttctacatttctcttagataactctgcactctgggtggctattgtgtagccttactgccccagagtgcctgttagccaaatatttcccctctgataggaatattttctaagaatcagctgat

SEQ ID NO: 47228 - DNA, 1398 bp, Homo sapiens
gttttttttttttttacaaactagatagaaacctttatttcacaactttatcatcattcacattctaaaaagacacggactgggggacacagctgaaaacagtgggaggccagatgctggcatcttccagacgggagcatagccatggtcactctagccgatgtctcctggggctctcaggcggcaaggaccagatgcaccactactgtccaatcccagttttacttagagccacctccttttttggggccattagtccttatttcatgccagattttcactagcggctccctgttcttccaaatcagttcatgaccgtaagtaacataccatattccaaaaagagctcccccaagatgtgccgcatgatcaaaaaatttccatccccaggatcattcctgctgtatccatggcgataatggctttcagggcattccctgctgtgaacgtgaacatcggaaggaaaataatggcaagcctcccttctgggatcttagtgcagacagctgcgaggactgtcatgatggcaccagatgcaccaagtgatggtccatatcttcctgtggcaactttacccacgtaactgacaaaattggaaataacacctgcagataggtacactgccatgaactgctcttgacccagaatgttcactatgctggaagagaagctccacaaaacatacatatttgctgccatgtgaaataaggagaagtgactgaatgttgacagcaacattggagaacaaaggacctttgaggctggattcgatgtgaaatatctgatcattgtccgctgcagagaaggtactctccataaaccggaattccagggaccattgcagctataatacctgtcaccagtccgctggcccatccactttaggttattccaccacttgttaatcgtcctttctgaagtcttccttcttttttgtggtccttatgcctatcccaacccaatcagcttttatacccatcaaaataactctggacccctggatttcagtgaattcatattgcccaaatagcagctgatccaaatgcacagcctgtaaacccaacagtaaaaaataaaggttttatgagacttccttataggatagggagaaggataaaagactgtttcttccacaggaggaatcaaagcacttctcttgtatgcttcaccacttgtccctgggtctgatcttcgaggttcaaccttcctgggtgcttttctgaatccgcatttttgttgaataaagaagttaaacctgcgtccgaggagctgcggcggggttaggaccgcagtgagctcctcgcagctgcggccgcccaccgacgcaccccacgcctggccgcagccccagcctctctgcgcccagcctcgccacgccatcttcccaacctctgcccc

SEQ ID NO: 47229 - DNA, 870 bp, Homo sapiens
  misc_feature (1)...(870): n = a,t,c or g
aaaaaaaaaaaaaaaaagtcagttgcagtggctcacgcctgtagtcccagcactttgggaggctgaggcaggcggattacaaggtcaggagattgagaccaccctggccaacatggtgaaacctcctctctactaaaaatacaaaaaattagctggatgtggtggcagcacttgtagtcccagctacttgggtggctgaggcaggagaatggcgtggacccgggaggcagagtttgcagtgagccgagatcccaccactgcactccagcttaggcgacagagccagactgtgtctcaaaaacaggaaagaaaacaaaagaaaatttggactattgccaattacaaatatttttagagaagaattcaaaacagtaactgtggatgatggaaacaatagttatgataaaagtctgatgaaacttcccagttcacaaggaaatttaattacttatgtgcagcattttaagacagtaatcagaatcatgactgacagcatcatatcagggccagcagacttttataaatttcatacaatcttcagaaataataacttttttttttggatagattctacctttgtcacccagccgagatcccaccactgcactccagcttaggcgacagagccagactgtgtctcaaaaacaggaaagaaaacaaaagaaaatttggactattgccaattacaaatatttttagagaagaattcaaaacagtaactgtggatgatggaaacaatagttatgataaaagtctgatgaaacttcccagctcgtgccgaattcttggcctcgagggccaaattccctatagtgagtcgtattaaattcgtaatcggtcatnnaagagatctgttatnnanaacaaaaa

SEQ ID NO: 47230 - DNA, 315 bp, Homo sapiens
gttttaaacaaaacaaagatgacacaaaaattgctgctgcttgtgcagagggctggcatctcaactgcctagggccctccctctttcccctctccctaccttagctgtaccacactgtccgttccctccccccatgatagggacagcagaagatgcccaggtactgaagacaaacgccaagtgactcaggcgtgtgggacctggtagacagcttgtcattttctggctttattttatgtttttctttcttttgaacccttcttccccatgtctagaccctctgagagtactcatgtgtcttattttttttcctcg

SEQ ID NO: 47231 - DNA, 1306 bp, Homo sapiens
tttaaaagtatcaaataattttattatgaaagataagccatttattgaccattcacttttctaaaaaaacacaaatgtgagaataaaataaacatacctaagactcactggcccctccaggacaggaagcagccctggacagagagcctgcaaacgagtttccttatgcctaatgtctgaacttctcatacattctaggatttcatgtttcgttacaaaggaaaggaaactggctagaagattcatgtacaagaaggtcacaactttaaagctatctgacgctaatgacttgtacaatctggtttgcaaactctgagagacagtatcaaataagcactgtcaaagactactcccagctaatcctttactgtcatttttctttgaaattgtctttgggactggctatgttctcactgtagcttccgtttatcccacagcacaaaccctaaagtccatgtgcagtctccatgttcaagtataaaagtctgtttcaggacaaccctgggttgctgtagtgtttctctctctgtagtgtctaacttggtgtcatgcccttggacaggctggccaaatggcagcacaatgcagggggtgacacggtcaactctcccactgccgaacttgctcccctttcaatctggtcactgcccatggtcaaaggttgaaatcttgagatcagtgacgaccttggcctatcttcagtctgaagttgcactcttatgtaaccgaatccatttcttcaccaaaaattagctttcaaaaaggtgtctggcgtattccttaggaagtgtcctgagatggagctggagggtccttggcttcgggctctggagggggtgctggcacagctgcttttttctgggccgcccaggaactcatgaattgctcgttctatttgtggcctgaagatgtggttaagttttggatccaccacctgagaaataatcctgtctactccagcttccaacatccctgactgaaccacactctgcctcagaccatttcgcaactggtttttgttcatcgtaggattccattcctgcttgtccagatgtgttgacacaaaattatccactttctgcctcagggttttggtaagctggcttggtgtccacgtcggccaggcagtcccggcggaagctgtcaaaaaggccccggctcttgagctgctccacgatgagagcgatgagctgcgggtcgccgggaggcagcgaggccgggttgatggggccagccgcccccgctggccccagtagcgccagtcgctgccccggcagaggcctggctagttccgccgccctcgtgc

SEQ ID NO: 47232 - DNA, 858 bp, Homo sapiens
ttttttttatctcagaggtaaaactctttaatctcagagcgcccctcccaactgccgatcccccaacccctcactctctcccccacaccagggccggagagtgagggcccctgccccccaccttgggtggacgagggccctttaaggcacctgtggaggtggggggcgaggggcgggagctggtaccatcctggatgcagggacgggcttcgattggcaggctgttgtggggatggatggaaccaatgaaagggggtgccagaggcagggacagtttggggccatccctgagggggtcagggaacaagttgtcgggacgtgggcaaagacgaccccagtccccgtagtgtaaagaacgtaaattgaaggccccgggccaattctgggaagaggagggcttggccacgcccccaggaagctggagccaattgggagggagaactcaggaaaagcggacggtgactatgtagagactggtcaagccctttacaggatttgagccaatcaaaaaaagagctgtccagcgactaggggatggagccaatgccgtgcgagcaaatcccttgtcgctaggcggaaaacaaaggagttgacccatttagagcttagaactcagcgagccaatcccttaatagaaggaatctgtcgctaggcggagagagacgacagacccaatcgggaaacgggacagatgccgctcctcggcgcggcaggtcgtgggctggaaggacggcggggattggcagaggcgggacaatcttgggaatgggagacgcaaggaggccggtcccggatcggcctcagattagcaggccccgggagtggggcgggggcgtagtgtgggactgggcggacgcg

SEQ ID NO: 47233 - DNA, 1165 bp, Homo sapiens
  misc_feature (1)...(1165): n = a,t,c or g
tttttttcttgggcattagggatgatttatttattatttgtgtccttgtccactgtaaaaaagggaagcttaaaaacacaagtgtgtgttcaggttcccagcctgaatacaaattgtattcaatttccgagtgaaatgtgtccagacagcaggagagatctacttatctgtgagactgaagagcctccttggaacgaactaatcctgaaagaagaactacttgtgaagggcaaacagtttagttcaagaaagcaaggctatgcaataccacagcaaacttcattcaatgaagactgagctccagccatgtcttaagagcgggaagaaaaagcagcaaacaggctctatctccacaggctctggggacagtgacggctgcagtggctccttcaggatgctcaaccctgggctctggaacaccaagcacaggcctcagctcttccatgatgaataccttttaaaggcatcagctgcagcatctctgttgcatacaaattcactaagtacaaaaaaactcctagacttttgggcccattgcttattacataaaattgtttccagcagtagggtttaagacaaaacacaagtgaaataaaatgtacaagtttgttccatagaaacactgaaaacacggttatgtccttctacaattcagtaaaacaaacactgccacaaacaccctcaggttcacagtttagatttcattcattcaataattattttctaagtactttcattactggggatgcagtaatgaataataaggtccctgttttcttggagcctctgttccagcagtggggcaggggagacagacagcaaacaaaataaatcaatataccacgttagtagtcacatggttactgggtagggaaaggaaagcttctgcacacctaaaccccttaagagcaatttgaggctgctgcaaatatcacggcctcttttaggggaagataaaaactctaagttttatatatatatatataaatagagatggggtctggccatgttacccaggttggttgatcttgaactcctggcctgaagtgatcctcctgtcctggcctcccaaaagtgctgctcgtgccgaattcttggcctcgagggccaaattccctatagtgagtcgtattaaattcgtaatcatgtnatagctannnttcaa

SEQ ID NO: 47234 - DNA, 1365 bp, Homo sapiens
tttttttttggtggttctcaaactgtgttcctagaagcatcccatgtgcccccaggccaagaggtccaggttctaccccgacccacatcccctgaatcagagcagcttttttttcattttaaaaattttgatctgtttcacacattatatttgtttgaacttcccatgtttaaaaattttgaagaaaatccctggagtagacaatccctagagcactgacatgctgtggtccaaggttcaccaggaacagtgcctgtgccctgccacatggcggggtttccttcaagcctctggtgatgaaggtgctcagggaaaggaggacggaggggcgcggaaggacccagccactgctgccaccctggcctctgctctgtgttcacgggggagcagactctggggaggcgcccctcctcaccacggcctgcaggccgggctggagcctgcgccttcaggggccttgcatctccagctggaccccctggcacaggatgtgctgcagtagcccgttgaccacatccagagtctcgtccttctccagcacgatgtcataggagtccatgtagcgctcccgccgctcctccaccttgtcattcaggaagccaattttgagaatgttctgcacaccaggaaccccatcggccatggtgaggtccccgatagagtctcccagcaggatgacattggttttgccctcaagttgctggaagtaaccacagttctcacacacagagctgttcttgttgtatgtgtgtatcagctggcccgttaaatcccgtggagaaaaccatcttcattaaaatccatgtagttagacacgatgtggatgttggggtggaacactttcatctgtcggataatttccttccaggatatcaccaatgcccgcagaaaagatgaaaaggggaatgttgttatggtagagtgtgttgaagaaggtcttatatccctccctgagcattgcattggactctctaaccacctgggctatctgaaacttctgaatcttctgctgacataggagattgtgcgctttggtccaccattccaccatatgaggtagcttctccttgacggtccggtgtgggtcgatctcaattgggtaatagtggtgaaggagcgctgtgagctctttccgacactcctcactgatgatcttgctattatccagaatattgtaagaagaagggcatcgctttccattatatgcaaacctgctcaaggtcatgtcaaaatcagaaatcacctgtaaccggtctccgccgcccttgcggagggcgcccacgatctcctgcacccgcccaggctgccgcatcaggaccgtggccttcatcagggtgctcacctgtcccgagacccgagagaacc

SEQ ID NO: 47235 - DNA, 2326 bp, Homo sapiens
atcagtcaagagagtaactgaaagacctgcgggactgattcacgtggggagaatgttcaaagcactgtcacccggcttctccgcaggctttcctcttccccagtggcccactaatggtatcactccgagtctcaatggtctggctgtgttagactctctccttttgtgtttttacatgcagcactactcttggttttatttcagtctgacatagagttaactgcaatcagattgtagtctgatttatatgaataacggttgctaattttaggactgggtgaaagctatgccattcattatgtctggctgtattagaatgacatttcctatgaatgtctacggtctgttttaggtgtttgctaaacttctatggcttccagggtcttcttacaatgcattcctttaacttgtccctggaagcattgctacccattttcagcttctctgcctctcttctgatacaaggacagaagaattgggtagatattcaccttttaggggtgcaagtatagctttaagtttgtgcaagtgaaaatgttgaaaagtgagtaacctcgatattaaaatcatccttgacatgaaacagggtgaagagaagctgtccgtggcggctggtgttggctggcattggcactgggctgtgctgacctagccattacaattccaggggctaagaaggctcagggcagacaaagtcaagaggaggaagtttttgtggacaatgaaaagttattttcgtacctttctaccaaaaccaagtttcaggaaaataactctatgttgtttattttcagtgacacttatgtaaggccctgtgagttgtatttatcctgtatccggcactgctaagcttttcaaggtatctttccaatcctgctggatgtgggcagttcaatgggctgcaggggctgggccaaacctccccttagccagtcaggcacgggcattgttccttatcaggaataacaaaggtactacatctttccagccatcagcacgttgtacaacttaactttttaacatagtccgtctgtttactgaggcactggcgagtcccagggctgatacagaaccttccctagagggaataccagagttagctgggtatagaggtggctcaaaggaagtgtccgtgggcagggggaggaatgaacaaaatggcgctgtttctttggctcagactcctagaatgcttgacaagacagaatttttttggaagaacctcatctcactatagttacttttttcacttttgttatatatgtatttattagagcatttgaatattggtacctttaaaagggtcatttggtgttttgctgttgagctggtttttgagtcatagatcttgggcttcctttagaagccacttaacttccatacactataataaactgtgaacatatttttgttacctaatgcatccactgatgaacatgcaaactttgggcataatgtgaactaaaattgaaatggaaaatgttagtggccattttgcaacaatgaagaggatagcactttatctagatgaaaactggatttcttatctttgaaatatcttgaactgtttattgctcagaacttaagtaagcatgccaacatttcgtttgtttatgcttgaagtgaaatgttttacttttcactggagaagacaaaacagggtgatcttcatgttattgttttatacaagtgatggaaatgtaccttgccttgtttagaggcaatttcacatttataaatatttttttttcctccatgaaacttacgcagtaatcactacctggaaggtgagttttgatctctttttaaggagaggcactttccaactgaaggtgattgatgtagggaaatgtttgtactatatagaatccatatatttgactgcaagttacaaagttttaagaacatgatggttggtctctaatatatttggaactgattcataagaaaagttattaaaattatctttgaaacacctcttgaagctaatttattagaaaaaatatttcagttggaaggctgtagaagtaatgtttaaatgctaagtcataagttcaggatatttcttttctatttggttgtgcaaaatgtttttcccagttatttaatcgaagtaattccttttaatagaaagagtcagttaaaattcagcattcatgggatagatttttggaacgaaaaagggtaagtataagaaaatattgcaaacacattaaaacagttgtatggtgcaggaaaagaagattggaaaaagaccaaaacacacttctccagcaacactccatcagctttttaaaatttagagctatctgctaattttttccct

SEQ ID NO: 47236 - DNA, 775 bp, Homo sapiens
atccatccattcatccatccacccacccacccgtccatccacctacctattcatttatcacccatccatccacacacgggtctgtgcagattcattaatatccacccatgcatccatatttatctattttctatccatcagccatccattcattcatatccatccatccatctatccatccagatgtttattgagcacctgtgttctgggtcctatttgggagccttgttaaccaccaagaccttcctaagccatattgtggtatacagacagatacaaaaaaaaaggctctctccctgtctgatctcatgcagcctgccttggagacaaggactctccccagtgctgtgtgcttggagagaggaaagcacacagccctggagtcagagacctgggtttcaattctgtctccacctcttattagctagctatggactcctctctgagcctcgattacctcatctgtgaaatggggtaatggtgtgagcagcgtttccctgggggatgtgatgcagcccacttggggcctcatgcactcagcatctctttattagcaaacacttattgaacccctagtacatgccaggcactgttatgaggtcccggggatactttataacaaaagggacagaagcattcctgctcttgtgaagtttacattgactagatagtaaacaaaataaatgaaatatgcagtgtgtcagtgctggtaaacccgtggagaaaataaagcaaggttggggtctggggttgggaaaaaaaaaaaaaaaaaaaa

SEQ ID NO: 47237 - DNA, 322 bp, Homo sapiens
catagttttcatctgtgaccctgatatcttagcctctatctcagaattgagaaatgagcagagtttatcagaaaggaatttcattgctggtatcttttgtgtgtgcatgatgtatagtacacacagctctccttattgatccttcacaggtgtattatttactttgccttccaggtgtccgcaaatatggtaaagattttcaagctattgcagatgtaattggcaacaagactgttggccaagtgaagaacttctttgtaaactacaggcgtcggtttaacttagaggaggtattgcaggagtgggaagcagaacaaggaac

SEQ ID NO: 47238 - DNA, 456 bp, Homo sapiens; identical to SEQ ID NO: 2454
  misc_feature (1)...(456): n = a,t,c or g

SEQ ID NO: 47239 - DNA, 2082 bp, Homo sapiens
  misc_feature (1)...(2082): n = a,t,c or g
ctatttctcattcctaagccttaccatgagtcagagtgttaagggggcctgtgaaccagtcgtttggtggaggagggtccttcccacacctttgtttaggagtcatcattcacacacacacacacacacacacacacacacacacacacactctctgagcacattatctgtgattctttcatcctcccagaaaggatcagtgttagaatgggaaatagagtgtgccatcttgctcttttgttggcagatgtccccgcttccctccagccccccatccttggcatgtatattagtaggagggcttcacaccagcactgctcactgcgactcctggaaatgtgtggggaattgggtgagcccctcttccccacgtgctcccatctgtaactctccatctgtgatttgcaacaggtcttccactggctcgaggctgcgaggctgaccgacaggggcgcccaatagagattgggaatggagtattgcacagatgcagctgcacaatggtcttcctccacccctctggggaatcaccattaggcaggcctcagtagggcaaaatgtttatttggtaccgggggtctcctgacctgtctagcattcccacccactcttctgcacttctttgcaaggtaacttgaatcatcacttatttctctgccacctggttttagggactggcactctataaatgacgctgactttgtatagaaggattttgctaagggggcaaaaagcccagataccattttaactgggcccagctcattttctcctttcattttacaaaagaaatcatgcagaagcatcaattaaaactgatttatttatgttggtacatccaacaaaatagttggagccacaaggcccttgtctttttaaaaaaacaaaatattttgaagatggtgaaagtgactgattttaataatgagataggtcacttaaaataacagtgcctttgaccttaaaacatggcactggcccatgtgacctttgccatttcccagtacttccctttacagtctgcagcctataaacagtggtgtctcaaagcaaaggaaacctccacaagtgctgcaacagtgcattagtttttatgtagcaatttgtttataaaaattcccatcccataatgcatgaccttcctaaaaatatccacagcctccataggcaaggtgagctttctgtgctacccacttgttagattccagccacctcagggattctgatccatgtcattaacgaccatcccagggtgtgagggcctgattaaagcttatcgaactagacatttgtttattagatgagctcggcattattattttctcaataactggtagaagggaaattttaaacataacactcaacccaaacaaaactacttcgtgaggctttcagcaaaaaggctgcttaaaagcatgaacccgggatgcagagcagcttttgtgcacggttccacttactgtaattgtttctggttctttcctctaacaccttccatgtatgtcaactttttatcaccgtcaggcatagactcgtggagattagtcattatagctcagacctaagctaattatttaaaataaatacatgtaaaggccactgccacattctcagcagacttccacttgcctaatgagattagtgattcaactgacttgaagcacagtaacatcttattttatgcacattccctgtcttttgctggactgatgaagccagtcacccgcccttctctgttttttggttttttttttcttaaccccaggtatatggaaggggagttgccttcacttttctggaaatttgtcttcgtctgacatattagagggcctcgttttgtcctgttcttgttcagaccctctcgttctacgtcctgtgctgaggggactgtccttaagctacaggacagcgagctgggtcctttctgccacttcttccccactcccatgcccagggaaggcctgggttgctgatggntactttattaaatgaggttgctttgcanttttcaacaggngaatgaagggaagacgtaacaagggttccaggaaactttttacaggangattggggttcccacaa

SEQ ID NO: 47240 - DNA, 772 bp, Homo sapiens
aataacatacctttttaatactgaaagttgacttctcatcattaaatgtagctagattctttatgtaacactttggaggggcagtggggacataatgggttgtggaaaatgtgttttaacatttttattttttttttattctacccgagttcattgttgtttgaaccatcctttaaagatttcctttaacctctaaatgttgtgcttttaggttgataacaaatgtaaagcactgaggagggaggaataaagcatacaagttaatttctaattttcgcaagcctgaaccatcctaatctgatagtaggatgtatggcttcttccttttcaccttgtgtgatgtttaatttgagacgatctagccataaaactagtaatcttgaattcctcttgagctggatggtgattagccattgtgaaaacagattatatggaaattgtgcatattgctaaattttaaaacatggatttatcaactgataataaaatatatcttacaagataaccacttgttttttaatgtaaaattgcacaagggcttaagtttcattgcctttcacagtttaatctgtatatgaaatggtgtagatacagtggaaatggttttccttaaaaccatttccagtcgacgcggccgcgaattccagatctatgaatcgtagatactgaaaaaccccgcaagttcacttcaactgtgcatcgtgcaccatctcaatttctttcatttatacatcgttttgccttcttttatgtaactatactcctctaagtt

SEQ ID NO: 47241 - DNA, 384 bp, Homo sapiens
gctggatgtgggaacttcagcactgccgtactcttgggaaatttgtccaaggccacccggctgagcagcggttgaaccaggacaccatcaggcatgcgtttcttgtctccaccacaccctcaacccacttcccaacgcgccttgcgacaggggctgcggtattgcatccacatgactgataaactagtaaacacacatgaattcattttaaaagtgtattcaatcagttaggtaaactaaaaaccttaagtcttcgttcgatttggaatgcagccagagaacaaatggaaaatttttcaaggtagagaagatgaaaactcagaacgccctcttgtggcatctctacccaccctaggaacactatggctcttcccctacacatgg

SEQ ID NO: 47242 - DNA, 462 bp, Homo sapiens
gatcaatcccagttatgttttatgttctttcttaccacacttttaagatttatactcttccttatgacttaaatagctactgccagtttaccagagttggcataaaaagcaaaatttgccattcctaatctcattgttcttattcaaagtgtggtttgctacctattcgtcaattgtaaaatcaattgagtggttctaacatgctttaaaaaatacagtagaaaataccagactgcactgagcatactaattcatacatatgaatttaattcatacccatatacatacaaatttaagaactgttttgcaaaacatatatctttttatgtacacgcatatagagacatgcatattgatttagttataaggtaaaatatatttcatggtattggacctagtcagaaaagtttgaaagccattgttttaattgatctcagactatttggctatttaggcaatttc

SEQ ID NO: 47243 - DNA, 1442 bp, Homo sapiens
aaagaagcctgtaagaggtgaaatatgtgatgtttgaagtctctttatagactttttatatatattttttaaaacactcatctagatgaggtgctttgagcagttctgaaaaatgcagttccaggaaagcaactgctttggttcctaaggaagaaattctaaataatgcaaacttttaaaataagcatctaggtttttgataattctgtctacttacaacaaacttgttagaacatacccactattttaataattattttctctacacaaatgtgtaatatcatatttgactttggcttatgcaggccataagttccaaaagataatttccctgcccacaaaggcataaacttgaaaacacatgagattgaatcaacatgctttaataggaaaagatgtatggtctatatatgtatcaatctggtgaatcctcgttctaataaaggttctttttcttttctatgatacacacagccacgctgataatatgcaaatgaacattttcctttatgtctctccagataatgtttattgtctgaggtaaattaaattcccaccagggtttgctgtcagtattttaacgcccacattagtatatgcgtccagggtcataaccccctaaaatccatcatgcaaccttattaatctgtcttgggattccagtttagtgcttggatttatttcctgattacactacatacgaaaagtgagacatctgccattcccaactctgggaaaaccaactaatatacaaccatataaatgaaggccatcttgatggtctcaacactaatttttatgatgcaaatttatacactgatttttgtaaaggacaaagttttaaaagcgtatttaacttgatgttttctatcagcataaataaaatggtcatgaatagtcattaaaaacagttgccagtgataatctgcatgaaggaaaaagaaccctgcaaatggctattgagttggaagtattgtttttgatatgtaagagatattcagaatgctcacactgaaaatgcctcaactttttaaagtgtaagaaaccaccatgagtggtgtctagatttctaatgaagaatcatgatacagtttggattaagtatcttggactggttttaaacagtgctttgtaccggatctgctgaagcatctgtccagctggtatcctgtgaaagtttgttattttctgagtagacattcttatagagtattgtctttaaaatcagattgtctcttctatattgaaagcatttttatgttttctaatttaaaaattaatattttcttatagatattgtgcaataaagctgaagtagaatgtgtggtttttgcaaatgctttaacagctgataaaaattttacatttgtaaaattaatatattgtactggtacaaaatagttttaaattatattttaaaaagcttccaaaaaaaaaaaaaa

SEQ ID NO: 47244 - DNA, 2098 bp, Homo sapiens
ccccacagcaacgtgacccagggaagcattggaaatcctgggcagggatcaggaactggactccacccacctgtcacatcttatcctccaacactaggcactagccacagctctcactctgtgcagtcgggcctggtcagacagtctcctgcccgggcctcagtagccagccagtcttcctactgctatagcagccggcattcatccctccggatgtccaccactgggtttgtgccttgtcggcgctcttctactagtcagatatcgcttcgaaacttgccatcatccatccaatcccgactgtcgatggtgaaccaaatgggaaccctcaggtcagagcggcctggcctgtgtgcagcacggcctgccttcctccagcagctccagccaaagcatcccagcctgcaaacatcacactctcgtgggctttcttgcgacagagggaggtcagagcagtgccactgatgcacagccaggcaacaccttaagtcctgccaacaattcacactccagaaaggcagaagtgatttacagagtccaaattgtggatcccagtcaaattctggaagggatcaacctgtctaaaaggaaagagctacagtggcctgatgaaggaatccggttaaaagctgggagaaatagctggaaagactggagtccgcagggagggcatggaaggccatgtgattcaccgatgggtgccttgcagcagagatccaggtaccagatcccacatcgacaaggcagtgcttctggtccagattgatgataaatatgtgactgtaattgaaactggggtactagaacttggggctgaagtgtgagccagtgtttattataaagacatttctttttccctctcaattccaaggcattggaaaaagagaggaacaagcagaagatgcctgcaggtatcactttgatcctatgtgggagcgactgaaaatagaatgagcttggttaagcacctctcctttgcccttcaccctgactcctgtcactgtctccatccccaaataaagctgaaatatttttttaagttagctgccgagaaaacattttgcatgaaggataaagttctgttaaaatacatccttaaaaaaagtttttcctatgcattgcctatgctttaaatcaacaaactcttcatttctaaactatgatctcatatttttctaatttctttgccaaaaataattgccatgttttgtcatagaacatgaaattcatttaccttgatttttaagaacagaccagtgtagaaatgttccttttgacttatagcagtataaaagtttaatgtacagtgaaagagactatgaacagacatagatttatcttattccttgagcgctaaaaactttaataaaaaaaactgcactaattttttacagcaatgcactaaagtctgagatttctcagaacatttatttatatataaaaataaaataccattatttaaattgcctttgggattagccccttccctttccttataaacacaggtagcaggaactgtgctgctcatttttctgttagtagtgtgtacttcatgccaggacattgggtattttctttaaagtgaatatagaatctcaagatatacgtagcttcatcattgacatttcccagagccaatagtcagcggatcggtcttgtgaacaccactgccagctcctgtgtctacatctcagaggagcccatgtgctctgcttctctccaccagagcaagctctgctgggcgtgcttctgggaagaaaacaattttctttaagaagaagatgaatgtccaggaatttaaagaaaggatcgattgccttttatttatgagtttctagctcttgaagttattcacatgcagttcagttagtcaagtaaaattttttttcaaataaaagtatccaagtggtgcagttattattatatccctctttaataattttgctttttatttttcccctcttctttttctgtaacttgaattttatttcctgtaatttatagtgtgtagctgtaaattgaaatatttataactgtgaaattgacttaattcatatgttgtctcataactttattttttttaaatgcatattcaggg

SEQ ID NO: 47245 - DNA, 739 bp, Homo sapiens
ccaagatggcggcgcccagcgaagtggccgcgatagcccctggcgaaggcgatggcggaggcggcggctttggctcctggctggacggacggttggaggcactgggagtggaccgagccgtttatggagcctacatcttgggtatcctgcaggaggaggaggaagaagagaagctggacgctctgcaggggatcctctctgctttcctggaagaagattccctccttaatatctgcaaggagattgtggaacgatggtcagaaactcagaatgttgtcaccaaagtgaaaaaagaagatgaagtacaggccattgccaccctaattgagaagcaggcacaaatcgtagtaaagccaaggatggtgtcagaagaggagaagcagagaaaagctgccctcctggcccagtatgctgatgtgacagatgaagaggaatatcctttctggagtctcggcaccattccctaaagctcaagccagacatatttgtgggtttacagtgacctttggcaagttgctaatccccctctatagcttaattttcccctctaaaatggcagtaatctatggccctttgtggatatgcggagtgatattggattagttgatactggacttatatttttcaacacataatcattatattcctgaaaactttggtgtaaaacaaataatgtcttaatagtccatttatattatgctttcagaaaatacaatatagctgtaattctttaaaaaaa

SEQ ID NO: 47246 - DNA, 600 bp, Homo sapiens
gggaatgccggtgaatcctgccgctgcgtggatgagaagtgaatgcgtgctcggagctgcgagtgacagcgggcaggaggcgcccagggacacttggtttctccagggctggaaggcttctagaaggttcctcatcaagggaagtgtggctgggggcgccgtctacctggtgtacgaccaggagctgctggggcccagcgacaagagccaggcagccctacagaaggctggggaggtggtcccccccgccatgtaccagttcagccagtaccgtgtgtcagcagacaggcctgcagataccccagctcccagcccctccaaagatttactttcccatccgtgactcctggaatgcaggcatcatgacggtgatgtcagctctgtcggtggccccctccaaggcccgcgagtactccaaggagggctgggagtatgtgaaggcgcgcaccaagtagcgagtcagcaggggccgcctgccccggccagaacgggcagggctgccactgacctgaagactccggactgggaccccactccgagggcagcctcccggccttgccggcccaataaaggacttcagaagtgacaaaaaaaaaaaaa

SEQ ID NO: 47247 - DNA, 602 bp, Homo sapiens
ttttttttttttcaagttgctttttccctttttattaaaaatagactcaagcactttatgtatcatacaaaagtttcattcgctggtggcagccacgggaaagactggccccgtagcactgattttccacctcccctccaggggactgggtcccaggagcagtgactgggcctcagagaaagcccataaagactgcttactctggaagcagccgactaggggctgttccgcgagcagctgtccccaccccacccaatggcaaaagttagatactcgaaagtgcctcttcagtgccaagataaactaacaagtggagtgaaatggaaaaccctttgattattttactatttcccagggcctgggatttgagttttccctgcactcaagtccttttccctacaaataggggtaggaaacttcatcctcagagactctggtctcctggtgtctgagaccagaatttcactccaacccaagtcttttctcatctgctgttctgtggtccatgatctacttgccctgtgacccaaggtttgtcctctgttcactcaaaaagaggtggagcaaaaacggattcctcccacaatcctctctgcctgagc

SEQ ID NO: 47248 - DNA, 314 bp, Homo sapiens
tctacttccacttaagctgcagaattgagggtgggccttagacctggtatgtggaggagagaatgattaattatacctggttcatgctttagattgaaagagctacctttcaaagtcaagtttattgaggtataattaacctacggtgaagttcgcgtttttaaagcatccagaattttggcaaatttatacagccatgtaaccagtgccacaatcaagtaataggacatttctgtcaccccaaaattcctcccacctctttgtagtcaattttctacctgccaaccccgggtcttcacaactgctcatctgat

SEQ ID NO: 47249 - DNA, 405 bp, Homo sapiens; identical to SEQ ID NO: 19780

SEQ ID NO: 47250 - DNA, 450 bp, Homo sapiens
  misc_feature (1)...(450): n = a,t,c or g
tttganaccnnttgattgattacgaatttaatacgactcactatagggaatttggccctcgaggccaagaattcggcacgaggaagcttcctattttcatagcagatgcattcacagcaagagcatttcgtgggaatcctgctgctgtttgcctcctagaaaatgaattggatgaagacatgcatcagaaaattgcaagggagatgaacctctctgaaactgcttttatccgaaaactgcacccgacagacaactttgcacaaagttcctgctttggactgagatggtttacaccagcgagtgaggtcccactctgtggccatgccaccctggcttctgcagctgtgctgtttcacaaaataaaaaacatgaatagcacgctcacgtttgtcactctgagtggagaactaagggccagacgagcagaggatggcatcgtcctggacttgc

SEQ ID NO: 47251 - DNA, 435 bp, Homo sapiens
ggaagcttcctattttcatagcagatgcattcacagcaagagcatttcgtgggaatcctgctgctgtttgcctcctagaaaatgaattggatgaagacatgcatcagaaaattgcaagggagatgaacctctctgaaactgcttttatccgaaaactgcacccgacagacaactttgcacaaagttcctgctttggactgagatggtttacaccagcgagtgaggtcccactctgtggccatgccaccctggcttctgcagctgtgctgtttcacaaaataaaaaacatgaatagcacgctcacgtttgtcactctgagtggagaactaagggccagacgagcagaggacggcatcgtctgggacttgcctctttatccagcccacccccaggacttccatgaagtagaggacttgataaagactgccataggca

SEQ ID NO: 47252 - DNA, 837 bp, Homo sapiens
cggtgcgagggctgctgcacagcgagcggacccgtatccggacggcagcgcgtgccccgagctctccgcctccccccgcccgccagccgaggcagctcgagcccagtccgcggccccagcagcagcgcccgagagcagccccagtagcagcgcatggccgggtggaacgcctacatcgacaacctcatggcggacgggacctgtcaggacgcggccatcgtgggctacaaggactcgccctccgtctgggccgccgtccccgggaaaacgttcgtcaacatcacgccagctgaggtgggtgtcctggttggcaaagaccggtcaagtttttacgtgaatgggctgacacttgggggccagaaatgttcggtgatccgggactcactgctgcaggatggggaatttagcatggatcttcgtaccaagagcaaccggtggggcccccacctttcaatgtcactgtcaccaagactgacaagacgctagtcctgctgatgggcaaagaaggtgtccacggtggtttgatcaacaagaaatgttatgaaatggcctcccaccttcggcggttcccagtactgacctcgtctgtcccttccccttcaccgctccccacagctttgcacccctttcctccccatacacacacaaaccattttattttttgggccattaccccataccccttattgctgccaaaaccacatgggctgggggccagggctggatggacagacacctccccctacccatatccctcccgtgtgtggttggaaaacttttgttttttggggttttttttttctgaataaaaaagattctactaaaaaaaaagtcgac

SEQ ID NO: 47253 - DNA, 380 bp, Homo sapiens; identical to SEQ ID NO: 19800

SEQ ID NO: 47254 - DNA, 463 bp, Homo sapiens
  misc_feature (1)...(463): n = a,t,c or g
gntgnnnnnnncattggnnacngctatgacatgattacgaatttaatacgactcactatagggaatttggccctcgaggccaagaattcggcacgagccagaaagtgccggaaaccggtggctgtgtcgccagagctgggccagaggattcgggactttccccagcaggccctcccgctgcagagggagatgaagatgtttctggaaaaactatgctttgagttggactatgagccagctcacatttctctagaccctcagacttcccaccccaagctcctcttgtccgaggaccaccagcgagctcagttctcctacaaatggcagaactcaccagacaacccccaacgttttgaccgggccacctgtgttctggcccacactggcatcacaggggggagacacacgtgggtggtgagtatagacctggcccatgggggcagctgcaccgtgggcgtggtga

SEQ ID NO: 47255 - DNA, 1007 bp, Homo sapiens
ttaatacttttaatattcccctataaaataaccctatagttaagaaaacatacccattctctcaaagcaaaataaaacaaagctttctttaatctgaaactaaagatgagctttccatttcttgtcaggatctgtgttgctaaatatttttccttctttttctagttttttcaaatgaagtaagagattatgtttagccatttcatgtaaattctcaggagtattcttgtaaataatttttacaagctccattactgtaaatgatttctcaaagttctcacgaaataatgtaagaatttgctgctctcgaatatttctgtgagaaatgtattgttgaattttagcttcagcattatgaattactgggccatgtcctggatatataatatcagctttgattttcaataactcttttaaagagttcatataatcatagaggtcttcaaataccgttgttccttcccctaggatgcaatctccagaaaagatagcattttcctcttctaagagtagagccatgtgatcatcagtgtggccaggggtatatagaactcttagagtggctccctcagtcttaatcacatctccatctttcagataaacatattgttgctctccatttcctataatttcttctctctgaggattccgtgggagttttttaatgcaataggtagtgtcattattgatgcttttacaaatatctcctatgcctccagaatgatctcggtgccagtgagtcactacaatttcctggattgctgtgttaaattcagttagagcctgctttaaacagctgatgtattctggaattgctggttctccagtgtcaatgaggattctcctggggccggtccccactaggtaggtgttggtgccttggagggtcatgggacccgggttacagcccaacacacgcacgactcgattggacagccgctcgacgcgctgcagtacagcagccattcccgcctcagccgcccgccggcgtgtcgcctatctggcgc

SEQ ID NO: 47256 - DNA, 1111 bp, Homo sapiens
ctctcctcctggacccagggcagccaagggagggataggcgcagtggtcagatgaagcagcgccagagaggggacctcccagctcttatttgcaccctccccacctcaccaactttggtccctctctgggggcatgaatggttaacaaacaccagagcagtactccaatattggagagtcgctgggggcacagggctttgaatcagggtagtatcctgccttccctcccctgaccccacatggtctcagggcccccttagggccccctaccccactgatagcttcctccttctctggcacaaggggagccccagggcttgggggagggcgtaaggtggggggaaatgccactgcttttagcaaaagcctccctcccagaattagccagcttgcctcctgcaccccacccccaccaaccaggggagccactaagctgactaacaactgtcccctcacccaccagctatttccccagggtagagtgggcaattctcaccttcaaagagtccccgcctgcccaggcctttggcacagaggctgagtggacagtcaggagagaggcgagaggcaaggcgaagcctgtgtccctgtttcagttgcactggggttggagcccagggtaggggtttccagcttccccaggctccggccttgtcagtctctttgcatgtgtggatttttctgtgtgtgtttctgtttgggtttttgttgttgggttttttttttttttttaataaagaaaagaagatgtgtatatttttggcaacgacagaaacgtagtgcagatatatttttgcctgtgctgctcaactgttttttttttctgatactgaaaataatattaatattcctgttgataagactttgtaagatgttagggagctgataatggaggggggtgggaatccttcaaaggcaatttcttaggcacttgcaagggcttgggggagggggaggcagttgtgatgacctcagaaatactcactttttattaatgctaaatatgttagaaagaaatgatagcattcagcattttattcttcttaatctattaagctgtgtaactccctgccccaaaccactgaaaagaaaagtaaccttcaggccaggc

SEQ ID NO: 47257 - DNA, 373 bp, Homo sapiens
gggagcaggagctgggcctggagatccagaagctgactgcacagatccagctcctgcctgaagagtcactaagtgtcttttctcaagaatgtcataaacaagccatgcaaggtttcaagctctacatgccacggggtcggtactggcggcttcgtctctgtcctgaacctcccagtgctcctagtgagtatgctggtttagtggtccgcaacctactggagcctgtgttgcaaggattgcaagggttgccacctcaagcccaggcccctgcccttggtcaggctctgacggccatcgtgggtgcctggcttgaccacattcttacccatggggattcggttcagcctgcagggagccgctgcagctcaaacaa

SEQ ID NO: 47258 - DNA, 1720 bp, Homo sapiens
ttttttttttttgaattatgacagaaatctttattaaaatgtgtctttcagtaatatgtttagcattcaatatacacacatacatatgtacactctttgacacacctcatggattgctgccatcagtttaactaataaattaaaactaaaaagagggaggggaggggaggggaactaacggcaaacttttcatgttttatctggtaagaaattgtgaatttctcagaatttccctgggcaaaaacctgtgaccagagaatctgtgaaataaaatacataaatctctaccccttggaaaaaaaaaaaaaaaaattccaaaagatgcagttacaagtgtgcttctcagaacaggagcattcattccacttcatactctggcttctccaccttctggcttcaagacagtttgtccctcggctagggcagagaggttcatatgggcacttgggctcggtgcaccttgggctctgggggtcgaggggcaggctgcagtatgggagcggggggagccacactcatctgaggtgatgtctggcacatcgtctgactgtgcatcagaactctctaggtcactgcggatgctttcaggctgggccaggctgatgtcccaaggtttgctggccaggcagtctttctgttcacagctttggtgtctgcaggggggatcctcttcactgcctccgccaccactaccttcttcttcattctctgccatctgagcatgaacatggagcgagtcctccgtgctgcttccactcaccagctgatagtggcttggtttggcttcaatgtccacttggatttccatattgttgcattctctgtcctgtgggttgtaggaactgattatggaaccggccatagcacgagtgcttgcgttgtcactaattgcaccaagactggctgtgtctttggggaaaatttccttttggacatcggcttgaacttctaacctgctatattttcccttgccactggagagaatgccgccactcagcgtgccccctgagagggctgcaaagctggccgtttcgctgtaaggaccttgcataacactaagtccatctgtagggcttccactagtgctcaatacactagtcaggccttcaatgctgctttccccaatgctggggattcttgagggctctccaggcatctgcccactgtgattggaccatcatccttcatcaaaattcaattttcactccttttccgttggctgtgctaactcccacagccgcctccacgacaaagagaaatgggcacaaccccataaacatatgccagcataatggggacaccaataccaacactaactgcagcaataactggggatgcaatgaccgacaaagtcactcctccagtgatagccaaattcctcttgtgtttggaggttttccttccctcatacctgctgtgaatcttccttccaacataaacaggaatgccaatgaccatggcaggaatggcaatgccagcaatgagagaaatccccactggagcaccaatcaacgtgcccagctgccaaagaattttcttcttacggctccatggcttcttgccccagaatgtacagccagaggggctgcaggggaaacagactgaagttaatgtcaacattacaaatacagctagtattatcatagggcttgataacagcaacagccttcttttcagtaaggattaacagaagagtttatgggaaatgaatacattacac

SEQ ID NO: 47259 - DNA, 2831 bp, Homo sapiens
agctatgacatgattacgaatttaatacgactcactatagggaatttggccctcgaggccaagaattcggcacgagtggaggttgtggaattcgccgttcgaaagcagggactaaaagccccacttcgtcttacgttccgaaaggaaggcgtctgttgagcctttctctcagtcgtgagggaggcgtcgacggcgtgcggaagtcctgagttgaggcttgcgggatcctttccggagaaagcgcaggctaaagccgcaggtgaagatgtccaactacgtgaacgacatgtggccgggctcgccgcaggagaaggattcgccctcgacctcgcggtcgggcgggtccagccggctgtcgtcgcggtctaggagccgctctttttccagaagctctcggtcccattcccgcgtctcgagccggttttcgtccaggagtcggaggagcaagtccaggtcccgttcccgaaggcgccaccagcggaagttacaggcgctactcgcggtcatactcgcggagcagaaaccccctttcgcttaagtgaaaaagatcgaatggagctgttagaaatagcaaaaaccaatgcagcgaaacgtctaggaacaaccaacattgacttgccagctagtctcagaactgttccttcagccaaagaaacaagccgtggaataggtgtatcaagtaatggtgcaaagcctgaagtaagtattctaggtttgtcggaacaaaactttcagaaagccaactgtcaaatctgattagccacttatatcttagactatactttttgggaagtctagagatgtatataatgtgctaaattcaaagtagcaaatctgaagataggcaatgtcaaacccatgaaaatgggagattaatgagctttatttggccgtgcatggtgcctcatgcctgtaatgaggcagatggcttgagtccaggagttcaagactagcctgggcaatgtggcaaaaccgcgtgtttacaaaaaatacaaaaattagccaggcatggtggtgcatgcctgtagtcccagctgtttgggaggctgaggcaggaggatctttgagcctaggatgctaaggttgcagtgagccaagatggcaccattgcactctagcctgggcagcagagcgagaccctgtctcaaaaaatacatttatttttttcattttcagttaacagtgtactcttataacaccgttattagctggtactttggtgatttctattactagtttttctaagctatttacagagtgtttgtagctttcatttgcagcattatgttcccacaaattctgtactcagcatatacagtatagtttatctgctctatttctgtcttatagaaatcatgaatgtggtctgcagacattgatgaagaaaatctgttggtaattgatacatgggctaaagcatcagaggtttaatttgaagtttatgttcacacactgaaaacttagtttttttgttggtagatccatgtgcatgctagaatttgggacaggcactatttgcataaagtattaaagtcaatttttaaactaagcaaaggtacacgttgtaacggtggggcatctgtgaaaaagatgtccctttcataatatatgcaatatattccagatgttttgagagattacagaagaggaggcctgcttcacttgcagataagtttattataattctccagaaatgtgcaggatgtgcattagcaaattgcactgtacttttcactccagcctgggtgacagagcgaagactccgtctcgggggcttaaaaaaaaaaaaatgctgtatctaaatgaatctgtgtaattgggcccagatgtgggtttgctcagtattagtagacaaggtctttgttcagacgattaggtgcctaactggcaaatgccttagtttcttaaaacgtattttctgatgtggctttacatttcaaaagtgaacttgattcaacctgagaaaactgattaaaaaattagtttaaatttgccagcagggaagtaaaataattatgggaagagtgtcttaagcctaatattaaatcagttttgttaaggggaaaactcaatagttctgttacttaggctgttagatccaagttgatttttgtgtctacagctaaattttgtttacaattaggctattttttaatataggatttagaaaccaagggtatgtgttttaaaattacactttttcttaacctgtctagctgtcggaaaaggtaacagaagatggaactcgaaatcccaatgaaaaacctacccagcaaagaagcatagcttttagctctaataattctgtagcaaagccaatacaaaaatcagctaaagctgccacagaagaggcatcttcaagatcaccaaaaatagatcagaaaaaaagtccatatggactgtggatacctatctaaaagaagaaaactgatggctaagtttgcatgaaaactgcactttattgcaagttagtgtttctagcattatcccatccctttgagccattcaggggtacttgtgcatttaaaaaccaacacaaaaagatgtaaatacttaacactcaaatattaacattttaggtttctcttgcagatatgagagatagcacagatggaccaaaggttatgcacaggtgggagtcttttgtggcagctttagctgatttttgtattggctttgctacagaattattagagctaaaagctatgcttctttgctgggtaggttttccattgggatttcgagttccatcttctgttaccttttccgacagctagacaggttaagaaaaagtgtaattttaaaacacatacccttggtttctaaatgtc

SEQ ID NO: 47260 - DNA, 495 bp, Homo sapiens
  misc_feature (1)...(495): n = a,t,c or g
gnnngnnnnntnnnnattncccncttgganancnctatgacatgattacgaatttaatacgactcactatagggaatttggccctcgaggccaagaattcggcacgaggtaacctcccacacctgataattggcatcactcctccccgcttcccactctcagatattgctccaacctcaggagttgaagaggcttatgcggtgggggcaggaggagaactgctttccctcagctgagggaagaggggctattccagagggactgagtcagtagccaaagactcagcttcccctgtccttccccagtcccttcacttcccctaccctctgacctatctctgaaagccaagttatgcgtatgtgtgtgtgcacaagcttgtctttgtgtggtatgtgtgtgtgagtgtgcatgtatgcacacacacaggggttaaccacccctcacctagggctccagactccagttgtccctctcctcctacctgtgtctccttgt

SEQ ID NO: 47261 - DNA, 350 bp, Homo sapiens
gaccaaagatgagtcatagtgtatttcagtatttaaattttacacaattttatgttttagtcttacagtcttgtttttgaagctgcgatatttcaagttactaaataaattgcctcagtttctaagccatgttttttgttttttgggggagttttttcttgctgttggaggctatagctataaacatttgcagtgcatttctgcagtgagcttgctcctgtttactctattgaatcatatttctaatggggtatttaaggcgataagctcacacctcaccctgcttgctccagtggttatggccagtgagaatgtgcggtgttgcattgcagaagaagctaggaaagctc

SEQ ID NO: 47262 - DNA, 3459 bp, Homo sapiens
  misc_feature (1)...(3459): n = a,t,c or g
tttttttttttttttgaatttttaacagaaaattttatttcaataaatattttgccctccaagtgacaactacaatttcaagggaggtaaaagtataacctagaagtaatttagaattattccacttttcaattttgcctgagtgaagaatacagtttgggcctgaagtctgctaagagactgcaccgcagtgacacgtgcagaaagtcaaaaggacacatggaaagcagtccatctttggtgcacgcacacagccatgtgcacgcacacgtgtgggtagaacgtatctgcacatacatgcgtaaaataatgggactcacgcaagtttcatttctctttcaacccttctgggctcccagaattctagcattaccaaggattttacacataaacttcatccatacattgaatcatttgggtttacactttcctttacaaagttatatcctaaatgggtagagcagcttgtcttaaataacaaggttagaattntgagacacaacgaaagttgtgcaagctttccgctgaaagaaatttgcaacgagacacaaataccactgcaggggctttgaatataggagacattgataaacagagctataagtcagtgttatcaactgcaaaatcatgactttaccaccacccaagccagaaaggcccaaaagcaccaccacgaaaattaatcctgtgtctgaaacttttcaagactaattaaaagggttgctgtgtccaagcatgaagaacgcagggacgcttctgtcaatcattaggcgaacactggcctggggacttgggacatcaggaatgtccatgccacattagtgcttactcgcaacgaacagtgaaaactacacgcttaaggacaagtttcaggatgttccacacactgactcattccatggagaaaatccagaattgattcagacgtcccatgggaatgcaattttccagctctatgccagatattttctagctcttcattaaaaagaatccaattccactgacttcgatagggccatggtaaagaacaatgtgaaactcctataaagcaaggagttggtgtcgcctggtcagcgaaatgagccacagcaacctcacacatacgattcaatgtaaagcaaattagttcatcactttattacatcttagtgctttcttaaaataaatacagtaatatcatatcaaacatacagtgagaaataaagcccacgtgtgaaagtatggtaacagaaagctcactcaggactgtgtaactcagcacttgagaaatcatacagcctttagttccctatttacaggacagagagcggctgtgtcgaacacgatatatacaaaatcgcaagagactgtacttctcttcaaaggactgaggaaaggggaataagacctataattccttctagccttctgtaccatgttccctccttatgtacacgactcactcatgttttttgtctatctaaaattatgtaacagttaaatttgtctctttttctcccaattattgatcttttgattttttctgcagtttgagatagattcaagtaacactcccaagaaaatatgtgcaaaactaatgttagtggctccagaatcttccggcagctggtcagttgcagcagtgtctggcagccatggctggcacgcacctgctcctgggaatgtccgcgctccacagaagcatcaacaccattgggaccaaggcagaaagaacccaaagccatccacttacttggagttctgaaataactgcaaataaccacttaattgtttttaaataggcaacaaaacaaaagtatccatctacaggggaaacggcacgctcctctgagagcatgcagcgcttccagatgcagaatccagacaggacaagccgtgacctaacaaaaccactgaagggactgtcagcttaagtgcatcaccttttgggacaaacatgctcagaatgaaaaatattctactttaccaaaatctgtctttattaaagtgaacaaaccattagagcactacccaaaacttaatgaatgatggctgcagttggctcggcttgcctactttaaatgaggcaaacatcagctcctagtgccattccccaccctcatgaccgcgtgccagaagtcatcatcttcacatttgtagacgttgttctagcggaagacaggctttgcagatttcggtgcttttagtgaactggtgttttccgtaaactttttctgagcagcaagggataagaattttttttcagaaatcttagaattggatataaatgttggcagtagacacaaccaataaatatcatacaatttctcaaatgaaaaagatttcccattatgaattcctttgctatagacattcaaacaccccaagccaagattgagcctcagtcccatagtcacgagattacagctggccaatatgagggtgtcaggcaatgtgcaagggggcgaggtgagaagcaagaaagcaaagtggatcacgtctaatctatgctgaaggagaacttcaagtaagggagctccgtggcccgggacctggctgtgaacaccctccgctgggagcctcagtggtcagcagtggccacagcagtgcgagccactgcaaaagcggcatctactcccccatcctcaccctgcctggcatcctctgcgtgagatgagcgctgagagaggggttttcttctgctgtctagaaacctctttgcaaaaggtctgtgactttgcacacttcgtacccaaatagatgaaaacaataaataaggaccccgtggcaccctctggatgccaagccacaagggcatcatttacgagtctgggtcaccctttggacgccagctgcaccggggtcatttacgagtctgggccttctttggcactgcaggccgcttgggctgccacaggtggttgtggattgtgagtgcgtccacactgacagacatggttttggctgggatcaagttaaactgttttcggtctgagctgtatttatacagtttgtcgatcattttcttggtgatgttctttggccccgtgccagtgagtttgtagatttcctcagtatcaggatagtagcagtaaagcgccctgaactggcagccagcatcacgaaacagtatgatgtagtgattggcatcacacttctccagctcctccaatatggaattcttgtggggttcgttcacttttccagccaggcagcaatgggatatggcattgtgaataatcggcttgtttgatttactactgggctccttaaagagcttgggaccgctgagagggtgtgcccccggaatgaacgctctcgggttctgtcgtcgccgcagaggccaaggacaggctggagcctgactgagtccggctcaagttatcagctgccagagacagaaacagacgacggttcatgaacggattccgacagacaagtacctgtcccctgtacctgttcccctcacctcgccctgca

SEQ ID NO: 47263 - DNA, 1669 bp, Homo sapiens
  misc_feature (1)...(1669): n = a,t,c or g
gcttccgctggagtttgcagttttccagctttatacaggattttcctttgactggaagagtcaaggatatagagactcaacagtgacatttattgtacaacatcaaggggaataggatactcatcaaactgggattattcttatcaaaacatggtcttctttgaataagaaaaatacatagttggttattatggacttaaaactgtgttaaatggatattctgataaaatatttgctgctctgtagagtgtggaaaatctgagaatattagctttactcatcttgagctttgaggatgttctctgtacgccgatggtttcatattaactaaaaaagctgggtattgtaaaatctcatttataaaaactcagatgagaagaaaattttctttgatggtgagactgttgtcttagttcaggaaattatttaataatcctttgttacctgtgaatgaaggaactttgtaattctgatttatcgtaaaacatgagcctttccagagtcagcttagacactgttgtcgcaaataggccatgctttgccttatgccaaggaggcccagagggagggcctagtcttcctctgttgctgtacatatattgaaatgctttttttttttattttgcatttgttatctataatgagctttctgagccctgatattatgtgagacaaacaggagttattgatgttatacactcccttccattcaggattttctgcttggagggaaatatgttgaccttagagaattgtgaatattgttgcaattcttgaatatattaccatgtgaataatagagactgtgttgctctctagtataagctatatttatttttgattcatttgaattactagttataactggagaaattttgttacctctatcctggcttgcctgactggctgtataataggcagcagcctcttttagagcatcttaatgaaaacatggatgaaaggaattaatgatgatatctgcagactgcgtagaaaatggcttttgttcccagcgttaacattttcttctcaatcacatttcaatgtttgtggagagtggcagattcacaccagaaacactaggtgttcatatccataggcatgggatgcagaataaggcagttggggagagaagcttcttcctacctggtactcctccccattcacctcagcccagcccccagaccaggcgttagccattccagtgtgggccctcaggcagccctgaagcctgggctgggtcatcagatgggggcagcctgtgacggggcacccagcggcctgattccagggaagagttccccggagggtgttggctgtttttgttagctcagtttttttctgggctccaccattcctaactccaggtagacaagatagatgtcacacacaacaattttaaagtattttgcttagtgcattttgtttatgattgcagtgtttgtttcttatttaataggctttttacttcattctattaaattttagtgtttagaagaggcgggtactgtcactgtgtaaaatatgtaatattttatatgttataccatgtcatatatacttgcaatatcagaccttgcattcaatatacaatgcaattgactctttgcagacctgcaatttttcagtgaacaataaaaagattgtctggcaaaaaaaaaaaanaaaa

SEQ ID NO: 47264 - DNA, 775 bp, Homo sapiens
  misc_feature (1)...(775): n = a,t,c or g
ggcatatctcgttgttgttgttttttttaagacggagtcttggtcttactccccaagcaatggtgcgatttcgtctcagtgcaacctctgcttcctgggttcaggctattctcctgcctcaacttcccaagtagctgggattacaggcgcccaaccacacccagctaatttttgtatttttagtagagacagagtttcaccatgttggccaggctggtctcgaactcctgacctcaggtgatccacccgcctcagcctcgcaaagtgttgggattgcaggtgtgagccactgcgcctggccacatgtgtatatcttaaaggaaataatgctaggtaatttagtcaggtgcttgatgagcatttgtcatcatcatacggagtcaatttgtctttttctataaaagttctttttgtaaatgattagttgcttaactgctttaatttcttctaggtaccttacctgtcatcaggatctttttaccacaaataagaaaccttaaagcataaaacttggttcagtcttcacatttcttaaatggaaggagaaagggaataatagggagatatctttatctcaaagccaactgttgttgacttttccagtggcaggggtatgatgctaggacttccagatttcctgattccccatcctagtgccccttttgccaaactaggcaggctttcacagcttttggagcctaatttaagtttttcntgttaagaacagaaaactccattcatagattttaatttgtcattatttgcttatttactg

SEQ ID NO: 47265 - DNA, 2406 bp, Homo sapiens
agaattttttggtagattttattcacacacattttaaaaatcatgaacaaagtcattaattctgaactcaagtaacagtcaaaaatattttaatttaaattaaggcactacatacacatttctttaaagcacactgatgttattttatttacacactattttaagaattaacaataaatacacattttccatctcctccttgtccttcatttataactttatatgttaacaaggaagtaaaaccctccaaataaaaggaattaaatgcaataatccataaagcttatcagatatgggcacaagaaggagacacccaaaaacaatgtaaaaacattttaatcctttaatgttacaagaatttatctataaattcttatgccattcctagtggaataataatataaaacctatacacaaacattgaaatatgttttattctattgctatttaccagaagaattgcatataaataacagcagcagaactgtccctatgttatacatgaatgtacttattctgaattcactgactgaattaaaaacacttaactcaaacttttcctattaccttggggtattgttttcacaaacaagtaaatgtttcctagagccaaatactttctacacccagaaaatagagcagcatgttagttatttaacaaaatacacaccaaaaccttaatgtgaaaggctagttttactataagatttttctcagtgtactaaaggagtcaatggctttaacagtgataattttttaaaagatacaaatgaattaacacatagttcaatataatatatgttttattaaataaatactattcttcttgtcccatcaacatatactttttacatttttgcttaatttacaattcgagttaatattttgagaacgtaaggaaagacaaataggtaaatgtcttgttgaaagggttaagatactgacaggacataccttcctgttccatcctatataaaatccactcatgagttggatgccaagtatagatttctgaaactcataaccaccaatcacgataatgcaatcattaaaactcacaccattgcaaggaccaagtataaaatattctgctactattttagatacttcaaaaacatccactactttaaatgaaaagctttaaatgtgtcaatgctatttgctttttaatggaaattaaagtagaatttttctattattctgtttcgatcaactattaacctttaggataattgttttatgtgaaaaaaattagaaatttttttaaagcaaaattagtactattggtttttatttattttactgttcttaatacagttaacttatgaccaacagcatggattatttatacagggtttgaaaatgcctctcaacaaccacaaatacaataggcagcaaataccaggctcaagaaattagcagtgactcaataggacgcactgtatgtttgatgactggcaccactgttgttctttaccatcacagataatcaatatttaactgggctgcatatttattatacttttatatttgtaaaacagttaccaagtttattttatattgtcaaaactttaaagatcatactattaactgcttgtctcacgtactgatgaatggttcttgagcccaatttttcccctactaaatataatctagtctgtcacaacctagtttcttcatattaattttgattactagaaggtaccagctagcaaaggcaggatgacagttcttcacaataaacccttggctctgaacaaacatgttaaacagagggattatttctgtgatgcaaatactggagaaaaaagtggaggtagcactaaggctattctgccacttaacatatgaatggtgtgaaagaccaaaagatactaaattttgtttaaaatttcttaactattctatagcctaaaaagtaaggcataaagtcccaaagataaatacaaaaatctccattcctcattctgtcccagtcatattgagatttgtatttgggtcataaatttttctgcagcatttggatacctcaaggttacaacaaacatgagagagttaaatgataaaagttaatgaaattaagttatgattttaacttgtgagttaggagaaagtaaacaaatatgaagtgcaaaaataacctttcctgagatctgtgtgcttcaggaatgtggaagcctggccacagtccatctctgacctccttatatagtaaatcacataatgtccacacaaccacacacaaacacacttgcacaggcacacgcaaacaactaagtaacttacataaaggcattaagcatagatagagagaagagcacttgtctctcttttcttctgaattttttaacaataatctttaagactaacagcttaagacataatggtgacaactcaggcttttat

SEQ ID NO: 47266 - DNA, 922 bp, Homo sapiens
gatggacggtgatgagctcaggaccagccagcaaccccatcaggcggtaatgcctaccatggtcacccatgacttcctctcgccactgctcggagctcctgcaaagccacaggcaacaacacatttctgctccgtacgagaagctcctattgtaagtcggtgacatggctggggttttctctcagcaaatattgagcaaacactgactgtgccaggtgatgtgctgggtcccaaacccttcccagacccagccctggcactcacggagatccagctaggaagtccgggaaaaggtcatcggggaaataaacaaagtcaagcacagtggatgaacgcgctgctgccgctccccacacctcttgtggtggacatcacttacgcttcctcatggtgcatgtcacttatgcttcctggtgccctcccagatgacccccccttgggccactacacacagctgcacccggcaagagcagacaaggatggtctactcactgagcctgcaaggctggtgtgcaggacaggccagctacactccccaggtgtgtgcaagaccggggacgagtcagtcattgggaggtgaggtgctcgggcagtgtgggatggaggaggagggagggaaactgagtgtgggctcttcgtattggagaggaggggacggccatggcacaaagactcagatgggaaagtgtgagaaagcagagatttcaaaggagctacggtggagacccacagaagaggaatgctgaggcttttctgtctgaaatgctgaatagactctagcacacgcaaaacagcccaccacagcgagctgcaggattcttccgggcttttaacagtggtcttgtaaaaaaaattagccgggcatggttgtcccagctactcaggaggcagagaggggaggactgtgcgcccaggaggttga

SEQ ID NO: 47267 - DNA, 2461 bp, Homo sapiens
ggcggtcgacatgttccaggtcccggatagcgagggcggccgcgcggcttccagggccatgaagcccccaggaggagaatcgagcaatctttttggaagtccagaagaagctactccttccagcaggcctaataggatggcatctaatatttttggaccaacagaagaacctcagaacatacccaagaggacaaatcccccagggggtaaaggaagtggtatctttgacgaatcaacccccgtgcagactcgacagcacctgaacccacctgggagggaagaccagcgacatttttgggtctccggtcactgccacttcacgcttggcacacccaaacaaacccaaggatcatgttttcttatgtgaaggagaagaaccaaaatccggatcttaaagctgcaagggagcatcccggctgggagcagagccaggtgagaaaggcagcgccagataaagcaggccccgccaaggagcaggagcccatgcccacagtcgacagccatgagccccggctggggccgcggcctcgctctcacaacaaggtcctgaacccaccgggaggcaaatccagcatctccttctactaagagaagccactgctccacccggagccagaccagaaactcaagagatagggtagccatgttttcatttccttttgcccaaatgagcggggtgggaagagggttagtcttatgtgagcctggctgctcagcgtctcctggccgtcatgacagctgcttggagacccgtgccttccagatggctgggagatgcctctgtggggatgaaatggggcacccctggccatcactcatgtgtagtccaggtttgagaggaacttggaaggggggtgagggtggggaggtggggcagggcatggtccttggatcaacagcccgccagctgattggatgtctaggaatgactgaaagaaaccaaaacagcctgtccactgctgctgtgggatggaggaggcgtaagcagaaacactaacagtatattgacctcttagcagaaccgcttccattctggagatcacggctgctaaatccagcatccccacttcattttacccccagcatattgttctgtagtcttttcttgaaacatcttgattgcttttcctcggcagctttcaaaaaaccaaataataatagttatccgtcttctacttcatggaagattgttttggtgccctgaccctctgaagtgcccagttcctgccatctgaaacctcggcctgatctgatctcatgttggaatctgcctgtctttcacacagggctggtcttggtcctttacatgccagttttgcttgtgaattcttgcttttttcctctcatcagccttaagtttaggcgtttgttgttctccagtgatgtagacagttcccttcacaagtcacagttcttcccataaatgaggcccgctgacctctgcgggactttaaaaatctattcagatatttccgagtaagtggcttgtttaaattcttcctgtgtctttctttattccttaattggttggtggaaagaagagatgcttgggaaccttgggttcttaggtttggattctttaataatatctaaaaagctaaattttaaataccagctttacataaatgattgttgactctggtctgtttctgacacctttccagaaaaaagtcaattgttcaggtacaccaaagaggaagaagagctgtggaggccaccctctacaaagctttatagaacttctggatctaactcacaaacaagcttccagaagagactagagaccttaggccaggagatgaaggagttcagtagcaaagtcacacctgtccaattccctgagctttgctcactcagctaatgggatggcaaaggtggtggtgctttcatcttcaggcagaagcctctgcccatccccctcaagggctgcaggcccagttctcatgctgcccttgggtgggcatctgttaacagaggagaacgtctgggtggcggcagcagcttttgctctgagtgcctacaaagcttaatgcttgggtgctagaaacatcatcattattaaactttcagaaaagcaggcagccatgtttcagtcaggctcatgctgcctcactgcttaagtgcctgcaggagccgcctgcccaaggttccccttcctacacctgggcacactggggtctgcacaaggctttgttcaaccaaagacagcttcccccttttgattgcctgtagactttggagccaagaaacactctgtgtgactctacacacacttcaggtggtttgtgcttcaaagtcattgatgcaacttgaaaggaaacagtttaatggtggaaatgaactaccatttataacttctgtttttttattgagaaaatgattcaccgaattccaaatcagattgccaggaagaaataggacgtgacggtactgggcccctgtgattctccccagccctttt

SEQ ID NO: 47268 - DNA, 507 bp, Homo sapiens
gccgcgcatcagccctaggcaccccagtcccggctgccccctccgccgccaccgccgcccgccggcaggttccctggtcagcgtcccatcccggtcgggagttctctccaggcggcacgatgccgaggaaacagtgaccctgagcgaagccaagccgggcggcaggaacttctgcaatgtcccatcaacctctcagctgcctcactgaaaaggaggacagccccagtgaaagcacaggaaatggacccccccacctggcccacccaaacctggacacgtttaccccggaggagctgctgcagcagatgaaagagctcctgaccgagaaccaccagctgaaagaagccatgaagctaaataatcaagccatgaaagggagatttgaggagctttcggcctggacagagaaacagaaggaagaacgccagttttttgagatacagagcaaagaagcaaaagagcgtctaatggccttgagtcatgagaatgagaaattgaaggaagagc

SEQ ID NO: 47269 - DNA, 536 bp, Homo sapiens
  misc_feature (1)...(536): n = a,t,c or g
gtggtagcacantngannanctgaaaacctcacgaatttaatacgactcactatagggaatttggccctcgaggccaagaattcggcacgagtgccattgggccccccatggacatgggagggccttggggtcagcacttggacaccctagtgggatgggggagtgagaggcctccatgggtcttcactgctgcttggggccctccgatgctgctcaggatacagaggcaaggcagaagcctggatgggcggggagcagggcctcactgaggatgaggcgtgggggcggccttagaaaccagcagtggctcctttgagagtctggtgagggtcactcactccattcttgctggaccaggaattgtcctcttgttctgcgctgttgagagggtctgatttgggggagtgacagtgttggggggcgatgaggtctcctggctcttgcagtgagccttgtgagcaagctgaccctgtggaggtgagacactctggattggaccagggcggacattgcctcacatatttgtagaggggac

SEQ ID NO: 47270 - DNA, 2672 bp, Homo sapiens
  misc_feature (1)...(2672): n = a,t,c or g
gtctaaagtagtgactgcaaatcacagagctcttcagataccagaggtttatcttcgagaagcaccatggccatctgcacaatcagaaatcaggacaataagtgcttataaaaccccccgggacaaagtgcagtgcatcctgagaatgtgctctacgattatgaacctcctgagcctggccaatgaggactctgtccctggagcggatgactttgttcctgtgttggtgtttgtgttgataaaggcaaatccaccctgtttgctgtctactgtgcagtatatcagtagcttttatgctagctgtctgtctggagaggagtcctattggtggatgcagttcacagcagcagtagaattcattaaaaccatcgatgaccgaaagtgaccaagaccaaggcccaccaaggcagcagactgttaatcagacaaacagatctctgagaaggtgcatcagctgctttgaaggctgaagattgttttgtatgatactgcacagcatcaggcattttaaagcagatctttactaaacaggttaatgagctaacaagcaggttctctcgtctttgggctctttcctttctgagttgcatattctattttcttgtccccaagtagagactagtactacaaaaagggaccacatttttcaagtatttctaagtataaaaaacaaaacaaaaatctcttaggaaatgtctagacctccattcttggattccctttctttccttttattttaaaaaagaacagtacccctcttttaagatgctgtcttacattaatgagcatctaatggaaagaaggtatgagttgcactgaggattagaatagtggtgcgttagtggcattatctataaatacactcacctaaattgaaagctaagaaggaaatgtaaatataatatatatttatatttgatgtaatatggacatctgcagattctaataaacaaggactattgctgatagtaggctgtgacatactgtcttgtgaaatggtttccttgacaaaatttaagctgagcttaaaagcaaaaaaacaaaaagtacacagaaatatttattaaaatgtaatacagtttattgaactttctaggtatggagtttgatggacagggctgcctttaatgagtgtgaaggtcactaagtcacttagacatctcaccgtggaagtttgtgagcctgcattaggagatagactgattaccatacatgacataaaaaggaacagtggatagctcatactttatggtggttcttctcctccgaaataatatactgcagaaatcccagacagagctccttacaaacctttaattgtaatatatttttgatgattattcacattgaatgcacagaccaagaattcagtgaatgtcattttttaaaaaactaatttgtattgtctgctctagtgatacaagttttactagtgataaactattttaatcaaccatactattcttatggaaaaaaatatctattttggcaggtttctgtgcctttatttccctcttctgaaaaaaagtctgtgttttcatagtttggtttgcattgtatatcaataattaatcaggaatgggttttggtgcctgaaaaattggccatggaggcacaccaaagcttcaagcacaagtcttgtacatgggccatcactgtctggtttcacttcgtgtgtttcctaaacacatttagctgcttttttaacaaactcagccccatacttgagtcccttgttgttgggagcatttccaggcatcttttaagggaactgtgacaaacagcctcgggcagatgaacacggaggctctctgttgtctgtctctgagatctttgtgtctgggaatgcctaaagattttattnnnnnnnnnnnnnnnnnnnnnnnnnnnnnnnnnnnnnnnnnnnnnnnnnnnnnnnnnnnnnnnnnnnngctgggagtgcaatgggtgcgatcttgnnnnnnnnnnnnnnnnnnnnnnnnnnnnnnnnnnnnnnnnnnnnnnnnnnnnnnnnnnnnnnctagggactacagggcgcatgtnnnnnnnnnnnnnnnnnnnnnnnnnnnnnnnnnnngaaacgggggttttcaccagtttggncaggggtgatccctcaatcctccctgaccctcgtgatcccaccccgccttggccctccccaaagtgccgggattacaagccgtgaacccacccctgccccagcccagaaactagattttctttatgcctcccaccccttccttattcatttactttacaataccaaaataacaaattgcataggagtgtgggatgtggtttctgccttctagagagagatcagaattaaactagtactatgaaatgtccttttgaatgttaggtcaagaaatccatgtacagagtcgtgcacttcattggctgtaactgtcaaacttgccttgtattagaagttaaatcccatcgtaaatacatcacgaggccagctgtgtgatttctgagacctagatgagagtccatttacttcagcctttgattcagtaaatgttaagcagcagaagacttcgaatggttgaaattcattgttacaggatttaactcataaaccaatgagagattttttttttctctgcaatggttgctaagtctattccatgttaacactgtggaaataaatatgaagatgtgga

SEQ ID NO: 47271 - DNA, 2045 bp, Homo sapiens
  misc_feature (1)...(2045): n = a,t,c or g
tcttcctctctgtttgcttatggcacaacagagaaatggggtaatttttcaggagggtggagagaaacacttgaaacttgtggggaaactctatgaccagtgtcatgacaccctagtacagtttggtggatttttagcatcaaatctaagtacagaagattatataaaacgagtgccttcaattgatgtactctgtaatgaatttcatacaccccatgatgcagcatttttcctgtctaggccaatgtatgcccatcatatttcgtcaaagtatgatgaacttaaaaaatcagaaaagggaagtaaacagcaacataaagttcataagtacattacatcatgtgagatggtgatggcgcctgtccatgaagcagtggtctccttacatgtttccaaagtctgggatgacatcagccctcaattctatgctacattctggtcattgacaatgtatgaccttgcagttccacacaccagctatgaacgagaagtcaataaacttaaagtccagatgaaagcaattgatgacaatcaggaaatgcccccaaataaaaagaaaaaagagaaggagcgctgtactgcccttcaggacaagcttcttgaagaagaaaagaaacagatggaacatgtacagagagttctacagagattgaaactggaaaaggacaactggcttttagcaaaatctaccaaaaatgagaccatcacaaaatttctacagctgtgtatatttcctcgatgtattttttcagcaattgatgctgtttactgtgctcgttttgttgaattggtacatcaacagaaaactccaaatttttccacacttctttgctatgatcgagttttctctgacataatttacacagttgcaagctgtactgaaaatgaagccagtcgatacggaaggtttctttgctgcatgttagagactgtgaccaggtggcatagtgatagagccacatatgaaaaggaatgtggaaactatccaggattccttaccatattacgggcaactggatttgatggtggaaataaggctgatcaattagactatgaaaattttcgacatgttgtacataaatggcattacaaactaaccaaggcatcggtacattgccttgaaacaggcgaatatactcacatcaggaatatcttgattgtgctaacaaaaatacttccttggtacccaaaagttttgaatctgggtcaagctttggaaagaagagtacacaaaatctgccaagaagaaaaagagaagaggccagatctatatgcattggctatgggctactctgggcagttgaaaagtagaaagtcatacatgatacctgaaaatgagtttcatcacaaagacccccctccgaggaatgcagttgccagtgtgcaaaatgggcctggtggtgggccttcttcatcatcaataggaagtgcatctaaatcggatgaaagcagtactgaggagactgataaatcaagggagagatctcagtgtggtgtgaaagctgttaataaagcttctagtaccacacctaaagggaattcaagcaatggaaatagtggctctaacagcaacaaagctgttaaagaaaatgacaaagaaaaagggaaagagaaagaaaaagagaaaaaagaaaagactccagctactactccagaggccagggtacttggtaaagatggtaaagaaaaaccaaaggaagagcggccaaataaagatgaaaaagcaagagagaccaaggaaagaacgccgaagtctgacaaagagaaagaaaaattcaagaaggaagaaaaagctaaagatgagaaatttaagaccactgtccccaacgcagaatcaaaatcaactcaagaaagggaaagagagaaggagccatccagagaaagagatatagcaaaggaaatgaaatcaaaggaaaatgttaaaggaggagaaaaaacaccagtttctggggtccttgaaatcacctgttcccaggatcagatatttcccagagccttgaaagggggaaccaaaaacgcccgcaaattttgntacttnacccttc

SEQ ID NO: 47272 - DNA, 2725 bp, Homo sapiens
ttttttttcagaaataacgagacttcaaagacattttacttaggaaaagttcagtaatagagaaataattctacagatagaaaatgtaaacagttaacatacacttgtcaggagcagcaccattcttaacactactcgacatccacattgcgtgttatgttgaaaatcaggtataaaaaaataaaagacttagactaaataaccaccatttatgcctgctctgctcaatgtgaagaaacagtccttagaaaatgatatcctatatatggctgtgtgctactattttcagatgaacggtatattgctcatttgatacatcacctacacaaatctaggtagggtttgggaacctcccaataggctcgtataaatgattatgctacaagtagaatcaaatgaaacaccagaacaactggtgctcaactgacagacactccaagtaataggaaacaggaaaggtccaaggacccgaagctgcaggaaagggaaagaccagactctagaacattgctgggacctacagcctgagtagattaactcagtgtatacaaaaacaggctcatagctagtagaagtgaaccatctgtttatttgcattgaaatgtattattcatgaagtatcctcttgcctttatgtgatcataaactttgagcatgccacaaatttgtagaatacaccatattctttttacttatttttgttgggtagggtggggacataaggtggtggtagacgcccagcatcttcaaagacatgctctgagttattctgccatttagatgacggggcttttgccaaaattaagtaggattgcctaccaattcttgtaactaaattaggattggcaagtagcaaatattggaggtctcctaacacgttcatcatttacagtagttattcctgaatataactggctacaagttattttccctcactcctctggggttatttcattgataagcacataaccctgaaggatagtatcatgaacaaaacatctgaaataaattctaattaaaaaaaactataaaaatcttaaataattcatgatataggcaagtcaccacataatagttgctttgataaacaaaatcttacaaattcagttaaaaaaatcagcagcataagataaagcaaatatgcaaaaaatttaaaccatgataaaataattaggtttacattatacagttaattacagcaaaaaaaatacaatacagttttgttgctgttttgaaacacaacttaggttttaaattacatcacttgaaattaaaaaaaataaactactttactacaaaatgaattctacattttttgaaaaatcacccaaaaataagaccactgaattgttttcaaagtagttctatcaatgactaaccgactccccatccctcccaccccccgatggcccaagtagtcatctacagcagcccagaggcccagctgctgcttctagactgctgtctgtatcagaggccaaagtcggatctgttgacattgaagacacatcattgacagacgacgatgatgatggatgctgagagccattgatcactgctgcacctgtgctaaaggagagggctgcccccgtataactccattcttggttctctcctccaagtccataacttccttatatatcaattctttccactcttctattgtgtgttccctttcatctaactgcttgtcagggatctttggtggtggagcttctgcttcagaaggatcataccagacattgatgtacgggtgttggagagcttcatctacagagatccttttagatgcatctattaccagcattttggataacaaatcccttgcctgactggctttaagtttgttgtgttctgagtcagctgggaaaaggacatcagggaagagtttctcaaagctatatccagcatatttaggtctgttttcaacgtaagtccttactgttggttgcagtttcttcatgaattcaggacatggtgttccaagctgttcaataactttattccactgatcaatatagtcccttcctggaaagaggattttgtggcaaaccatttctcccataatgcaccccacagaccataaatccacgttttccttgtagcccatgccaaggatgacctcgggtgctctgtagtagcgagtcactacataaggcgtcatcataaaactcgttcctgcagtcctggccagaccgaagtcaagaatcttcaaagtgcaatcagattttactactatattactgggctttaagtcccgatgaataattccagcagaatgaaggtgcttgattccacacagcatctgatagagaaggtaggacattctttcatgatctagctccatctgaatcacttggcaaagatttgcatccatgagctccatgactatgtaaacatcttgaaattcttctagggatttctgtggtgtgaaaacattcaaaaggccaattatatttttgtgattaacacatttcataagaactagctctctgtaggcccgcttggcatgagtctgattctgaaatggtcggcttagcttcttgattgcaacatttctttcaagaatggcatcataagctgcgcatactattccttgagctcctgagcctataggttttaaattctgatatcgtttcaggactgtgaatgtagaatctccaatctctacactataaaaattgttgtcacgcttgcttctgctcatgatggcaagcaattaatg

SEQ ID NO: 47273 - DNA, 1814 bp, Homo sapiens; identical to SEQ ID NO: 2530

SEQ ID NO: 47274 - DNA, 643 bp, Homo sapiens
gtgttgaacccttgactgattacgaatttaatacgactcctatagggaatttggccctcgaggccaagaattcggcacgagcggcgtgctgcgcctccgcggctgccctgcgccagaattcggttccctcaaaattataaaggcaggaaagctcaagacaaagaaatccaacaaggctagtgatttcagtgatatggagaattggccaacaccaagtgaattagtgaacactggatttcagagcgtcctcagccaaggaaataaaaagccacaaaatagaaaagaaaaagaagagaaggttgaaaagagaagtaacagtgacagcaaagaaaaccgggaaacaaaattaaatggtcctggtgaaaaccgtcagtgacggatgaggctcagtcaagtaatcaacgtaagagagctaataagcacaagtgggtaccactccacttagatgttgtaagatcagagagtcaagaaagacctggatcccggaacagctcaagatgtcaacctgaagcaaataaaccaacacataacaataggagaaatgatacacggagttgggaagcgagatagagaaaaaagagatgatcaagatgacgtttccagtgtgagaagtgagggtggtaatatcccgaggttcctttag

SEQ ID NO: 47275 - DNA, 526 bp, Homo sapiens
  misc_feature (1)...(526): n = a,t,c or g
annnttnnnnaacagctatgacatgattacgaatttaatacgactcactatagggaatttggccctcgaggccaagaattcggcacgaggcatcgaccacttggctttggatgaaatcaagaagcgtgggatccgagttggctacaccccagatgtcctgacagataccaccgccgaactcgcagtctccctgctacttaccacctgccgccggttgccggaggccatcgaggaagtgaagaatggtggctggacctcgtggaagcccctctggctgtgtggctatggactcacgcagagcactgtcggcatcatcgggctggggcgcataggccaggccattgctcggcgtctgaaaccattcggtgtccagagaattctgtacacagggcgccagcccaggcctgaggtagcagcagaattccaggcagagnttgngtctacccctgagctggctgccaatctgatttcntcgncgnggcctgctcttancacctgcnccganggactctgnncnnggactttt

SEQ ID NO: 47276 - DNA, 1060 bp, Homo sapiens
ttttttttttttaagtatacaatttgtttttatttacaataccctataaaaatgtaaatttagaaacttttattttcattaattagaaccaatccaaacaaaaaagataaagcacagtaaggaagagataataatcaagtattcacttgattggttgtgaagggaaggtaggaaaggcatgtagtggaaatggtcagtagacaacggtagagggaagctaggtaacatcactggggaacagctggtggagcctggggttacagcatgggaagaaatggagatggagaacaggacagctggttttaacagaggatcttactgttgtacaatacatgtatgtgcaaaatgtttattctctttaaataccataacctgtccctcccaccccccaactacattcgaaaaagtaagaacagcagaaagatcacgaaggccatgtaaaattaattcagatttaattttcttcagggctgtaatcactagggatcaaaactccttagtctggttgattgctgaatgggagaggagtaagtgagaaagatcatggcaggctggccctgcaattattcaaacccaggcccctggctgcctgggaacgggacttgggtgagatgaagtagtaaagacagcagttctgcccatggtgtggagactaaaaagcaaagcaggccaaacttagcttccatggttacatttggaagtttctattcatgacaccaaataaaagtggggaagaaggaagcatggcttactgaagtagtctcaggaagacagggcaagtgtgcaaaaagccacactgccaaagcaggctactagtgaggatcatcctgggtgacttcgaatgcacttgagggaaaggctcaagtaccctgtagttgtagcaggaaaaagacataaccatgtgttgtttcgattaaggtggacagaaactaaggaaataaaggtgggaagaagaaaaaggacttctcagcctagacctggcataagccaattaagagttctgattttattaaacgtgctgcatactctttatttatgttaaaacaagtagaacccacca

SEQ ID NO: 47277 - DNA, 949 bp, Homo sapiens; identical to SEQ ID NO: 2541
  misc_feature (1)...(949): n = a,t,c or g

SEQ ID NO: 47278 - DNA, 1717 bp, Homo sapiens
gctcaacacagccatcaactgcagggatgaagtggtgtctccccttccatctgctctgcaggggtccctcaggctccctatcagcccctccagctgcctcagttatctctgcacccccatcttcctcctcccgacatcgcaaacgtcgcaggacttccagcaagtcggaggcaggggctaggggtggaggccagggttccaaggaaaagggccgagggagttggggaggccgccaccaccaccaccacccactgcctgcagcaggctttcaaaaagcaacagcgcaagttccagtatggggaattatttgcaaattattatggggtaccgcaatccttcctgttgaggatgggcgccttcgggtgttgaagcctgagttggttttcggggggccgggacgttcctagatctgggctgcaatgtgggccatctgaccctgagcattgcctgcaagtggggcccgtcccgcatggtgggcctggatatcgattcccggctcatccattctgcccgccaaaacatccgacactacctttccgaggagctgcgtctcccaccccagactttggaaggggacccgggggcagagggtgaggaagggaccaccaccgttcgaaagaggagctgcttcccagcctcgctgactgccagccggggtcccatcgctgccccccaagtgcccttggatggagcggacacatcagtcttccccaacaatgttgtcttcgtcacgggtaattatgtgctggatcgagatgacctggtggaggcccaaacacctgagtatgatgtggtgctctgcctcagcctcaccaagtgggtgcatctgaactggggagacgagggcctgaagcgcatgtttcgccggatctaccggcacctacgccctgggggcatcctggtcctagagccccaaccctggtcgtcgtatggcaagagaaagactcttacagaaacgatctacaagaactactaccgaatccaattgaagccagagcagttcagttcctacctgacatccccagacgtgggcttctccagctatgagcttgtggccacaccccacaacacctctaaaggcttccagcgtcctgtgtacctgttccacaagggcccgatcccccaggccactaagtggccccctaaacagaaagtgtgaagaggctgccctcgctgctcataaggacctgggggaagaggaaagtgtcccaaggtctttcctttctgactccaaaaatagtttcctttcttggatctgcaaagaaagcttttcttccgtcgctgcctcagcctcctccctatgcctctggcacctgcgcagcaaggctggctgtgctggagtcaccatcatcttcctctcccccagcctcccaggctggatggcatggactgtttgctgacctctgttctcttagggcatgggaggtgggaggatatcaaattctctagccctttcctcctattctctagcccttctattctcccaaggagagagattcccatttctcctcggccattgtacctagctcttgtccctagctgcatttcagtggaccatggatagagggactgagggttagacggagaagactggcagggaggcacgcaggtactgtgaaaatccttccctttgccctcccccagtgggagagggggttgggttttcaatgtgagaacagcacaataaacttgatgtctagggcagtggccccccaaa

SEQ ID NO: 47279 - DNA, 1447 bp, Homo sapiens
ttggccaacatttccgggcagctagacttgtctgcttacacggaaagcatctgcttgccaattttggatggcttgctgcactggatggtgtgcccgtctgcagaggcacaagatccctttccaactgtgggacccaactcggtcctgtcgcctcagagacttgtgctggagaccctctgtaaactcagtatccaggacaataatgtggacctgatcttggccactcctccatttagtcgtcaggagaaattctatgctacattagttaggtacgttggggatcgcaaaaacccagtctgtcgagaaatgtccatggcgcttttatcgaaccttgcccaaggggacgcactagcagcaagggccatagctgtgcagaaaggaagcattggaaacttgataagcttcctagaggatggggtcacgatggcccagtaccagcagagccagcacaacctcatgcacatgcagcccccgcccctggaaccacctagcgtagacatgatgtgcagggccggccaaggctttgctagccatggccagagtggacgaaaaccgctcggaattccttttgcacgagggccggttgctggatatctcgatatcagctgtcctgaactctctggttgcatctgtcatctgtgatgtactgtttcagattgggcagttatgacataagtgagaaggcaagcatgtgtgagtgaagattagagggtcacatataactggctgttttctgttcttgtttatccagcgtaggaagaaggaaaagaaaatctttgctcctctgccccattcactatttaccaattgggaattaaagaaataattaatttgaacagttatgaaattaatatttgctgtctgtgtgtataagtacatcctttggggttttttttttctcttttttttaaccaaagttgctgtctagtgcattcaaaggtcactttttgttcttcacagatctttttaatgttctttcccatgttgtattgcatttttgggggaagcaaattgactttaaagaaaaaagttgtggcaaaagatgctaagatgcgaaaatttcaccacactgagtcaaaaaggtgaaaaattatccatttcctatgcgttttactcctcagagaatgaaaaaaactgcatcccatcacccaaagttctgtgcaatagaaatttctacagatacaggtataggggctcaaggaggtatgtcggtcagtagtcaaaactatgaaatgatactggtttctccacaggaatatggttccattaggctggggagcaaaaacaatgttttttaaggattgagaatacatacctgacaacgatccgggaaactgctcctcaccactcccgttcatgcctgctgtcgggcgttttgaccttccacgtggacagttcttcacaattcctttcatcattttttaaatattttttttactgcctatgg

SEQ ID NO: 47280 - DNA, 526 bp, Homo sapiens
ttttgtgaagtgttccaactttatttaaaaccagacagccctgctaccatgcccccgctcctcagcattgctctaggggaggagctggatgaactatggcccttctgccaagcccaggtgctaggggaggaaccccttgcttgagatgtacaggatggactcctcacttcttctgggcttgtgccctggcccgttgaatcttgtcagctgtggccccatctgtggctcccgtgcagtgggacaatacgaggctcagctcagcctcattccggtgttcgatggccacatctgcagcctgagccacatcgccaacaagaagcaaagccttgaccttctgctcgggacccacgcgggaagcatacttcttggcttcgtatttgttatgttgtttcatgcagatctccacaaaaggcaggtagccaatgggtgatttcttgctcttggaaaacttctctagctcttcccaatcttccaaatctgccagggcagtcagcttcagccaccagagcctcttgtcagggatgcg

SEQ ID NO: 47281 - DNA, 2477 bp, Homo sapiens
tacaaattcagtgctccagttgtgccaagttctttcaattttggaggcccagcaccagggatgaattgagttatctctttctttcctgctgtgtgcttgtagtgaagagcttgtgttcctcctagtagtggttccagaactggttcatgttatctattctaaactaataatcaatagatggacaaaagaaacaacaaccccaggagatgggacctgatcatgcaacctggcactggaaaagaaatcagcgggattttgggggtgggggggatgggaggtaccttagagggagtattttctttattttttgaagaaagtaagatcctgactctgaagcttcaaagtgacactgtggaaatctgaaacgaggggatgtcatgaaggcagcttttctttttctgaggaaaaaataggcatgggctacaggactatttaaaatgtctcatttacagtataaaactcaaaggtagatgtaatttttacacctatgagtatttgtccaatttctgtctcttcctcaccattgggtatctattctttatatgtaaataagataaggtcatctgatagccttattcagtcttcatcattttcatcattgttcctatgtagattattggacatttattgtagcactacataactgattataaaaatctgtaaatgaattagcactttcatattgaaaccaagcctgctagcctatgtataaaatagcaaaatgtttgctgtttataaaaagatgtaatggggtggggggcaggggtaatttcaagttattaatttaaaaatgaactagcaattttgtacctggtgactttgtggtgcactcacctctgatagtgacttgaattcggtatgtaaaaaggggttagtggtatttcattgctgctaaaaatgacaactccctctgtgtcctgtttttcttaaagctgtcagtgtacaagtgggtatttgaataccagaccttactgtaaaaaataaaaaaggtggtatctagagcatgtaaattggatataaagttctgctcttaaagagttgatctaagagtatggctaaacatctatatatgcaatctattaaaagaacttaattcggctattatgtcttgatttgattgcagttttttcctaattataacaaatttttcctcattggcctgtttttaatcctgtgcctagaaggagtacaaaatgcacactttacaaaattgatatttaacacttacccactcccctttccccatctcttctaccgctcttgttgatcgtggtatctgatcttgactagataggctgaaggcacatggttccctccaaaaaccactattgataccactacaaaaacaagccagcaaaaagatactgtagagaggttggcttgcttccctctcttcctaactgcatgttgaaaaataagccggttattgatcttaaacatcggtcagatgagtcatacattgggttattttttatatacatgtatacacaaaatatttcaaattgaaagcaacatcttaatggattcaaaactattacaagctgttgtctaaaacaggtgagaaaaaaatttataactgtaaaaacaaatgcacatattgatatttaaaatgcgtaattaagaaaacccattgttgttgtgtttttcttgtataccaataattaagccactactgttggcactgtttggttttctgttttaacactgaaggagtgaaagtatttcctatatttatgaatttactactaaaatcttggcaaaaaaagaaaaaaattgtctaacgtgtgtgggtgaaaactgttaatcaagtgtttctactcccccccgaaaatcccctgaaagttggacaccaactgtataccctaggttgcttaaagggatttcactattatataaagtcaataaaaatgaagtagttgtatatatgcaacattgtgtacagaggggaaataatgaatagtattaaagaaacattctcgtcttcctttacctttaatcccctaatacctagtctactttttaaattttcagacttcactgctttttgaattcataattctaattttcacattattgttaatggaaaatcatatctaataaaggttttagttattcccatgcacagtatgaaaattctcatttgctgaggttttgtttcaagaaaatgtattggcatgtctttgagaacatgttttattgtctcctgtgtcatataatccaaactaatctccgtttacagactttaacttgaaattagaccttataattaaactatttaaatagtgttcaaatgatagtttctaatgcatcaaatatatacctcagttttcatgatttcctttaacattataatttggtatagatcaagaatcttaacatgtatcagtttctagatgaggctgcaggatttttggaaaacttttttgaatgtatttacaatattctcttgtaattagctacatagggacttggctttt

SEQ ID NO: 47282 - DNA, 1401 bp, Homo sapiens
cacagctggccgtgggcagaattctgctttaattgcaggtgtctctgactccagtcccatgcttcttcccttccagtgcagtgtctacttgctaatgatcacgtctcttaaccttagaagattgttctctgttattcgaatcagtattataggagaataagcttctctcttgcctctcacagaaagtactgaaatcccaccttatgtgatgaagtgtccgagcaatggtttgtgtagcaggcttcctgcagactgtatagactgcacaacaaattttctcctgtaacctatgggaaccctgtcactttttgactgtgcagtgaaaccatctgttaccctgtgttgatcaagacttcaaatcccaaaagaacttcatcattaacatgacttgcagattttgctggcagcttcctgaaacagattacgagtgtaccaactccaccagctgcatgacggtgtcctgtcctcggcagcgctaccctgccaactgcacggtgcgggaccacgtccactgcttgggtaaccgtacttttcccaaaatgctatattgcaattggactggaggctataagtggtctacgggctctggctctaagcatcaccctcggtgggtttggagcagaccgtttctacctgggccagtggcgggaaggcctcggcaagctcttcagcttcggtggcctgggaatatggacgctgatagacgtcctgctcattggagttggctatgttggaccagcagatggctctttgtacatttagctgtggtgtgtgcttcagaaaggagcagggcttagaaaaagcccttttgtccgtaggagttgatgtggtgtgagtgatatatttctatgtttttaatgtacagcatctgtactttgtttgccttgataaaggtaagataaatgaaacgctgaactatgctaatctggaatttgtttttatttgcctgaaatatatttttttctgtgaaaaaattaaaacgtacttaagccaggagaatgaattatacagtgattgaaaatccatttaattcctatgacttttgttttgtattgcccaagtcaaactacatcacttgtatctccagcccaaatgtagtctgccttgaaaagtctttcagctgtgactgcaggaagtgggagtgtttttattgttagctaattgctgtgactgcaggaagtgggagtgtttctgttgttggctaattgaagttattaggctcagcttcagtcatgtgtaagttttgcagtgtaatacatatgtagtctggtctgtatatatgaaaatttgaattaaactgcagaatgtttatgtctagttatggtttaaattttcttagtagtatataaaaggtaagagtactgaaaaattaataaaattgcaagttaagaaaaaaaaaaa

SEQ ID NO: 47283 - DNA, 1962 bp, Homo sapiens
  misc_feature (1)...(1962): n = a,t,c or g
tcccggaggcccaagaaggtctgcatcgtgaaggtggtggggacacggaacctgtggaagaacattgtggtcctgtgtgtgaactcgctgacggggtacgggatccaccactgctttgccaggagcatgatgggccgttagaaacatttctttgttctggaaacaaagtactgttgaaaccagcttggaattttttttttttttttttttttcaaaaaggcaactttttttttttcttggcatcaatgaatatgcacttcagaaatctacagagaacttttttcactttgtatttgttccacagcattctagccaggagtacaaaataggagctcttcaagcagcacatgaagatggcccaggagccttcagccatccagagcagcagagcagcacctaaatctccacacacttcccagtataaccactaagaacacactagacccttggcattaggggatttatcatttccagttctattatctgggaatgactccaagggtttgtgacaagcttttgaaacgtaagtgcctaagacgagtgtggacaagtcactgagctaatgaaggaatagaccccactgtctgcttggctctgctattttgtaccctgtcttcacatgtggggaaacttcataactgtgcccacaaatcagagaaattcgcaaaggactagacaatgtattgcctgtgaacttcagaggcaactggaaatagtgcaactggaaatcaactagcttcatacataggcggatttgtttccagggaccaaaagcacagaagataagaaaacttttcaggtgatggccatattctcatcatatcctctctgtgtggagtctgcctgttgtcacaaaaaccttgaccctacatcaagttacacccttaacaaagggaagatacaggcatcagataaaaggtacttgtttgaaaggcagccataagggagaactgaacttaaaaaaaaaaaaaaaaaaaaaattccaagctggtttcaacagtactttgtttccagaacaaagaaatgtttctaaccacatcttgtaccccttcctcatcaactccagactaccacagacctttttccaaaactgtgtgtcacacatccaggtcttgtgctttagagctgcctctcaggcaattttagccagccatttctccaagtcctggatgtcagcagagcccacgtcccctcttccacccttggcactgcactccaggaactccactttgaggggcaactgtgagaattcaaactctttgcctttcttccccagctgagcaggggcagtgctggaactgtccagtgtgctgggggcagcagaacgggtaactcgtaaggtgttgagttctttctccagctgctgttgaattaactttgctgattttgccattgcaatatcttgcttattgcaggctattaagaatgatggtgtattcttcagacccatactgtcaatgaggacttgatacagaaactcagccacatctttcacctctcgctggaatgctgcactatccacaacaaacacaatagccctggctgaagacttaaaccgctctaagaactgaagcctcaaactctcatggccgggaaggtcaatcaaggtcagactattgcccctgttattgttgactctgtatacagcacagctgtcagtaatggacgtctgagtgtctctataaaggcctgttaacaacctgacaaagagcaacgttttcccggaatcacaaaggccaacaagaagaacagctctctgactgctccttctgctccggattaacttccagaagactagcgtcagcagcaccgcaagaaccgccaccactactgacaacagcgttgggtccgtctgctgcagctcctgccgcaaggtgtctaggtagggctggnaatgcccccggcaccgccgccatctccagccnggcgagtccgcggaagccatggatgagacgcgtggtc

SEQ ID NO: 47284 - DNA, 435 bp, Homo sapiens
  misc_feature (1)...(435): n = a,t,c or g
cancttgacatgattacgaatttaatacgactcactatagggaatttggccctcgaggccaagaattcggcacgaggtactaacctgcctcctatacctagctggtctcctctctgttgctcaatgttaccacagcaggctttctagaagcactctgacagtgttactccctaatatccttcagtgacttcaggaactttcaggagaagccaaactcctctgtttggtgtacaaggtcttctgatgtgtttcctccaccgaatgttctggtgaaacagacttacacttcttcagaagccacatttggccaggcctccgccttggtaaatgctgactctttgcatcaaagtgtgctancatncttnccacttggaaaantnctatgcatnttgcangccngcntancattncttgngaancnnctttggtnatcaa

SEQ ID NO: 47285 - DNA, 450 bp, Homo sapiens; identical to SEQ ID NO: 19920

SEQ ID NO: 47286 - DNA, 1362 bp, Homo sapiens
atgaataatgtgcctttcatattttctttgtatttctcttcaatagttgcttgacccaacatctttctgtctgctctatacaatgaaaatacaaactaaatgagaatagaaaaaataattaaagcattgaattgtacaaattacaaatctgttccaaaatatacttacattaaataaaatacgcatttcaataagagatctacagtgaatgactctatgcattctgggaggcttcacaacatctaggcagggccaacattcgtgaaagaagctaagagattttgcatccaatcacagtttgtagcgggtatcttattgccaatctgcgagttacactgaacacatcattagcatcgcttgtgcagaaaaccaattttgtttgggaaaagggaaagcaagctctggcctcaattttgagttcattacaacttcttaagaatttcaccaacagcctatacagtacaagttcaaaaaagtaaacatgttaaggtaagcagacaactcttcagaagcccaaacacattttcttgctgtatttatgttgaattctccatctacaatgagcagtcatgaagatggtcttcttcagggcaacatggtcacaggactggggcaatccaggggactgagagggagcatgaggacgggagagggggctacctcttgctgtttcatgttagagacaaactgtaacacagtccatgggcctgcaatcgtccccttttatcatctggcataacgtttgatgtagtcatccactttattccggaagtcctccttgtcccgcaaatgatgttctgcagcttcaatattcagtggatcatcaaaattcaaaagatcagtaaacaaagagtttaatccccaaacgacatcctttaatgttcttgtgggagcccagccagtgccatcaattgaatgttctctcaataaactcagacatatttcccctgtctctgtgatgttggggtgccagatcttggtcaggcatttcactttgggaggcaccatgttgtacgcatcgggaacttcagtttcaaactgaaattttccaccctggtagtaaccctcatctggggttactgttagctgaaaacaatgaagcttgtttggatcaggaaaatgcactttacatgtacaaggtaaattagcttcaagttctgcaacctctttaacaagcaatttgtctctcacagaaaccctccgagtcgagtcggacgctgtggctgccgtccgggaccctttgagaccatcgtcacgcttcagtttacttgctagcgttagcattactgctgcctttaccctgggctccccgagacaggcgaggcgggcccggcgcccaacaccatgcccggtccgggcggc

SEQ ID NO: 47287 - DNA, 2575 bp, Homo sapiens
  misc_feature (1)...(2575): n = a,t,c or g
ttttcattttttttttttttttgcaaaatgaaacaagtttattttctccaataacttctgtaaattacaaagacaaaatactaaaaactacagcatataacttttcaatatttaaccagagtactcgtaataaatatgcatccggaaacaagataaaaggctacacctcgtcaggcatcctacaaaaatgtctcaagttttatatactctgcagcatttctgtgcgggggcagaaggggctgttgtgtattttctgaagtgctgtgacaaaaggtcctttcacatttctttggagcatttttgaaattgcttaactataattaaacaacttaagaaaagtaacaccaagctttaaagccatttttgctttgctgtcattggtccttatccaatacagatcaacatatcatccagcacagccaagcacccactgagggccaagcagccttgtgggacatgggccctgtcagagcaggccctactttcagttaaatactttggagagtccaggattctgtctctctccctcaacaagattaatgccataagggaagttgccaaccgtggttagaaaacattttttaaccctgaaaagtaaagtgaaacagaaatattttttttcccgagacctcctgctatgcacccataatattacccatatcagggtttttagcttcaaagttgaaaaaacagattggtactaacagtccttctagagatcatttatgggcgctggtagagtcagggcattcaaaacattccaacgggtaaaaggaggatttgcctagattccagaaatgcgcctacaattctgaagacaccatggctgaaagttctaggggtgttggtggcagcctccatattaggtctggcatacataactaccttttgctatagcctgaaaactttaaggaaaaagttatatttttaaaaagtctcaagcatggcctacctaaaaagtattttgttaatataatctactgtaatttcacttatttaggagttcagatatgaaaacatctttatgagccaataaaaatattacagagaaaaaaatacttctacaaaagttgaggttaagaactatgaggcatttcttttggctgtaaacacacagtttactgtcccttgttgaaacacaaatgtttggatttcctgagcttcacagataacagcaggaggcaagtttgcatagaaaatttgcagtatgtcaacaatttacttaaaaaaagaacttttaaggacaacttgcttttgtttttaagtttcatattttagttaatagtgctcatcaaactgaatattgataagcagggtgatgagatatataaggcagatgggaagaaaacatggaattagagtttttaaatccacaggatatcatgatgaagggttttaagcagatacttcataactagtgccatactaatttagttagaaattaaatcatgttttggaattgaaagccaaaggcaaaaagagctctcctgtgctgaatggcactgcccgagtacaggaatggaaggagcattcactgcaggaggcctcagcacatcactcggtggtgataaagccactcagccagtcagggatggaggagggggcccccctgcccagcatcaggaccagacctctgggcatggctgatcccagctctggaatctgaagggatgacagggactttcacctctgctggtttgaagtctctaagcagttctgaggcgggcagtcttctcctgggagaagtcctcagaaacctttggaaagggaagaagctacgctaggccacagtgcataccacgaatgagaacaatggcagcggctgccgacaactctggatctaacacaaagacagatgacaagggcagtgtcctgccaaggaatccactttacttcttttgagactggtttttacacatggtaaggatttgcttcagtactttctggacatcttcatccatctggccctgcacagcatacagaagatgcattctgtaaactgatatgacctcctggtgttgtttcttgcattccgccagctggttctggagctgtttgacttgctgctgcagcgcctccagctgctgactctgccttttggatgagcttgttgagtaggagagctgggagaggctgttcaaggcctccttcaatttggtgacttccttcgacatctcatttatctttttatctttatcttcctccagttttgaagagctctcagagtatcttttcatttctgcaagttcttcctgagcttgctggaatttttgcagaagttcatttacttcttgctctttggatttcaagagagtctgaatattttccttttctcttttcacctgtgagacctcacttctaatctggacaacctctgaatggaccttctctttctctttcacagattcctttaatttcgatgccaacacactcacttcactctctaaggatgactggagtttttcataggaagaccgaggtaccattgcatcagtcatagcagctttctcttctaagagttgtttctccagctttgctacttccacttccttgcttgcaaggtgttctcncacga

SEQ ID NO: 47288 - DNA, 528 bp, Homo sapiens
gctagtttaaacaatacagaatatttactatcttatacaagaagtttgtcactcaacggaagagtgagggaacagtgaattccaaagccatttcaattagttctgtgtagggtgttgctcatagagattcaaatcgaattaacatatattcaaaaagtatttgataattttatttccatgctattgccatgccgtggagaagcagcaaagtataggcattttttgctttagtggttaagagcttttctttggagacaaacctaagttagactcctgctttgggcatttacttccagtgtgatctgggacatattacttaatttcccctttatttgtatcaccttaaaatggaaataataagacttacctcagaaggttgttctaaagattaagtgggattttataatgtacttaacataactactgcaacatactgttacttttgataattttttgacaactgtggggtaattttgaagaaataggagaaaatgagagagactgaataatagatatatctaagagagg

SEQ ID NO: 47289 - DNA, 372 bp, Homo sapiens; identical to SEQ ID NO: 19929

SEQ ID NO: 47290 - DNA, 499 bp, Homo sapiens
  misc_feature (1)...(499): n = a,t,c or g
tgacatgattacnaatttaatacgactcactatagggaatttggccctcgaggccaagaattcggcacgaggagatactgcatccccggcgaacgtctgtgtaacttggaggagggcagcccgggcagcggcacctacacccgccacggctacatcttttcgtcgcttgccggctgtctgatgaagagcagcgagaatggcgcggtaaaggaagcggcatgccatctcccctctgtttttcccttaggctgcccttgagttccagtccttaggcatgggcactgcggacgcgtctttagtgcctcagtggtacaatgttggtctcttagattcttctagccgtatcgccgctgtggtgcacttagccaccacacactagttgtgttgatctcgcttggttgtgctgctgaccctcggggagggaagttgngacaaaagcagatgcgaactcagtatcccatccagccantcacccacantgagttgcatactgtatgaa

SEQ ID NO: 47291 - DNA, 633 bp, Homo sapiens
ggattattttgactcttttatttgtattttctttttgattcagattggcccaagagagagaagcagcaaaagctaagaaagaagaatcaacaacaggtaacgccaacttgttggaaaagacaggaggagtggatttccatatgaaagctgtgccagggacagaagtgccagggcataagaattgggttgctgagcaaatttggaagagtcttacctgttcttcaccttaaaaatcaacataaacgtaaaatcatcaaatatgatccctcaaaatactgccacaacctgaagaagataggggaggatttctcaaacaccattcctatatccagcctgacttgggaattagaaggagggaatgaccctatgagtaagaaacggcgaggagagttctctgactttcatggccctcccaagaagataataaaagtgcagaaggatgagagttccactgggtctctggccatgagtacaaggcccaggagggtaatagagagaccacccttaacacagcaacaggctgcacaaaaaagaacttgtgattccattactccttctaaatcatctcctggtacctgtttctggatactcaggaaacttaaaaatctaccttttaagacttctggcttggaa

SEQ ID NO: 47292 - DNA, 387 bp, Homo sapiens; identical to SEQ ID NO: 2565

SEQ ID NO: 47293 - DNA, 340 bp, Homo sapiens
gggcagccaggattgttttatgaacaaggaaattcgcctgaggaagtcgacttcagtctgaatgcaaggaaaaaagttgaggttagcaaggaagcataagtcgaggaaaggcccacagggtagggaggaggaggaggaggaagacaattcacaccaggtgaagaaaacaagcgccatgcctcagtgtttcctccagcccgcagacttccatcgtgttaacatgaggtcggaagtcgctgtccttgccagtgtggacagcaacgtcgagggcagaggaagggcagagctgcaggcattcagacagccctggctggacagtaagggcccccaggcacggaag

SEQ ID NO: 47294 - DNA, 430 bp, Homo sapiens
  misc_feature (1)...(430): n = a,t,c or g
aaatatgatcatagctaagtgggcttaccttggcagtacttagactgtgtancctttgaagtgtcccttatctagggatggtttccatgaaaaccatacaggttttcctaaatgacacagtcctgggtaactgcctaagcttatgtaatcatgtgaggggttaataatctctagggtgtagttacactgatgacttttcaaggttcccagggcctgaccaaaattttggcttctcttaatacaaagtggcacctggaattttagctctgtgtacatgatattgggccccaaatgggtttctgtgggatgcaaccccagaaagggtactctgatagtactggagaaggtttactgcttgtcctgtcatcgtagttcatgtttttttccccaaggccaaagattgggctgggattggggtggtagtgtattt

SEQ ID NO: 47295 - DNA, 2010 bp, Homo sapiens
  misc_feature (1)...(2010): n = a,t,c or g
tttttttttttttccttttatcaatgttttatttttaaaaacaggtgaatccacttttttatacatcattgcacttcaataattacacaaaacacacaagtacatgcatctacaattacgcaccgcatgagaaccgttaggttataaaatctatcatcaaccagtaaatcaatgtgaaaaaatacagtgtcaaaccaaaaagtataactatagttgcatagaatattaccatgctataacatttcaaggtcattggaaacaaaagaaaaattataaaagtttgccttgattgaatgaatgtacaagaataaggttcaacacatcagtgcaaaaggatttatgaatttacatgacttaacagaagaaaagataatcacttaaaaagcaatcatacgtatatactgcaattcattatacccattcagtggactgttccagcttattaaagtcacaggttaagcccttaaaattatagatttcagtttatattactcatctttatgtaccagaactgcacaatttcctcatctgacaacatacaataaggaatgaatatcagcagcttaaaaatgaaacaagcatttactttattttgggatttctcccacccccaaaaatataaatatatatatatatatatttatatactgtatatatctgtaggttttgctgtactttacaaaagtgtatcactagatggcagcagtgcattttagagctttgccaatttaacagctgcattaagtaaaaaatggcgcatgcatgatctgatcctcagaggaccttttcacttctatttaaatattttaacaaaggaaaaaaaaaagcaacattcacagcacatcaagcccaaaatagtttacaccttctacactgaagcattgtttaaaatgtacctggctagatcacccttacaggagaggctaaataaggcatgctttagacagtcattgtggtgttgctcacttgaaaggggagagaaccaaagaggtccaagcagaaaattttagcaggtcatgttgccaccagtttcaggaacctaaagatattgtaagcagtacttaatttgtgtttctctggcgcaagtttttatctttgtgattgttggtagagttggttttcattggtccagctggttcatcatcgtcaggaacctcatctggcctcttcctcttctcatacacaacaatgatcaccacaaggatgataatttcagccagaattcccaagaaaggcccagagtggggccaggtggcattacattcatactcgcccagggtcttccgtgatctgcaggttcacaatgttcaactcagtgtaattttccttgttgatgatgaagaagcggccagaggtattgacaatgtccatgggcatcccgttctccttcttgcgccatatccagtctgggtgggggtagccaactgacttgcaatacatagtggcatcctgcccttcattcttgttctcactccgtttatggccagtgatgtcaggagcggctttcacttcaatggtggcgtttgctttaggagcgctgacaaagtgatatacgcagtggtattcgcctgaatcctcagctctcggcttattgatcctgtactccatgttgctggcattcttacgagtggcactcagttccaccccattctttgtccagtagctgtatgtaagggtgtgagagctggaggtgaggttacactgcagggtgacagggagaacagggctgtctcgaataatgacctcttcactggtgacaatccttggctcgttctgagcggcgcctggccctgggaggagggagccagagaccagcaacagcgagagggccagggcgctgggcagcgacgaacccgacatcctccctagcagaagacccaacagcgaatgggccggggccagagccggggccggggaaggganaagagggagggagggggcgggcgagtgcgcgagggagtgagcgagggaggcaccgcggctcggctccgtccttccccgtcctcctcc

SEQ ID NO: 47296 - DNA, 866 bp, Homo sapiens
  misc_feature (1)...(866): n = a,t,c or g
gggaaaacgcgggcttatcgtggcctttaaaatccggcttggtgagcttgggtcgcctctgaaggagaaccattttccatctctttcatagttttttcccccagtcagcgtggtagcggtattctccgcggcagtgacagtaattgtttttgcctctttagccaagacttccgccctcgatcaagatggtggttggacggccttcctaacctttacggggcctggcggtgctgacgcctgagctggtaggggtggagcaggtaggaaacagcaaatgcagaagctgctgcgcggaagtcggccatggactggaaagaagttcttcgtcggcgcctagcgacgcccaacacctgtccaaacaaaaaaaaaagtgaccaggatttaaaagatgaggaaatggatttatttacaaaatattactccgaatggaaaggaggtagaaaaaacacaaatgaattctataagaccattccccggttttattataggctgcctgctgaagatgaagtcttactacagaaattaagagaggaatcaagagctgtctttctacaaagaaaaagcagagaactgttagataatgaagaattacagaacttatggtttttgctggacaaacaccagacaccacctatgattggagaggaagcgatgatcaattacgaaaactttttgaaggttggtgaaaaggctggagcaaagtgcaagcaatttttcacagcaaaagtctttgctaaactccttcatacagattcatatggaagaatttccatcatgcagttctttaattatgtcatgagaaaagtttggctncatcaaacaagaataggactcagnttatatgatgtcgctgggcaggggtacct

SEQ ID NO: 47297 - DNA, 1426 bp, Homo sapiens
tttttttttttacggatcagcagcttttaaaatttcatgtttattcatatttttcaaaatatatgtacattaaaaaaggaagatttacaacaggaaagattgccttacatgcaacacaaattccaatgaattcatgatgggatcacacatgattatgatctaattcaagccaatcttctcaagtccatttcccagccatactttaggctacagaagggatcccaggagacaaaagtggaatgaataagaaacaaacatcttttgcctctggcagtactcaaggggccagaagatgtacttcaaaaactttaagacaattaaaatgtcaagtgccacagggaagagaaatgataaccagaaatttgtatttctagctagtactatttaacacaacttcacaatactaaaacaaatacaaataagaaagggttaggtagttgggcttcatttacttttttccttttctttttttttttaatatctcaaaaaggaagccacttgcttgatatcaaaagtgctgtggaaagaaaggaggggaaaaaaacccacaaataaatgtagaatctagtttattttaccaaactgtatatttttccacttaacatttctacattagcaatgatgtaactctccaacatttccttataaaaaaggcaaacaagaagtgacaactcatgctccaaatattaaaaaatatatttaaacatatgatcaagaagatttgggccgtgagtggtagctcacatctgtaaccccagggattttgggaggctgaggtgagtgggatcacgaggtcaggagttcaagaccagcctggccaacgtgggtgaaaccccaacttctactaaaaatacaaaaattagctgggcatggtggcacgcacctgtaatcccagctactcgggaggctgaggcaggagaattgcttgaacccaggaggtggaggttgcagtgagctgagattgcaccactgcactccggggcacctgagcaagactccgtctcaaaacaacgacgacaacaacaacaacaacaaaaaaacaagtgatatagagaacttgtgcttgctgttaagggaatgcaatactttgggccagtgaaaaatacctagaaattgatcaatatgaaatgtagcccaaaggagtcatatatcttcaaaatctaatgagatcaccctgtttttggcttattcccaaagctgtctctgtgtttacagttggagagaaaaggttagtggagtggcttttataaataagattaattattacagctataactgaagtctccaggcaggaggctttacaactcagtcagtgctatattgtgcctccattttacttccaggacctgactggcataccgttcttgatgctttctacaaatataaaaatctctgcaactgtttagataaaattggaagaaaaaac

SEQ ID NO: 47298 - DNA, 990 bp, Homo sapiens
cctcactgaaatcttgttcatctttaggatttctccagcacctcagttcgaattcccactccttatgtgcaagtggcactcttggctttccaattctgttttttatttaggtgactcaatcagtggctgaacttctgatcctgtggcccctttttgtagcttcagactgaaactggatgcctttgtagaacatattcacgcaaggattctgtatgaacagaaaaggatgcaataaaggaggattcctccaaaatgttttaattatatgtccatacaatatataaaatatatgcatcattttagctggataagaaaagcaagtcaaatgaaatgacacttctcgaaacttaagttaaataatcttgtaggaagaggtatattttgtctttttttaattattttagcattctgtacactgacaacgaggtaaaagaaaatgactgaaacttacaagtgaaagaacatttcacaattaaatccacaattgtatacatttatcttactcacatgtcagtgaaaaatcaccaactattataaaaagaggacaaattgtatcacaaaagaagcaaaaattagaaaaaattcataaaaaaatatatccaactatgaaaagcgttgctctcttggtgtcttcacatccgtctcttctgtgtactggatgtacaacacattgtttcctcggataaatgcatccccatacttattcttcagttgtccatttacatattcttctgtctgctccagggctatattcatgtagccatccaggcaagccaggacccctcgataatccactccagaatttaattttaccacaactggtcgtccgatgatttgctttaagaagtcactaggggtttgcttccgaagactcattttaacaatcctcgccggcgggaaccagaaccctcactccaggcgccccacgagcccggccgccgcggatgatcccagccaaaaccgaaagcgccgaggcaggggcacttttct

SEQ ID NO: 47299 - DNA, 2361 bp, Homo sapiens
ttttttttttttttttatgtaaatatttttcaaggttttattgcaaaccaaaatcagtttatcacacacaaaaaaagttgtgtgatgggatgagggaaggattgtacgtattataaccatgttaattacagtacattaaaatggtggtttacattacaaataagcctgtaagtttaaatatactagtgttataacccaatgtacagacgttctttatacaatacatacaattatcaggaatgcaaaaaaaaaaacataaataatgcccattttacaggtgacattttaaacaatgaaaaacaccaacggctctgactgacaactggggcattggtccataaaaaccctttctaaaaatagaaatatttgtagcagcaatgctttctttaagcatctgaatacgagtcattgcaagaccatttcaataaattttagttattaaccgtatcttaccaaaaaagtctacacataaatttatcttccaaatatggaagaaacaaacaatgtcccacgttgtagtgtcctgcaagtgtcacattgatgcttataacaaaatccatctgtgatcaggcataccacactcacacgacggttcacacagcatatccacaagggaaaataaagaactgaaacactgcgataggaaaagctttggagctaacacaatctcttcagaaaaggcacatttcataatattcgtcatcacagcccagacagatctgcaggagaccttttttagaacagcgtccgcctttctaacgaaactcctgcctccgtctaaggcggcactctaacgctcgtttcagagatagcaccacgttggaaggaagaataaaaatgaaaacctcatgagcctcactgaggagaatgtgctcttcaaaaagcttccagcgaacagtgtgcaataagattgctaagcttccagagatgtgcaaattctcttgtaagatgtcctgtcagctggcggctccaccaaaaggctaactaaaacattcggaaacacacataaaatcctttaaaaccaagcccctaacagggttcagaggaaagagtccgtgggaggcgcataggaaaagcctaggaaagcctcggcagcttccttgacgctggctgtgacgaggacgctgtcaggggacttgccaatggagttggggaccaggctcttcggtaaactcggggtcaaagtgccgtagctcgttgggcccactcacatttgggtttaaaagggggagtaatcttctttattaatgagatcatcccagttaattaaggagaagaagacatgactccttaacctcccatgaatcatccttggccccgagccgctttgtcctgtccttctgcaggaggccctccaggaggtgtcttgcggaatttgtaatatttggtttcagctggagaggcttgttcagaatgttgtcgtacatttcagctgtgtttcggctataaaaaggcggcaggccatacagcatctcatacaagacagctcccaggcaccaccagtccacagtcctgtcataaggctgcttatgaagcacctcaggtgcgagatactccggcgtgccacagaaggtggatgttgtgctgttgtgttcaatgttctccttgcagagtccgaagtcagtaagggacaatgtgtccctgtgaatctagcaaaatattctctggttttaagtctctataaacgatgttcagtgaatgcaggtagcccaaggcactggctatttcagcagcatagaaacgagcccgtggttccaggaagcagcgttccctctggagatggtagaacaactctccaccattaatgtagtctaggacaaagtacaatttgtcagcagtctggaaagagaagtgaaggcccaccaggaaagggtgcttcacattcttcaacagaacattccgctccgacataatatgcttctcctctttctttttcaggattgctttcttctgtaaaactttgactgcatagaacacttccttcctgcccttgtgtcttgcctagaagaacctttcccaaaactgccctttcccgatcactttcaagaagtgaaagtcagatggtttagcatgaggattggacgacgggccaaggttgatttgctgagaaggacttggtggaggagaagggttggcattcataagctcaggctcctgaggttgggagatcttcaagatggactgaacttcagggtgtttgcatgcataggagttattggcaatcttctgaataaagtcgttcagacccatcctcctctgcttcatgaaagcgatgagaattgccaccatgcccctcatcctggagtaagtgagggtgcccttagcagcctcagttttcaccgtcatcaccaccgcggggag

SEQ ID NO: 47300 - DNA, 1114 bp, Homo sapiens
  misc_feature (1)...(1114): n = a,t,c or g
tttgagatgaaaatagatggatttcagaattgattattgatgtaatagaaacaaggtgtagctgtttgggcactttttgtttagggtntatttttgctgctgtgttggcaaaatactgaaatgcagaagatggatgtgtcccagaaaagaagatggtaattatggggaagcatctgctgtgatatagttatgtttgtatgtgttacatctatcactgtaataattgtaagcaaagacagagagttttgtcttcattttgtgatggatggctctttcctttgcagccaaacaggggaaaaagttaatggcgaagtgtcgaatgcttatccaggagaatcaagagcttggaaggcagctgtcccagggacgtattgcacaacttgaagcagagttggctttacagaagaaatacagtgaggagcttaaaagcagtcaggatgaactgaatgacttcatcatccagcttgatgaagaagtagagggtatgcagagtaccattctagttctgcagcagcagctgaaggagacacgccagcagttggctcagtaccagcagcagcagtctcaggcctctgccccaagtaccagcaggactacagcttctgaacctgtagaacagtcagaggccacaagtaaagactgcagtcgtctgacaaacggaccaagtaatggtagctcctcccgccagaggacgtctgggtctggatttcacagggagggcaacacaaccgaagatgactttccttcttctccagggaatggtaataagtcctccaacagctcagaggagagaactggcagaggaggtagtggttacgtaaatcaactcagtgcggggtatgaaagtgtagactctcccacgggcagtgaaaactctctcacacaccaatcaaatgacacagactccagtcatgaccctcaagaggagaaagcagtgagtgggaaaggtaatcgaactgtgggttcccgccacgttcagaatggcttggactcaagtgtaaatgtacagggttcagttttgtaatattttttcagcaaatttttatacagtgtcatttaatttgggagaggatactgtccagaaaattaatgcatacttttgtcacaatttgcc

SEQ ID NO: 47301 - DNA, 2184 bp, Homo sapiens
  misc_feature (1)...(2184): n = a,t,c or g
cattttcacttgcctcatcttttattaagaataaaatacttttaagatgtaaacaaagggaaccatgaccaaggattaagtcaacgtatctatttttattatgaaacattaaattttgacacattgcctcatttgcttttttaaaatctattatctgacttaaacctattcagcaaaaatgccaataaattatattaatcatactttgggtctttttaaaactaggaacataatatgttttatgataaacaataatactaaatctgagttgtatgaactgttaacttggaaatttgttttagatgtttagcttaaaacaaaaagaaaaccaatcacattaatacactgttgcaaaagtttctccggaatgccctccacatcactgtgtgtcagcatccttcggcttcttcactgaggtatggaatgcagccatatgtaggtgtcaaggcactcattcctaagctgtcctatcctgcacatcttagcaatcacattagatggagggctgatgatatgcactaactcccaacccaggctatcttgcttttaaataaactaatttctttaaaagaaaatcatcaactaaggactcaaatgctgaatttaagaaataataattccaattcaatacacattccaatccaaatgtgttagtacttaaaagtcacaaattttgccaaagtaaacaacgaatgaactaaggcaaatagcattgtcacccacatgccttaaaatggtatatttttggtgtttgaagctctttgcaaattacattttgggacagttcagatggatttaaataaaagatgtgtgttctacataaattcagttttaaggttttcaacatgggtggcaacattacaaaaatatatcaatagtcttaatagtgaatgttttccacctggtttctaaatctttattttccatggaggtaaaccaaagtttagagtccatcttcagagttatgatataatctctattgttcctagagatttgaaaactagatatgatctagatccttgccaggatcttcactttcatcatcctcatcctcttggtctccagattcaagttcatcctcttcttcaactggatgaccaagatccttgagtttattcttcaatgacagtattttctgatcttgatcggccaagagcaccaagagatcatcttgttcttttttagaatctgtaatttccaactctagtttgtctttctcagtttgtaaaatggcaatggtactattagatgaatccagctgctctttaatggcagttctttcctcagacagagctttaatttcattctttaactctttggtctcttgtaataatgctgacagtcttccttctacatcagtagttttggtggctattatagtctcggtctctccttgtacctcaactgattttgcaaacgcttccgttttctgtaacagttcctgcttttctgtctgtagtttggtgatctccacagattgtgagtttaactgagactttaaagttgccagttcctgttttaattctgcaacttgttcagaatctctagctgaaactattgctgaagactgttcatttgtgccagatgtttgggaagatttcatattttcaatcatagagtccttttcagtcagctggctttgtaaaagttcctgattacggttttaattcttctatctcttctcgcaatctaccaatttcttctggctgaatgccattcatctgagccccctcactgtaagaaccttgatgctgattgtcttttcctagctgtattttaagaagattatactggtctttgtgctgctggatctgtgatacttgctgtgtgactgccgtctggagctgttcattttgacattttaatgtagaaacctgctgccttaattcctcaagttggagatcttgctctcgaatcatatttttgtagtgagtcacaatattgtcatgctgttctaatgtttttttcacctcttcttcttttttatcttcttcactggacttataaatagccttagttataacaccttcaagttcttttaccagcttcgtaaactcatgatcaaatatcatgtattctgggactggggaaagtttggctggggtttctgaggatgctctggaatacaactcatgtttgnctaataaatcccaggnttctctatggaattccccttggncaatc

SEQ ID NO: 47302 - DNA, 524 bp, Homo sapiens
  misc_feature (1)...(524): n = a,t,c or g
aacagctatgacatgattacgaatttaatacgactcactatagggaatttggccctcgaggccaagaattcggcacgagcttttccaccaaagctacaaacctaaaatgctgctgccccaaagcacaagagggaagagcaccgccggggccacaggacgtctgtcctccagtcacaggccatccttgctgctccctactgactctagcttacttcccctgtgaagaaacaggtgttctcggctgagcccccaaccctctgcagaaccaggttgatctgccacagaaaaagcatctttgaagacaaagagggtgaggtcttcatgagtctcctgggcccaaagccatcttctgatggaaggaagagagtagggccagtgaaggctgcccagagagaatgtcacagatgaggctgccctgcccctccccgcagggaggtttcatgagctcatgtctatgcagcacataagggtcttcagtgaaaagcagganaanagccactgcaaggatagctcantagcccatg

SEQ ID NO: 47303 - DNA, 513 bp, Homo sapiens
gccccaaactaccagttccagcgagttctatccatgattttgatggtgataatcaggtatatatcaagagtacttgtgtggatcttaacgattctggtcatactcggttcacttggaggcacaggtgtactatggtggctgtatgcaaagcaaagaaggtctcccaaagaaactgttactcctgagcagcttcagatagctgaagacaatcttcgggccctcctcatttatgccatttcagctacagtgttcacagtgatcttattcctgataatgttggttatgcgcaaacgtgttgctcttaccatcgccttgttccacgtagctggcaaggtcttcattcacttgccactgctagtcttccaacccttctggactttctttgctcttgtcttgttttgggtgtactggatcatgacacttctttttcttggcactaccggcagtcctgttcagaatgagcaaggctttgtggagttcaaaatttctgggcctctgcagtacatgtggtgg

SEQ ID NO: 47304 - DNA, 7118 bp, Homo sapiens
  misc_feature (1)...(7118): n = a,t,c or g
gcgcgtgtctggctgctaggccgacaccaaggactggccgggtacccgggaagaaagcacgtgctccagcagttgccgcgcccagccccgagagaggccctagggcgctgcgggctttcggggtccgcagtccccccgcgacgcgagccaacgggaggcgtcaaaagacccgggccttgtgtggcaggctcgcctggcgctggctggcgtggcccttggccgtcgtcacctgtggagagcacgtcttctctgccgcgccctctgcgcaaggaggagactcgacaacatgtcacccgcgctccaagacctgtcgcaacccgaaggtctgaagaaaaccctgcgggatgagatcaatgccattctgcagaagaggattatggtgctggatggagggatggggaccatgatccagcgggagaagctaaacgaagaacacttccgaggtcaggaatttaaagatcatgccaggccgctgaaaggcaacaatgacattttaagtataactcagcctgatgtcatttaccaaatccataaggaatacttgctggctggggcagatatcattgaaacaaatacttttagcagcactagtattgcccaagctgactatggccttgaacacttggcctaccggatgaacatgtgctctgcaggagtggccagaaaagctgccgaggaggtaactctccagacaggaattaagaggtttgtggcaggggctctgggtccgactaataagacactctctgtgtccccatctgtggaaaggccggattataggaacatcacatttgatgagcttgttgaagcataccaagagcaggccaaaggacttctggatggcggggttgatatcttactcattgaaactatttttgatactgccaatgccaaggcagccttgtttgcactccaaaatctttttgaggagaaatatgctccccggcctatctttatttcagggacgatcgttgataaaagtgggcggactctttccggacagacaggagagggatttgtcatcagcgtgtctcatggagaaccactctgcattggattaaattgtgctttgggtgcagctgaaatgagaccttttattgaaataattggaaaatgtacaacagcctatgtcctctgttatcccaatgcaggtcttcccaacacctttggtgactatgatgaaacgccttctatgatggccaagcacctaaaggattttgctatggatggcttggtcaatatagttggaggatgctgtgggtcaacaccagatcatatcagggaaattgctgaagctgtgaaaaattgtaagcctagagttccacctgccactgcttttgaaggacatatgttactgtctggtctagagcccttcaggattggaccgtacaccaactttgttaacattggagagcgctgtaatgttgcaggatcaaggaagtttgctaaactcatcatggcaggaaactatgaagaagccttgtgtgttgccaaagtgcaggtggaaatgggagcccaggtgttggatgtcaacatggatgatggcatgctagatggtccaagtgcaatgaccagattttgcaacttaattgcttccgagccagacatcgcaaaggtacctttgtgcatcgactcctccaattttgctgtgattgaagctgggttaaagtgctgccaagggaagtgcattgtcaatagcattagtctgaaggaaggagaggacgacttcttggagaaggccaggaagattaaaaagtatggagctgctatggtggtcatggcttttgatgaagaaggacaggcaacagaaacagacacaaaaatcagagtgtgcacccgggcctaccatctgcttgtgaaaaaactgggctttaatccaaatgacattatttttgaccctaatatcctaaccattgggactggaatggaggaacacaacttgtatgccattaattttatccatgcaacaaaagtcattaaagaaacattacctggagccagaataagtggaggtctttccaacttgtccttctccttccgaggaatggaagccattcgagaagcaatgcatggggttttcctttaccatgcaatcaagtctggcatggacatggggatagtgaatgctggaaacctccctgtgtatgatgatatccataaggaacttctgcagctctgtgaagatctcatctggaataaagaccctgaggccactgagaagctcttacgttatgcccagactcaaggcacaggagggaagaaagtcattcagactgatgagtggagaaatggccctgtcgaagaacgccttgagtatgcccttgtgaagggcattgaaaaacatattattgaggatactgaggaagccaggttaaaccaaaaaaaatatccccgacctctcaatataattgaaggacccctgatgaatggaatgaaaattgttggtgatctttttggagctggaaaaatgtttctacctcaggttataaagtcagcccgggttatgaagaaggctgttggccaccttatccctttcatggaaaaagaaagagaagaaaccagagtgcttaacggcacagtagaagaagaggacccttaccagggcaccatcgtgctggccactgttaaaggcgacgtgcacgacataggcaagaacatagttggagtagtccttggctgcaataatttccgagttattgatttaggagtcatgactccatgtgataagatactgaaagctgctcttgaccacaaagcagatataattggcctgtcaggactcatcactccttccctggatgaaatgatttttgttgccaaggaaatggagagattagctataaggattccattgttgattggaggagcaaccacttcaaaaacccacacagcagttaaaatagctccgagatacagtgcacctgtaatccatgtcctggacgcgtccaagagtgtggtggtgtgttcccagctgttagatgaaaatctaaaggatgaatactttgaggaaatcatggaagaatatgaagatattagacaggaccattatgagtctctcaaggagaggagatacttacccttaagtcaagccagaaaaagtggtttccaaatggattggctgtctgaacctcacccagtgaagcccacgtttattgggacccaggtctttgaagactatgacctgcagaagctggtggactacattgactggaagcctttctttgatgtctggcagctccggggcaagtacccgaatcgaggctttcccaagatatttaacgacaaaacagtaggtggagaggccaggaaggtctacgatgatgcccacaatatgctgaacacactgattagtcaaaagaaactccgggcccggggtgtggttgggttctggccagcacagagtatccaagacgacattcacctgtacgcagaggctgctgtgccccaggctgcagagcccatagccaccttctatgggttaaggcaacaggctgagaaggactctgccagcacggagccatactactgcctctcagacttcatcgctcccttgcattctggcatccgtgactacctgggcctgtttgccgttgcctgctttggggtagaagagctgagcaaggcctatgaggatgatggtgacgactacagcagcatcatggtcaaggcgctgggggaccggctggcagaggcctttgcagaagagctccatgaaagagttcgccgagaactgtgggcctactgtggcagtgagcagctggacgtcgcagacctgcgcaggctgcggtacaagggcatccgcccggctcctggctaccccagccagcccgaccacaccgagaagctcaccatgtggagactcgcagacatcgagcagtctacaggcattaggttaacagaatcattagcaatggcacctgcttcagcagtctcaggcctctacttctccaatttgaagtccaaatattttgctgtggggaagatttccaaggatcaggttgaggattatgcattgaggaagaacatatctgtggctgaggttgagaaatggcttggacccattttgggatatgatacagactaactttttttttttttgccttttttattcttgatgatcctcaaggaaatacaacctagggtgccttaaaaataacaacaacaaaaaacctgtgtgcatctggctgacacttccctgcttctggttttcgaagactatttagtggaaccttgtagaggagcagggtcttcctgcagtgcctggaaaacaggcgctgtttttttgggaccttgcgtgaagagcagtgagcagggttcctgtggtttccctggtccctctgagatggggacagactgaagacagaggtcgtttgatttcaaagcaagtcaacctgcttttttctgtttttacagtggaatctaggaggccacttagtcgtctttttttcctcttagaagaaaagcctgaaactgagttgaatagagaagtgtgaccctgtgacaaaatgatactgtgagaaatggggcattttaatctaagtggttataacagtggattctgacggggaaggtgtagctctgttctcttcggaagacctcgttttctaaaggctggactaaatggctgcagaactccctttggcaaaaggcatgcgctcactgcttgcttgtcagaaacactgaagccatttgccccagtgtggtcaagcagccatgctttctgggcattttcgtcctcccataatttcatatttccgtacccctgaggaaacaaaaaggaaatgaggagagaaagttactgttaagggtggttaacannnnnnnnnnnnnnnnnnnnnnnnnnnnnnnnnnnnnnnnnnnnnnnnnnnnnnnnnnnnnnnnnnnnnnnnnnnnnnnnnnnnnnnnnnnnnnnnnnnnnnnnnnnnnnnnnnnnnnnnnnnnnnnnnnnnnnnnnnnnnnnnnnnnnnnnnnnnnnnnnnnnnnnnnnnnnnnnnnnnnnnnnnnnnnnnnnnnnnnnncaaaatacaaaaannnnnnnnnnnnnnnnnnnnnnnnnnnnnnnnnnnnnnnnnnnnnnnnnnnnnnnnnnnnnnnnnnnnnnnnnnnnnnnnnnnnnnnnnnnnnnnnnnnnnnnnnnnnnnnnnnnnnggttaacatcttttaattgtttccaggattgagcaggttctcagctgggctctgatatcccgtgcggagttggacaagtgggcagcataaagtcactcatttcttaccattttattcccctcaattctcaatatattcagtaatgaagaatggtgccaccactcaagcaacaagcctcaaactcacccatgtcatctttttcttggatgattgcagttatttcaaaaatttgcatgcaaaatatacactcatcctacttcaagatggtggtggcaatagtcaggagaaggtagcattggagtcctggtttgattcgaaggatgaagacgaagaagcaagggaggaacaaatgaagaaccatctttgttcatgaataggaatattcaagattataaaggtatcaggtctcctaaaattgatctatggatttaataccattttcaatggaaattccaacagattttattgaatgaaacaagcaggtgtttatatggagtagcaaaggacttaaaattaccaaatgcttctaaatatgaaggagaggttggggacacgcaccctatgtgataccaagttttattgtcaagacagtgtcatggtgcagaggtaggcattctgagcaggggaacaaaataagggcctagaaactcacccgtgcatatgttgacctttgcaaaatgacctggtgacatggcaagtcagtggggacaggaaggaccactccctaagtaatcccagaacaatggctattcatgtgggaaaaaaagaaattttactttctctcaccttacctggtgataagttccaaatatgttaagggctttaatacaaaaagcaaaaattgtcagtgtttggatgaaaaaagccttagggcaggaaagaatctcttgagacataaagtagtaatcataaaggacaagatggttaagtcaattctgttaaaactcaaggcttatattaagcaaacacttgaagtgagaagatgatccacaacttgagaagacatttataatacaaataactgatgaaggattcataatcacaaatatagagaattcctatttaaaaaaatagaaaaatagtgaagactacacaagaggaaatagggcttttaaataaatagatgttctgtagcattggtcagggaaatatgaattaggaccacaatgagattccattttatatccataagatttgcaaaggttgggtctgacagtaccagttgttagatctgtagggacttgtacaacattgtggatgtgtaaacaggcaccactgctttaaaaaacaattatcccttacagacttgaacatttgcagaccttatgatcttgcttccaactcccacctgtatgtccagcaaactcttgcatgtggccactaggaggaatgtgtaagaatgttcatagttacatatttataatagttaataactggaaaaagtgaaatgtatgtctgtctacaggaaaataggtgaataattagatatatgtattcattctacgggatattattcagtagtggaaatgagtgaactacagctatacctcacaataagaatgaatctcagaaaatattaaggaaaaaagcaagtttgaagagaccacatggggcgtactatttttattgagcccaaaaacaagcaaaaccaaagaatatgtagtctaagcatacgtatacaataaaactatgctattaaaaaaaaaagaaggtaactgataaaccaaaattgagcatagtaattacccacagaaggaggaagtggaagggacaggagcacataggtagatgccaagttatgcagctgttctggttcctcctggtaggcttacaagtgtttactatatgctattaatacattatactttataactaatagataacagttttttacatattaaatatgttctacttaaatatattataaaaaataaaggcaaagtggaatgataacctaaaaaaaaaaaaaa

SEQ ID NO: 47305 - DNA, 988 bp, Homo sapiens
atcagaatgaagccatcatagtgtaaggcagcatatttgtctataaggagactttccaaagacagtacccatccaatgcaaataataaatttgaagctaatcatctgttgtgctttaaaatgagcaaattcacatgtctttattgccctttgaaagttggttaatctcaaaaactaccttttttttaaatatcctttgcaaggtcaattgtaacagttgtccatccttcctcttccctttgaaataaacacaaatagaatatatcttacagctgcaagaaaacctgagtcctttccaaaacaaaggtgactgaagtaaattatctctaaaacttattccatagacttcatttattaataagcatattgtgaaaatctacatttgttttagatttcatgtttacagagcttttcacaattgtattaggatctttcacaactactctctgggttttatgaacagtaaagaatctggctcatgtgaccctctattcatagctcccctttggctcctgtgaaggagctgatagttccctggagtaaataaatcaaaacaagatatccttgggagatttttagctgttaatctactcctggaccccatcctgggaactgagggaaaactcctagagagatatacaaatctttgaacaaaatatttacatgaaaagtggccagttttcttccttggagtagcaatctgtaaaaataagtgctgctgtttaaaaagtagcatgccctacaccataccaatgtattagtgagaatttggcgattctcaccaaacaacaatgaagtttcacatttggtactggatggagcttgggttagatctgccttttaaggcaaagtcaactctttcaacttaattctttttcaagggagtaatgtactgtctacacttggcttaaactaacttctattatggactactttcaatgtacatgtaaatgttcatgcatcagaagccaatttcttttaacagtaca

SEQ ID NO: 47306 - DNA, 401 bp, Homo sapiens
gcagagactgaagggaaataaaccaagggaaaacccggagaacaaaatccaggcagatatgagctagaatcctgggttggccacttaactaggcttggaggtgtgaagtggcacccctgaggacacacgagagtcccttcacctaactgtcctcatctttaaagtgggaatagtaacaatttctcctttgtccacttcctgggttgttgtgaaggttaaaggagatgaggcatttgtaaaatcaggtgagaatgtggttgctggtcatttttcagtccaaagctgcagttccgggtttgtgtttgtggtggtgggagcatttctgacagctcctctgttgagatgctttatccaggagttgtgctggagagaagccctaagaataacaccaccgccggcat

SEQ ID NO: 47307 - DNA, 913 bp, Homo sapiens
ggtgctgtgttgtttcatactcatctctaatgtgctctaccctctagacagtttgtttattttttttgagatggagttctcgtcctgtcacccaggctatggcgcaatcttggctcactgcaacctctgcctcctgggttcaagcgattctcctgcctcagcctcccaagtagctgggacttcaggcatgcgccaccacacctggctaattttgtatttttagtagagacggggtttcaccatgttagccaggctggtctcgatctcctgacctcatgtgatccacctgcctgggcttcccaaagtgctgggattacaggcatgagctactgcgcttggccaatatattttgaaagagttagatatgaactaaaaccttgctaatccttaagcctaataattcttgaccaagggtaaccctgggtttatccctagatttgtttagaatgctttgtaatttactttgcattcttaatttgaaattagacccaattctggcctctttggaccatctgagaattaaaagtctaagtactgcttcctagggagttcatgctagctggggaaagctttatgtgttacctgatagaatcaaagctaagctcttagcttgcattcccagcattactgatcagttctcctagctataaaatttaaaagaaactatagctttaaccatgtttctaacttatactaacaaaccatggcacagtgtgtagtaaattcctcttataattccaactaatttgccattgtaaataagtaaatatttggcttttcaaataatttcatagcagctgggcttatctgtagaatcctagcttttcttcactcttgattctaggctgttccaggaagaaaataattagggattaatacctaaaataattctccttctcaataatgtcacttt

SEQ ID NO: 47308 - DNA, 343 bp, Homo sapiens; identical to SEQ ID NO: 19978

SEQ ID NO: 47309 - DNA, 656 bp, Homo sapiens
gctcttattagccactactgcccatttgcttcaaaaatatatttattggtctccaccatgtgtgacacacacaggatttccaaacataccacttttgagaaaaatgtgcagtaaaaaggaggtttctagaaagtgacagtaactcacatttaagcactagctgacctaggaggagacctggatcttcattctggttctgcctttcatgagacttaagacttggaggagccacctgtcctgtagaccccaagttcctcagccataagcaaacgggttaatcctaagagttcaggaccagttgggtgtcgtgaacggagccattagcaaggtctgtaggattcaaggacttgggcacattcacagtccacactattgtcatggtcattgacttactacttgagctcaaagccctgacatttcaaaaggttgtcatgataacagtgaaacctctgaatcccttaaatcagaaggcatggcaacatactttttctactggcaatagctcttacaatgagtgtttcataatgaaatagtctctgctgaagaaaacatgttttccttttgctctctctgctttgttggtttctgtgctgtgtggaattggagaagatatatgctctgaaatattttatacagattactgactactggacagg

SEQ ID NO: 47310 - DNA, 917 bp, Homo sapiens
ggcgtaacgtccggtcaaggcagccatctcgccgggagacagcaagtgtcggatccgcaggcgcagcgtggcgatgttgtcctctacagccatgtattcggctcctggcagagacttggggatggaaccgcacagagccgcgggccctttgcagctgcgattttcgccctacgttttcaacggaggtactatactggcaattgctggagaagattttgcaattgttgcttctgatactcgattgagtgaagggttttcaattcatacgcgggatagccccaaatgttacaaattaacagacaaaacagtcattggatgcagcggttttcatggagactgtcttacgctgacaaagattattgaagcaagactaaagatgtataagcattccaataataaggccatgactacgggggcaattgctgcaatgctgtctacaatcctgtattcaaggcgcttctttccatactatgtttacaacatcatcggtggacttgatgaagaaggaaagggggctgtatacagctttgatccagtagggtcttaccagagagactccttcaaggctggaggctcagcaagtgccatgctacagcccctgcttgacaaccaggttggttttaagaacatgcagaatgtggagcatgttccgctgtccttggacagagccatgcggctggtgaaagatgtcttcatttctgcggctgagagagatgtgtacactggggacgcactccggatctgcatagtgaccaaagagggcatcagggaggaaactgtttccttaaggaaggactgatctgtgtgctcttatcaccaatcagttcagacctggttgattttgtactttggaactgtaccttggatggttttgtttattaaaagagaaacctgaagtactcaaaaaaaaaaaaaaa

SEQ ID NO: 47311 - DNA, 785 bp, Homo sapiens
cccctgctatgacatgattacgaatttaatacgactcactatagggaatttggccctcgaggccaagaattcggcacgagcaggccaatttaacctttgacccagctgctctactgcctggggcctcacccaagagtcctggactcaaggctatggtgtcgccatttcacagcccaccttctacccccagcagccctggtgtgcgatctaggcccagcgaggcagaggaggtgcctgtcagcttcgaccagccccctgaaggcagtcatctgccctgttacaacaaggtgcggacgaggggctcaataaaaaggcgccctccctccaggcgattccgaaggtcacagtcagactgtggagaacttggagatttcagggcggtggagtcatctcagcagaacggtgctaaggaagaggatggggatgaagtgttgccatccaagagcaaggccccaggatcccctttgtccagtgagggagcagcgggagagggagtgagaaccctgggacctgctgaaaagcctcctctgaggaggtcacccagcaggacagagaagcaggaggaggacagggccacagaggaagccaagaacggtgaaaaggccaggcggagttcagaggaggtggacggccagcacccggcccaagaggaggtcccggaatcgccccagacctctggcccagaggcagaaaataggtgtgggagccccagggaggaaaagccagctggagaggaagcagagatggaaaaggctacagaggtgaagggggagagggtgcaaaat

SEQ ID NO: 47312 - DNA, 1621 bp, Homo sapiens
tttttttcagggtaaaaagcccaaccattactttactttaatagaggacagctactggtgttaaatacatttattgtaaactttagacacaaaaataggttctctaggccattcacatgcacattaaaaccaacaggtgcaaactacaacaatgcatataattatacaaatgatgccactctgtgatgtttacaggattgctgtccatgcaaggtgatcataggcattatttatgaagccttaagatccagaagtgttgttactaccaaacctctgattaacactgtgaagtaagtgttttggaaggcagttccatgagttggctaacatttctttaaagcaaatgactgcttctaagcttagccgtacaagagattttggttgaactgaaaatattagtatttcattactgtgtgcagctctgtgatggacaagcaagttgttggcacatccaccaaaaacaattacttctccttcatcgctggcacaagctgtgtgccataaccttggtttttcggtatatggatgattaaattgtatccattcatttttactgatgcagtaagtccaggcatcacttagtggctgtttatcagtggtaaatcctccaaagagaaaaagatgatctgaagaaactggtgttaagtgaagtgcccaagatcgaccaactgggcatatgccttgtggaattaattcattcccactccccatgtatcccagattaagatagtgaagatcattcattctagcatctcgatatctgcctccaaacacgaagcctctatttccgacagttgcacaggcatgggcagcacgaggtgaaggtgctttaccagtagttataggctgggctccaggtaaatgtttcagtatctaaaatatgtacatgatcattccatcctcttggatgacttgaattccaaaaagatgtttcatcgaattcaaaagttcccaatactttatcttcaggcaaatatccataccctccaaaaaatattaacttgtttttatatacccagacaccaagtttgtcctttgatgatggaggaattccttggcaatcaattctttcccactgtaacactctgtctgtagaccttgaatccagcatgtagaacttattggtattgcctcttgaatggtgtcctccaaacaagtacagcaccctgtctacacacacagcacagcttcctgacatagaaggaggaacatcaccttcagtgttgatttttttccatcttccagtctccatgttgtagatccatagttcttctctaggcagataaaagtcatataatcctctgacttgattactcttgtagccgccccagacgaacatgtggcgcccgtcgctgacggctacgtggccgctgcgctcagcggggcaggcaagctccatggactcatagctctcgaaggctggcccaggcaagtcgtcagcccgcagatcctcgttgccatcagccatcttgaggctgcacttttgctaaccaacaatgcccacacccgcgaggggccaaaaaaacaaaggaaaaggagagaaatgcacagcggcgcgaggcaaggaaaaggcggtggcgaaagggacggcgttgaggcctctctgccgcctgcgctcgcg

SEQ ID NO: 47313 - DNA, 3233 bp, Homo sapiens
  misc_feature (1)...(3233): n = a,t,c or g
agctttatgccatgaaggtattgaagaaggccacactgaaagttcgagaccgagttcggacaaaaatggaacgtgatatcttggtagaggttaatcatccttttattgtcaagttgcattatgcttttcaaactgaagggaagttgtatcttattttggattttctcaggggaggagatttgtttacacgcttatccaaagaggtgatgttcacagaagaagatgtcaaattctacttggctgaacttgcacttgctttagaccatctacatagcctgggaataatttatagagacttaaaaccagaaaatatacttcttgatgaagaaggtcacatcaagttaacagatttcggcctaagtaaagagtctattgaccatgaaaagaaggcatattctttttgtggaactgtggagtatatggctccagaagtagttaatcgtcgaggtcatactcagagtgctgactggtggtcttttggtgtgttaatgtttgaaatgcttactggtacactccctttccaaggaaaagatcgaaaagaaacaatgactatgattcttaaagccaaacttggaatgccacagtttttgagtcctgaagcgcagagtcttttacgaatgcttttcaagcgaaatcctgcaaacagattaggtgcaggaccagatggagttgaagaaattaaaagacattcatttttctcaacgatagactggaataaactgtatagaagagaaattcatccgccatttaaacctgcaacgggcaggcctgaagatacattctattttgatcctgagtttactgcaaaaactcccaaagattcacctggcattccacctagtgctaatgcacatcagctttttcgggggtttagttttgttgctattacctcagatgatgaaagccaagctatgcagacagttggtgtacattcaattgttcagcagttacacaggaacagtattcagtttactgatggatatgaagtaaaagaagatattggagttggctcctactctgtttgcaagagatgtatacataaagctacaaacatggagtttgcagtgaagattattgataaaagcaagagagacccaacagaagaaattgaaattcttcttcgttatggacagcatccaaacattatcactctaaaggatgtatatgatgatggaaagtatgtgtatgtagtaacagaacttatgaaaggaggtgaattgctggataaaattcttagacaaaaatttttctctgaacgagaggccagtgctgtcctgttcactataactaaaaccgttgaatatcttcacgcacaaggggtggttcatagagacttgaaacctagcaacattctttatgtggatgaatctggtaatccggaatctattcgaatttgtgattttggctttgcaaaacagctgagagcggaaaatggtcttctcatgactccttgttacactgcaaattttgttgcaccagaggttttaaaaagacaaggctatgatgctgcttgtgatatatgggagtcttgggtgtcctactctatacaatgcttaccggttacactccatttgcaaatggtcctgatgatacaccagagggaaatattggcacgaataggtagcggaaaattctcactcagtgggtggttactgggaattctgtttcagacacagcaaaggacctggtgtcaaagatgcttcatgtagaccctcatcagagactgactgctgctcttgtgctcagacatccttggatcgtccactgggaccaactgccacaataccaactaaacagacaggatgcaccacatctagtaaagggtgccatggcagctacatattctgctttgaaccgtaatcagtcaccagttttggaaccagtaggccgctctactcttgctcagcggagaggtattaaaaaaatcacctcaacagccctgtgaagtgacctcagtgagatatttggtaccatggtgtaagctgatagcacaagttctggcgacaggtagcacgtatctgagagacacctgcaagcacacactgtcccagctggtacccataatgctgctgttcctgctgctgctcctgctttcctctcttctcgctttaaatgattgttagcaagttagattttcctggagcttcggaagaaatgaaaatggaaacatgatgaagatatagtcactgaatcaatgagaaaaataatgaacatatgaataccacctaaaaatacactgaataaagtacaccatatagcattatttttataggaaatatttcatgtcccttaaatattctttgttagttatagggatggacagtttatgttaagcacttagcttaaacaatccgtttatattagcactgtatcccttgtgccatccaacattttgtatgtttttgtaaacagttcatatacagtacatttctgtactgctttctttaatgtatacatgccttgtttaacttggaatctattattattaatcaattgactattaaatctggttaaatagttcacctggattaacagtattgttggacagtcctaaaaatggccagattgtggaacagctgttgaatgtaatacttccaaaatgtacatatctttccccacgtctgtttcactggttcgttcatttgtttgtttcttaaagtcaggtgctctgtcagactaacctagagagctgttatggtagagaaagttatcatatgtgtgtggcatgaaatcaagaatacacctatgaagttagtccatatactttgcaactccttagagtacttttttccttaattaaggaagtagtccttgcacttctaatcttacatagcatccatacttagaatttggcatatcatctgggattttgccaatatacgtcaaagccctttaagagtcatggtaaggagatgggtgaaggaaaatttagcaacaggtaattgaagtcctattggatatttcatgtttaaatagatattctatattaaacactaatttaaatgtaataaaggccaaagctcctgttatgaaattgggatttaaactttcttattttagggaataaaacattattgatcaaacagtatctgttctaacctaaaattatagggtaggggcagggctaaggtgaacaggcattgaggtattttctggaatccctcatggataatttataggccacatactgcttcctttgacttccggggntggtccgttttccatatgggccc

SEQ ID NO: 47314 - DNA, 2184 bp, Homo sapiens
tggccttttataggagtatactggagaaatggttgtagaaacagtatttacagcaaaaggaaacaaataatgttcattttaagcaatgtaccattcacaccgtcctgccttttcctctagaattttattaatggtagaaatttttatatgaaatgggaccaggaccaggctaatattttcagtccttaaatatcaaactcatatgctgttatcactgtgattttacttgtgaaatcattcctgtaatgtttagtgtttgaaaatgaaatattgaaattagggcttccagagtaacactgtccccggaaaaggatatgagaagtggtggatgttggatgggggtgggttgcacagtcctgtgcgggttcccatgggctttccagcgtttcatttagtgaaggaatgctcacactagatgtaggcacagcttcctgtggggcccggcagcaaagccccagggtgctccctgtcacctcacaacaaaatgcactaagaaacgtaaagaataagaggaattaatacccaccattaaaggatgtccggccaacctattgtggaaatttatagaatagtatacaccacagttctgaatagtgatatcacataaaaatacatactagaggacctgccacgccatgagcagtgtttttgctttttgggggccagtccctggggtgtggagccgctagggtttgcacccatgaaacagagaaaagccacaccctccaaggtgtggctttcattttgggactgctgcagggagggcagaggcattgctgagactgcctggcaacggctgatgccccaggtaggaccttttccatttcaaagtggtgttctaagtctgcgtccaacactgtgtgaggaaaaaggttggtgcaaaaatattcctggtcatccacccattaaaatagttagatgaggctattgccttgatgacagctgttccacacttcctcatgaaattaacccgtatgccggggcatttccaaatgtctgactcgtggaaattaacccttacgcaggggcctttccaaatgtctgaaaaggcagtggtgtcttttggggaaaatgttatgcatggaagccatgacctttttgcttagttgacagcaatcccttcttgtattgccaatcaaggttcatttgagatgcagaggaatgagcttgagccttcctccttttccttccggttttattcttcctcttgggaacatccctccactccgcactgcttcctgcagctttgtagagctggatttggaacttcgggatttggtttctgagtctgtggaggcaccgacttctcctgtaagaaaatgaatgttgtggaaattctttggctacttaactaaaactcgtgactgtataagtttggctacaaataagtaagaaattaatcatctgctctgtttctgctaatttctggtgtcacttcagtaattctggtagcagccgttgaatctgtcagtctcttaggtaacttcctgtaaacgatttggaaataggatgttttcaacgttcttttgtcttttgctgaagtcaggatagattcaagacataatctcttgtaagatctaaatagagcaaatgtaaacaaaagtgcatttttgtattcttgttaattttagatgctttcctagcttacaaaaagttctatttttgggttaaaaatcaatcaactttctgatatttccccttctgcaatgttattgttcataagaaaacacgagctgaaaatggaaatctgcagttgtttcagttgtcttgaatttctttcagtggccacatcatttccacgttttccacatccgggaggaagcctggactgtgcagccttcgggcacccggcacagacactgtgctggcaggagcttcagacacgccaagtggatggatttggattgaacgcatatgaaacaggagacgggttctcatgtgagatcaaagctcctccaaagcctgttcaagctctaagcgattctcaaatgttaccatttattaaaggtaaactacacctgttgaaggccaagttcagggcagctgttgtgatctgtgtagttaatgtatttattaatgcttgacttttaaaatcctgggcataaatagtgcagagcctcgtatgtttgtcagttcatgccgagatgaaataaatcacgcagaaagtgccagtcaaaaaaaaaa

SEQ ID NO: 47315 - DNA, 1541 bp, Homo sapiens
ggggagctggaccaggtgacagcggcatggacatatgccccaggctttcctgctggggtccatccatgagcctgcaggtgccctcatggagccccagccctgccctggaagcttggctgagagcttcctggaggaggagcttcggctcaatgctgagctgagccagctgcagttttcggagcctgtgggcatcatctacaatcccgtggagtatgcatgggagccacatcgcaactacgtgactcgctactgccagggccccaaggaagtactcttcctgggcatgaaccctggaccttttggcatgggcccagactggggtgccctttggggaagtaagcatggtccgggactggttgggcattgtggggcctgtgctgacccctccccaagagcatcctaaacgaccagtgctgggactggagtgcccacagtcagaagtgagtggtgcccgattctggggctttttccggaacctctgtggacagcctgaggtcttcttccatcactgttttgtccacaatctatgccctctgcttttcctggctcccagcgggcgcaaccttactcctgctgagctgcctgccaagcagcgagaacagcttcttgggatctgtgatgcagccctctgccggcaggtgcagctgctgggggtgcggctggtggtgggagttgggcgactggcagagcagcgggcacgacgggctctggcaggcctgatgccagaggtccaggtggaagggctcctgcatccctctccccgtaacccacaggccaacaagggctgggaggcagtggccaaggaaagattgaatgagctggggctgctgccactgctgttgaaatgagtgcccttggggccttgcatgggacacattcaagacctcgaagtcattcttggccaagcagatgacaacacatctcctggactggagcaaaaggtccttctgtgcaccctggtcgctgggaaacgtattctttgatctgttgaactgtcttccaacctgccatggcagttttgacactactcctgtttgccctcctgattcctgctttctttaccttttaacattgcccctttcaggggaccccactttgtagggaatctgcagaaggtgtgcttttgcacttgcagactgctctacctcagtgtttccttgggagactttattcagctgagagtgccctagacagtaacttctaaggtcacgtttactatttcagaggaaatatcttgccaggatacctacccatccttatagaacagttacctttagctgacccctttcctcacagggaccaagacaaagcatgggacatgaaattaagagtgaacttcttatgggaggctgcagctggatcagaggaaaaatccagtgtgacagagtgcaagtcagaagacctggcttttcatcccagctttgaaacttggaactttttgattgacaaattaataaacctctctatgcctcaggctcctcatctgtaaaaaaaaaaaaaaaaaaaaaaggaagagaaagaaatagaaaagaaaagttttg

SEQ ID NO: 47316 - DNA, 1385 bp, Homo sapiens
tttactgtattcatttttatttttatatttttgtttatattaggatattatacaattttcaaagctaataacagaaatctttttgtatgtatatttaaagcataacaaaataaaagtatttcacaaaagatgtccatattacagtactattgaaatatgaggcacagggtaagtatgcatttgtgggttaaaaacataatacattcattttaaagaataaacatttaatgtgaggtaacattttggttaaaataaatatcatagtaaatgttaacagcaacacctgaagtatatggatacaagaaaggtgttttgtaatagatactatgttgaatggtaaagcattcatgaaatggctgtaatatcttactaaatttacaatcattgcacattgttgagcactttatttatatagagatacccttcatccaccattcctaaaccttaccatacaaaacatagttactccatattttcacctgggtaactggtaccaatgtctaaataaggtttagaatagatatagcctttccattttttacctggcttccctcaaaaaacaattcaaaagtttaacttaatcaatataaaatttacttatgaacacatataaagaacattttataggtgactatataaattagagcttcaaatcatcttcatagttctttgaaattattccattcaaaattaaaatttgatttttacacagtggtttcttcaggaaaaatatgaacatttagatttaaaaagatacaatattcgaagcaaaaagtttccacatatagaaataatgaatttccctgatcattaaattcttcccagctatttccttctagcagatatattcactgagaagaaaagctttaatctttacttaaaagttactttgaggggtcaagctaatgaattttagatctatgtattcttaaagattgcaagaaaaaaaagagagtatctgttccaaccagagaacatttcatctcaattatattacattaaaatgaacatgacattaatggtcaataagaataattcttctcatacttctaggaatatatctatggatgctcagtataaatgttaaaagtcattaagagtgtgagaaaaaaaatgcatctagccctcaggaaaaacaaacaaaacaggtttcctttacctattccaaaataaaattacccttcagaaaccatacataactgattagatttcagaaaacaagggttcagactttttgccctttatacattttttaagtttacaaatgcttgaaagcattcaaatgagtgtaagaaaaacacatatgaaaaacaaaaccagcagttacatcggctaaagggaagtgttctttgaacatgaggttttcacgttggccgggttattca

SEQ ID NO: 47317 - DNA, 2322 bp, Homo sapiens
aagcacaggcccgtcaccccaggaggaaaagcccagggtctggggcagcagagcatcgcatcatgtttcccagggcaacttgaggtctgacttttggctccctcgccctaagaggctcttcctctcttttgctcatccaccttcacaccacttgtgagctgacccccaggaacagcttggctgttccaccagagcagagggaatcattgctggactggatttcttctggagggaagcaccatgaattaaaggtgccagagctccatgcatggaaaagtggcctgttggttcaacgtggtttccttgtacttgatcctcctgaaatgagagattttcctgagatgactgagtatggagattaccaggcagatgataccgaaatgcttaaaggggctgtggctgaggctgtagcatctctgctggaggtgagacactctgggaactgatttgacctcgaatgctcctaaaagagaacttgatagcctgacagcagagaagtattatttggtggggagtctgagaaagcctgggcttgtattatctgtccaaaaggaagcctcttcatctcccggtgccttggttgactattttggaaataggcatatcaaggttcctgattcagcactttgctcttttaataacaaatcgtccaaagatctcaaagtaagggtttttttttttagcttccactcttccgcagacttggtcatcgacctatttttgttgaagaatgaaaggcaatgacaagtttaacataaacaaattcgtgaattcttgttcattttgcattcctgcagtcagtgctaatccgtcgttcttaatcaggagttctgccaggtttaaggtcacctgcactcccagccaagtgggtgatgtatgcctcccactctctgcaaggttttcctcatttttatattcatttattcatcattcattcattcacctaactttcattaaatagctgcaccatcccaggccctgtgcggagcatcgggaatacaaagatgaggataaaacattgtccctgcccccgggggctcacatgccactggaaacaacagactcttaaactaacaattcaagcaggcgccaagtgctacgacagaggtgtgaataaaagcatcaggaaatcggatggagaaccaccattcacccaagggtcagaggaggtttcaaagaaaaggtgtcattgggagcagtgttttgcagaatgagccagagttcaccaagcaggcaaggcaaggaagggtgttgcagagagggaacagcatatgcaaaggcatatcagttcatggcatcacatctttcactggggaagccagtttccacaggcagcatcccaagggtcaataaaggccttatttaacaagcaagcaaaatgcaaaccaaaccattattcatttattggcttaagtatgctttctcctgaaaactttagcattgggtgcaaatattcagtatggttctcggagtccaaagggttttaagccagggcacaaccagaaaagtggctctctttggtagggagaggggctccaatatttcgttctctccccatggggcactgacagagaaatgaaatagttttatctggaaaattccagagctattatttactccttaccaagggaagttacttcttgtaaaaacttttaagccatttatcaacaagttcttgttgactcagggcataatgagttcctgagacatgctcttttgggggctggggctttaggtagaagaatttcaaggaaaagaattctcagcagagctcaagattgtagaaactcagcagaagctggtaaaaacatggggagcccggaggacaggctgctgtccagggcagaggccatgaagaagtgcttccgtggccgacagtctggaaatgaatccatcatacattagtgccatagagtttagtaaccgtccagcaagtgtcatcacttttacagaaaacaaggtccagtaatagcaagtcttagtacatcctcacttttattataaatgggtgttttttcataatttttactgacgctcagtaaccatgcaaaattgtgtatagcattaatgtatctacatacctacacctatctatatataagctcatggtagaaaaccatagctaagtagcatcgcagacttaagcgtacaaagtgatcttgttcacaagtaatctgttgacagtgccaataaatgataaaaaaaaaattaacatgtcacaatgtaacggatgaccatatgcacaattccatgaattaaatctgtttcctgtgttagtcagtattcttaaataaaatttataattgaaacatgaaaaaaaaa

SEQ ID NO: 47318 - DNA, 361 bp, Homo sapiens
ggaccagcctgaccaacggggtttcaccgtgttggccaggatggtctcgatctcctgaccttgtgatctgcctgccttggcctcccaaggtgctaggattacaggcgcgagccaccgtgcctggctggggtttggatttttattgtaaaggatttccatttccttgataataaatcatcttttagatcccttttaatttttaattttaattttttgtagagatggagtctcgctatgttccccaagcaggtctcaaattcctgagctcatgagatcctcctgccttgacctctcaaagtgctgggattgcacgtgtgagccaccatgcctggtccatagatcctcttgattcgtttgttgg

SEQ ID NO: 47319 - DNA, 1229 bp, Homo sapiens
taaaacccccaacttggccagaccggggattaccctgcaggagtcacttgtgtgtggcacattgtagccccaaagaatcagcttatagaattaaagtttgagaagtttgatgtggagcgagataactactgccgatatgattatgtggctgtgtttaatggcggggaagtcaacgatgctagaagaattggaaagtattgtggtgatagtccacctgcgccaattgtgtctgagagaaatgaacttcttattcagtttttatcagacttaagtttaactgcagatgggtttattggtcactacatattcaggccaaaaaaactgcctacaactacagaacagcctgtcaccaccacattccctgtaaccacgggtttaaaacccaccgtggccttgtgtcaacaaaagtgtagacggacggggactctggagggcaattattggtcaagtgactttgtattagcccggcactgttatcacaaccatcactcgcgatgggagtttgcacgccacagtctcgatcatcaacatctacaaagagggaaatttggcgattcagcaggcgggcaagaacatgagtgccaggctgactgtcgtctgcaagcagtgccctctcctcagaagaggtctaaattacattattatggggccaagtaggtgaagatgggcgaggcaaaatcatgccaaacagctttatcatgatgttccagacccaggaatcagaagctcctggatgccttaaaaaataagcaatgttaacagtgaactgtgtccatttaagctgtattctgccattgcctttgaaagatctatgttctctcagtagaaaaaaaaatacttataaaattacatattctgaaagagcattccgaaagatgggactggttgactcttcacatgatggaggtatgaggcctccgagatagctgagggaagttctttgcctgctgtcagaggagcagctatctgattggaaacctgccgacttagtgcggtgataggaagctaaaagtgtcaagcgttgacagcttggaagcgtttatttatacatctctgtaaaaggatattttagaattgagttgtgtgaagatgtcaaaaaaagattttagaagtgcaatatttatagtgttatttgtttcaccttcaagcctttgccctgaggtgttacaatcttgtcttgcgttttctaaatcaatgcttaataaaatatttttaaaggattacaaaaa

SEQ ID NO: 47320 - DNA, 759 bp, Homo sapiens
ttttttttttgagtttaagttaaacacccatatgaatttattaaatccagactgtgttaaagggcggcggtctaggagggggagtgtggtagggggacgagggacaagatgatgaacggccgtgggcatcccgtaggggggcccggccccaccacccgcccaacccaccccctcggcaacgctgcatcagcttcaccatgattcccagtggtgctgggctggcagggcgagatggctggaaacacagagggacagagggacagacagcgcctccacaaacaaaccctgggcctgccccggcccctacgtcacacgctgggccctgacctgaggcgggcctcccaccgccccggcctgatctgtccagggaaagggcgacagggaggggaggcgagggggccgggacgcaggggtagtggtcgccaggagccggagcaggtgaggaccagtctcgactaatcctttttcttgtcctctgctggctttggaggggcttcctggggctcgctggcagagctggccccctgggtgggcttggtgggcagggacgtggaggcctcctccctggtggcggtggtcgtggtgggtgcaggtgtgggcgtgagggcccctgctgctgtgggaacctcggccacgggggcggcagctgtggggtcttctccactcatgccaaactcgttgactcgggtggggtcgacgcggtagatccaccgttggtagaggtagatgaagaaaaccacatcgtcccgcaggcagccg

SEQ ID NO: 47321 - DNA, 1438 bp, Homo sapiens
  misc_feature (1)...(1438): n = a,t,c or g
tcacgcttcgtggggcgggacgaggagaagccaaacgtaaagacaccaggagtttctcgggcccagctgtggctgctgccggggagccccaagccttgcgnggtccttgcggcgaataggagtctggtcaggcgtcaggctagtccgacgaagagtgggtgtgatcagcactggaaaagatgcctgcccctgctgccacatatgaaagagtagtttacaaaaacccttccgagtaccactacatgaaagtcttgcctaggaattttcaagattgtggagttggactgaatgctgcacagtttcaaacagctgcttatttcggctgtgaaggacctgtttggggaggttgatgccgccttacctttggacatcctaacctatgaagagaagaccttgtcagccatcttgagaatatgtagcagtggtcttgtcaaattgtggagctctttgaccctgttaggatcctataaaggcaaaaaatgtgctttccgggtgattcaggtttctccatttcttcttgcattatctggtaatagtagggaactagtattggattgaatgaatagtcttccattttggaaacgttcatccactctcatatttattttttggtgcctgcatgtttgaagactgaagccaggctaaaagctcttgatgaaatttgagggtgctgaagatgttcccactaatttccagccatcacctttggtggggtgggcttcggaggacagtctgtctgaacctgccagtgctgaccctgcagcactttcagcatatgcacatcaaagttggagaccgcgctgaacttaggagggccttcacacagactgatgtggctaccttctcagaattaacaggggatgtcaatcctttgcatttgaatgaagactttgcaaaacacaccaagtttggaaatacaattgtacatggagttttgatcaacggacttatctcagctctcctaggaactaaaatgccagggccaggctgtgtatttctttcccaggaaattagctttccagcccctttatatattggagaagttgttttagcttctgcagaagtgaaaaagctgaagcggttcattgctattattgcagtgtcatgttctgtaatagaaagtaaaaagactgttatggaaggctgggttaaagttatggttccagaagcttccaaatcctgaaatagatgttttaaagatgcaacctcaaacaccaatgctgttgttaaagagcctatgggggaattgctgctctttaccaaagaatggttgataggcccagaagcccatcttagttaggggaagggagcaggaagagggttgttcaaatgcccactttccagtttggccttatgcttcatgcagacttgagtgtatgcaggatttcattatctgcctgggttttttgtttgttttttgttttttaattcaagaagt

SEQ ID NO: 47322 - DNA, 868 bp, Homo sapiens; identical to SEQ ID NO: 2633

SEQ ID NO: 47323 - DNA, 1122 bp, Homo sapiens
  misc_feature (1)...(1122): n = a,t,c or g
cctggccctgattatctgttttttgaatagtgaccctaatgtgcttttccagttccagtaaacttttgaataaaatttttcagccagtgtcttccatctaggtcccatcttctgggtcataatgtaaatttcttcccaaaagcccagtggtggccactccagatatttgatcagaggattgagagactcaggctttttggtggaaaaagcataccagagcttctgttccattatatggtgtccaaagtgaatgccatttgccaaaaaagcgaagtagcaatattgccggcatccaacagcgtccatataaacggaggcagaattccatatgtcaaattggtcaatgctgtacctggacaggccacattggaatagagaccctgctggttgaagttcctgttcaaagccacactcaaaaggtcagtggcatatttggaagagctgtagggttccttgcctttgctgtgctggaagtcctcgaggctgaaattagatttccttgcactgcgagatgatgtccagatgagctgagatggattgtcactgtgacagaggagaggctccagttcccgaatcaggataaaatggccaaagacattggtctcaaccacctcctgaagtccatcagcagtgatcttatcaccctgggtcagcaggccttcagctgtggaagaacatatgaatcacttttccttgaaaaaaaggcccaaagaaaagtgctttgatatttagttgtggattaggcatgatcccagcatttagatatatacagtctaatctctgaaacctttgcttaagttccttggaggcccggaagaccgactgcaggttgctgacatccacctggacaatggtgacctcagcagtggggtgagaggccagcagagcagcacagacagcttctgccttgctcatgttcctgcacgccaaacacagatgaagctcatcatcttccgccagcagccgcttgcagagggccaggccaatgccactgctagccccggtgatcaaaaccacctttcgcatcttcgcgcactcacacttccaagcagtgaagnaagacgccaccgctgctttcggaagtcctacgatttcgggccgcctcacccgtcaccaatcaga

SEQ ID NO: 47324 - DNA, 1789 bp, Homo sapiens
ttttttttttttttttttgtgtttcattttctgtttattacttgaaatcacggtgctcgtgtaggtttttttttttttttttcaattttatgttttcatacatgaaactcacgccaggtgccgggacccccacagcccgaccccccgagggcgggtaaatgctttcttgggcagcccttaccgggcagagggtggcgagccggttcctgcctggaggttccaccctcaaccagtggaggcacagacctccaccagaagggcacactttcatctaatttggggtatcactgagctgaagacaaagagaagggggagaaaacctagcagaccaccatgtgctatgggaagtgtgcacgatgcatcggacattctcctggtggggctcgccctcctgtgcatcgcggctaatattttgctttactttcccaatggggaaacaaagtatgcctcccgaaaaccacctcagccgcttcgtgtggttcttttctggcatcgtaggaggtggcctgcctgatgctcctgcccagcatttgtcttcattgggctggaacaggatgactgctgtggctgctgtggccatgaaaactgtggcaaacgatgtgcgatgctttcttctgtattggctgctctcattggaattgcaggatctggctactgtgtcattgtggcagcccttggcttagcagaaggaccactatgtcttgattccctcggccagtggaactacacctttgccagcaccgagggccagtaccttctggatacctccacatggtccgagtgcactgaacccaagcacattgtggaatggaatgtatctctgttttctatcctcttggctcttggtggaattgaattcatcttgtgtcttattcaagtaataaatggagtgcttggaggcatatgtggcttttgctgctctcaccaacagcaatatgactgctaaaagaaccaacccaggacagagccacaatcttcctctatttcattgtaatttatatatttcacttgtattcatttgtaaaactttgtattagtgtaacatactccccacagtctacttttacaaacgcctgtaaagactggcatcttcacaggatgtcagtgtttaaatttagtaaacttcttttttgtttgtttatttgtttttgtttttttttaaggaatgaggaaacaaaccaccctctgggggtagtttacagactgagtgacagtactcagtatatctgagataaactctataatgttttggataaaaataacattccaatcactattgtatatatgtgcatgtattttttaaattaaagatgtctagttgctttttataagaccaagaaggagaaaatccgacaacctggaaagatttttgttttcactgcttgtatgatgtttcccattcatacacctataaatctctaacaagaggccctttgaactgccttgtgttctgtgagaaacaaatatttacttagagtggaaggactgattgagaatgttccaatccaaatgaatgcatcacaacttacaatgctgctcattgttgtgagtactatgagattcaaatttttctaacatatggaaagccttttgtcctccaaagatgagtactagggatcatgtgtttaaaaaaagaaaggctacgatgactgggcaagaagaaagatgggaaactgaataaagcagttgatcagcatcattggaacatggggacgagtgacggcaggaggaccacgaggaaataccctcaaaactaacttgtttacaacaaaataaagtattcactacc

SEQ ID NO: 47325 - DNA, 1042 bp, Homo sapiens
  misc_feature (1)...(1042): n = a,t,c or g
gaggggtgggagatccacaggaccaaagggtgcagtgatgggctgggtggcgggcccagggaaatggggtggggatgggctgggtaagacctggccctcccctgctgccctgaagaccaccccagtctacctcggtgctggccaggaaacctttcggctacctctcccaccatcccagactntgggcagggggatggggagggagtgggcctggatctgngacctccctccagaatttcctccagatgggggcagtgcccagggaggggttatttgtcttccctgccatggagtgggaatccccagccgaggccctaggcccctcagcagggaagggatccccggggaggcaggtcccaggagcagaccctgcccccagcccccacagacacaccccaatctgaaagccatgcgtgtcggtgtatataggaaccatgtacagagcccagagaagccccctacatccccccgggaaaaaaaagaaaactagacagaaactcatctatatattctgtatctggagttccgttttgaatattaactgtgttatttttatacactttttaagccttaactcgccattgatttaccagtttaacgtttcctggggtttctttgcccatggggttctctgcccccacccccggccctttgtttgacttgcgtcgtctgatactcagtattgtagctttttgtccgcatgttactccctgtaaatacgctgttatacatactgttaacacccctttgctttttctatgggacctccaggccaccatatttagaactagttaccttattaaaaaagaaaaaacagtctgttggcttctcagtctgcatcttggaggcagggaggtgagggcaggtgcccctcagacacttcaggaaggtagtttgcattctatttaaaaaagggagtggggagcaaatgaaaatcaaatgtggggggaaaacactaaagggggcaagaaacaaaggaattacaaaccctctgctctttgtatttctctgttgtgaagaataaactgtacctgcacccgga

SEQ ID NO: 47326 - DNA, 635 bp, Homo sapiens
tataaaacgaagcacataatagcaactaacttaaagggtgattctgatgttaaatgaggtagtgcatggtgagaaaccccattcagtgcatggtaagcactcaatgagtgttggctattactgaccttgaggagttcagaaatctttcccttgtaaaggagcttaatccattgcgtccttactgctcatccatttacgttcctggtcagtgatgtgttgaaggaatgattttttaatagaggcttcaaattttctttgcttataactgcagaaagtttagaaaaacaatgaattacctctgtgaaaatacaccttatttctgcatgccaccaagacctgccagatacacttcacccctatatttgtccaagataatatttctgaactataaagatatttgttttggaataaattagaaaagctactttagagaagaaaagttacagaattttactttttcttcacttacgtaattagaattcctatgcatggttttgaacaggaaattttccttgaccccttcacaggccttgcaacaggggtgcctcactttctcagcctgaagctctgaacccctcgggggaaggagagcatgcaggtgagcaagtgcaggagctagagcaagcacttttggc

SEQ ID NO: 47327 - DNA, 1835 bp, Homo sapiens
gtaataaaaatatttagtgaaaagacacattttaactcccatttatgaattttaaaaatacaaataaaattttatcaacctgatattcagcctataactggctcaatacatagccttatttcctaaaatcatattgcagcatcttctgaaaaactaaatgcaattttataccttcattagttatgttaatagaggtaaatatttaaacagtacactcatccctgggtctttaaataaaactgaaaagtcttagtgtaagtttaaaattttaatatttataaatttaaaaaattttacacgtgctgagtggtagcagtgctaacatttttgtgaccattaaaccacaaactcactgcatagagcttctttctttgtacagataatcaaatcacaataccaacatttgcaatttgtaataattttatgtggtaaaagacaccacaccaggaagcctgggctcagaaaacacttgaggtcagatccctagtaggtacatagtgcagatgcacgtatataatttcaggctaggggaaattaggctactaggtatggtatctggacaggttccctaatagcctaaggaggcccctaagaatgcagacggggagaaaaaaaaccaaaaccaaaaaaaaaagacacctctccaattgctgggagggcctgggaataggtgaagatcaaaccacagtgggagaggagggtaaagatgtgagcttcaagcgggtaaatggcaagccacacctcccagttccctaggagggaatcgccacggccgacttcagcattctcgtctttactaagacttacccatagagaactacagcaggaaaccgatttcttcattcattctctttaaaaagtatgaatgcccagtattaagcttctatttttatttgaaccaaacatattctttggttaactatgtcatgggttctcactataatcaacaaagcatacttcatatattttatatctaaatgaaaatatgcttaaaattcaactggaaccatggcatttcacatcaatttgagctcagcaatatgcctaatttggacattttaattttagaaaaccaatttttaaaaattcttaaatgcagtgttttcagaacatagttaccaagtcagagaataaccacttatattttaaaaagattaaaacattattatatcctcaaatcaacaatgtttttttgtgggaaagcttacagaaaattataatgttaaacctcatagccaaatcagttccttattctctggttttagaaaacacaaacaaaccttaagaagtaccgaggttccttctgacttaaaaggttaatgttttattcaggaaccaataacaataattcctcatcaaagacagctaacttagtaaggtcaattgacaaccacctctaacaacagaggtggcaaacagataaaaattgtttaacagagaaaaatattatttcagggttcagaatgatgttgaatactaggagactcaaacttgtaatccttgaaactgacagctagttcccttcaatactttaggggttcatagaagtattaacagaaatgggaaacatggtgatattacaactataaagacttgacatttttgttaaaagagaaagttcaaagacagttaaggggagtgttaaataatgctgactggggggaaatgatatagatacttgcttttcaaatgaaaatcatggacaagtggtagtaaccatcccatctgaacagagtaatgtaatataattagatacacagtttacaacgaaataagactaaattcttaaaattagtttgaaaaaaacctgcagtttgtttacattaaaagtcatc

SEQ ID NO: 47328 - DNA, 1093 bp, Homo sapiens
agtgtacacgtcggttgcctaacaaccggcagcggactcctttggctatggcctccaactttaagaaggcaaacatggcatcaagttctcagcgaaaaagaatgagccctaagcctgagcttactgaagagcaaaagcaggagatccgggaagcttttgatcttttcgatgcggatggaactggcaccatagatgttaaagaactgaaggtggcaatgagggccctgggctttgaacccaagaaagaagaaattaagaaaatgataagtgaaattgataaggaagggacaggaaaaatgaactttggtgactttttaactgtgatgacccagaaaatgtctgagaaagatactaaagaagaaatcctgaaagcttttcaagctctttgatgatgatgaaactgggaagatttcgttcaaaaatctgaaacgcgtggccaaggagttgggtgagaacctgactgatgaggagctgcaggaaatgattgatgaagctgatcgagatggagatggagaggtcagtgagcaagagttcctgcgcatcatgaaaaagaccagcctctattaagatcagtgtcttctttttctactgcaagcacatgtaactagatttagtgcctgccatggtgtgaaatctggcttttgagaacacaaacttttcccccacggacctccctttatcactttaatagtgaccttgagcctattttagccgtttggaagtgttctttgatattacagttctttgtaaaatgacctgcgaattaccctaattctcaaaagcaaaacaagagcacacaagcgtgaagaaaaggatcttaaagctttgagcacctgccattttgccttgcatcgtttccctcgtcatgcatttccacatatccacaaacacagaacgactttagacaagcacatgttacacctgtgttgccacaagcagtcattcttgacggctccagtttttatttgacacttgagtttagttttctcttttataaacccagtgaactcctgcactggcatttggatgtgtgttaatgctatttgttttgtcttaaaagtaaaacctttctcagtttgaacttgtattctct

SEQ ID NO: 47329 - DNA, 352 bp, Homo sapiens
ggaaaaaaacagaacactgcttcatatggagaagcccctcctgcccctcctggtcattgtccttttcatccctcccacaggtagtcactgagttctaataccacagagtcttttgactttcttttgagccttatgtaattagaatcacaaaagatgtattcttttgcctgacttttatacttagtattgtttttgaaattcatcttgtgtgtaactgcgatttgttcattttcattgcttagtgaattattccaaagttggatatacctggttaaccaccacccgaatgaaaaaaacagtttttgggccgggcacgatgggcttcacgcctgttatcccaaagtgaaacttt

SEQ ID NO: 47330 - DNA, 2439 bp, Homo sapiens
gttttagtgcagtcgttttgttcagttctttccagtcctacttgcagttctgaagaatatttctttgtttatgatgccattacaggaatttgtaagtgtctgggttcgagatcctaggattcagaaggaggacttctggcattcttacattgactatgagatatgtattcatactaatagcatgtgttttacaatgaaaacatcctgtgtacgaagaagatatagagaattcgtgtggctgaggcagagactccaaagtaatgcgttgctggtacaactgccagaacttccatctaaaaacctgtttttcaacatgaacaatcgccagcacgtggatcagccgtcgccagggtctgggaagatttcctcagaaaagtcctacagaatgcacttttgctttcagatagcagccttcacctcttcttacagagccatctgaattcagaagacattgaggcgtgtgtttctgggcagactaagtactctgtggaagaagcaattcacaagtttgccttaatgaatagacgtttccctgaagaagatgaagaaggaaaaaaagaaaatgatatagattatgattcagaaagttcatcctctgggcttggacacagtagtgatgacagcagttcacatggatgtaaagtaaatacagctccgcaggaatcctgaaaaataattctaatgttactatcttaggaatagcaaattatgtccagtcatagagaagaaagcttcataataatacattcttacctaaagctcactgtcatgatgttaggtatttaaattcttaaagatgttgggttgtttattagtggtatttttatgttgtcttattttaggtaagcttctgtgtaaagctaaaaatcctgtgaatacaatactatcctttacaggcagacattattggtaaacaagatcttgccctccaatgaaatgacttacatgttttaaaaaaccgagttgggtttttattgaatttaaaaagataggtaactaagtagcatttaaaatcaagatagagcattccttcttgtatcagtggggcagtgttaccataaacacggtgtatatgttgttaaaccctatgaagagtaacagtgtagaccagactgcctctctcagatatgtgcctgatattttgtgggatacctcccctggcactggcaaaacactatgcttttgggtgttagactgaaatattttaagagtatttaacctttccagtattctgtttcacgcttagatggaaatgtatcttatgaatagagacatattaaaataatgtttacatcttagaaaaaacatagatagtgctagtaatattacttataactgtaatatatagattcagaaatacattttcattatccaaaatcagcttcaacaaatggtttctggagacaaataatttgttttcattatcattgtataatcaggttaatgatttattttttgactaaatgtgcaatttcttatcactagataactttcagtatcagtggtggttacttattacttaaatcagaggaaggattttataaagattaataaatttaattttaccaataaatattcccataatttagaaaaggatgtcgacttgctaatttcagaaataattattcatttttaaaaagccccttttaaagcatctacttgaagattggtataattttcataaaatgtctttttttttagtgtcccaaagatatcttagataaactattttgaagttcagatttcagatgaggcaacattttcttgagataattaccccaagtttcatccatgttgaatggtacaaaatatttctgtgaaactaacaggaagatattttcagataactaggataacttgttgctttgttacccagcctaattgaagagtggcagaggctactataaaaagcaaccttttcattttcactaagagtttaaaagctattgtattattaaaaagtctttacaatgcttgtttcaaagaaccaacagaaaaaaaagctaagaaaactgagaactaacattaaaaaaattaaatttagaataagaatgatttctttaatttgtcctttttttctttggtctaaaacattattaaatttttgtaaatattttgatttaatgtgtcttagatcctcattattttaatacaggaaaagaaaagatttagtaatttcttaccatgctaatatgtaaagttcatgccatccaggcatttaagagcgatcctcatcccttcagcaatatgtatttgagttcacactatttctgttttacagcagttttgaaaaacacatactatgccaccaattgtcatattatttttagatgatgtaacatagccatcaaaattaatattatgtaatgcctaatacttagtatgtaaatgtcacgagatcatttttacattaaacgtgaaaaaaaatcaaaaaaaatc

SEQ ID NO: 47331 - DNA, 479 bp, Homo sapiens; identical to SEQ ID NO: 2656
  misc_feature (1)...(479): n = a,t,c or g

SEQ ID NO: 47332 - DNA, 1624 bp, Homo sapiens
  misc_feature (1)...(1624): n = a,t,c or g
ggatgaatttgataagatggggaatcaacatcaagccttgttggaagccatggagcagcaaagtattagtcttgctaaggctggtgtggtttgtagccttcctgcaagaacttccattattgctgctgcaaatccagttggaggacattacaataaagccaaaacagtttctgagaatttaaaaatggggagtgcactactatccagatttgatttggtctttatcctgttagatactccaaatgagcatcatgatcacttactctctgaacatgtgattgcaataagagctggaaagcagagaaccattagcagtgccacagtagctcgtatgaatagtcaagattcaaatacttccgtacttgaagtagtttctgagaagccattatcagaaagactaaaggtggttcctggagaaacaatagatcccattccccaccagctattgagaaagtacattggctatgctcggcagtatgtgtacccaaggctatccacagaagctgctccgagttcttcaagatttttaccttgagctccggaaacagagccagaggttaaatagctcaccaatcactaccaggcagctggaatctttgattcgtctgacagaggcacgagcaaggttggaattgagagaggaagcaaccaaagaagacgctgaggatatagtggaaattatgaaatatagcatgctaggaacttactctgatgaatttgggaacctagattttgagcgatcccagcatggttctggaatgagcaacaggtcaacagcgaaaagatttatttctgctctcaacaacgttgctgaaagaacttataataatatatttcaatttcatcaacttcggcagattgccaaagaactaaacattcaggttgctgattttgaaaattttattggatcactaaatgaccagggttacctcttgaaaaaaggcccaaaagtttaccagcttcaaactatgtaaaaggacttcaccaagttagggcctcctgggtttattgcagattaaagccatctcagtgaagatatgcgtgcacnnnnnnnnnnnnnnnnnnnnnnnnnnnnnnnnnnnnnnnnnnnnnnnnnnnnnnnactgttctctgaaaaatgatgtcccaaaagtattataataggaaaaaagcattaaatataataaactaatttaagaaatggggtcttgctatgttgcccaaggttggtctcnnnnnnnnnnnnnnnnnnnnnnnnnnnnnnnnnnnnnnnnnnnnnnnnnnnnnnnnntgtgagctactgcatctggagactttatcacttcttaaattagtttattatatttaatgcttttttcctattataatacttttgggacatcatttttcagagaacagtnnnnnnnnnnnnnnnnnnnnnnnnnnnnnnnnnnnnnnnnnnnnnnnnnnnnnnnnnnnnnnnnnnnnncacgcatatcttcactgagatggctttaatctgcaataaacccaggaggccctaacttggtgaagtccttttacatagtttgaagctggtaaacttttgggccttttttcaagaggtaaccctggtcatttagtgatccaataaaattttcaaaatcagcaacctgaatgtttagtt

SEQ ID NO: 47333 - DNA, 2460 bp, Homo sapiens
cgtcgactttttttttttttttttagttttttctcatcaaaacatgatttattaattttaagcaagagtaagcatatgtgatagtggccagcttggggatagaactcttcctggttgatgcacagttcagcacctgttgggtcttggctgttgggatgataattcttttgggtgaggggaacagccgtggtcaaggctgcctgcacccccatccaggcacaggaccctgggcaaagtctcaaaagaggtagtgtttttactttcgcaccaacaatacaacataagtattgggtacaaaagaggagatttccttcccctctacctcaacgggcaaaaggccttccatcttcagaagaggcttgtgaggaccatcggttgatgacctcctagtgaattctggctcccattcagagcacagagaaacccacaaaaggggcctgtggctctggttccaggtctcaagggtacagcttggttacatccccaggccccaggctgattctcctgccatcatactgcaagccttcctgtaccactttgacccaggttgaaggtctggcggaaaataacctcaaaggcaattaatacaaaaagcttcctgtaagctaagaggggttatcaactatatgtacttatttttccagagattgaagagagaagagaacgagccaaggcttggttttgttttatgttggtggcacatgtagacactttggcataacaaaccccatagagcctgcagcccaatccactctgttttggtttagaatgaagttttttttttaattatttttcttggaagtagggaggatttgaaagcttgaaaatcaagaatcaaaagacagtgaatctagaaggcatctgggagcagaacagagattgaagacgggtgggcacaggagaaagcgccaccatcgatcccggctgctgccctggaaatgtgattttcttaatagctgagttcatggttgcttgaggtcaggcctggctattcatttccagcgatgtctgaccagagaggactcatcattgacgacctcagggtcacgggggcgacgctgacaccggaacggcagcagcagcaggacgattaagacaaggaggatggctccacagacgctcatgagcgcataggacacaatccacaaaatgggctcgcttcaaagactgagcggggacacagttgctggctacatcctctgttgagaaaggcccggaaatttcagacactgcagcacctgcaatttctgcacaggggctcgctgcgaagcccaccctcttctgggctctgtcgaagatgacgtagaagccctccatcaccgtggcaccgatcaccagcgcatttgtggatggggaaatgccgaatcggtaacattcataattcaggccggcccccatcatgggctgaatgtaaagctgaggcaggattgtgatacggaatgacctgctggagttctcgtctctcaggtagatggagattttagggaagtaagaccaaggtgtttccgaattcgtccagcacgccagctgggacccagtccagaaaccatcagagaattctggaatcagagatgcgcgggccacagcttccaccaccgcatcaaacaccttctggggcaggcgcagccagcgtggtgccactgtcccacgatggccttgtctgcgttatactctctgcagtccagattaaggctttggcctccaatttccaatttcagaatttctatctggtagtaccactcttccttaataggggtataccagatgtctcctttatacaaacttggttcaattccacccaagacaagactacctccgttggtcccagatccagcaacgggcaagcccggctccacacatctgcatggagaaaacgttggggatgtttgcttgtgtcaccagggagtcgaagaaggtctccagagaacttgatggcttggcaagtgtggcataagctaggccaagtattccattccatttaatcccaggcaaaaagaaattctctgattcaaaaatagtggcaatgttgacaagaaaagaagtattgaagcctttggggatggtgacgaggtcttccccaacgaagcccgtccagcttccttgtgtgtacttcactgtgacgtcaaagcccttggagcggtatgtgctagacctctctgtgtcaaagtacgtgtctatgtaggagtgcggggttcctccacggcaaagttactgcttccagtgtcaacgagaatctgtagctggtgagttttggcatgtgtgccaaaccaagatgcagaaacttctattcacctcaaaaggttcctttatgcccctttcccttctggtccccagaagcaaccactttctggcttttgtgaccacggactggtttcatcagttcttgaacattctatacatgtaatgatgtaggcttctgtgtgtttgttttcttagcatagcttcttaagtgcaacttgt

SEQ ID NO: 47334 - DNA, 1404 bp, Homo sapiens
ccttaacgagagccgcgagggcagcggccgcggcgtcttcaagccgtgggagcgagcggaccgaccgctccaagtttgttgaaagtgatgcagatgaagagcttctgtttaatattccatttacgggcaatgtcaagctcaaaggcatcattataatgggagaggatgatgactcacacccctctgagatgagactgtacaagaatattccacagatgtcctttggatgatacagaaagggagccagatcagacctttagtctgaaccgggatcttacagggagaattaggagtatgctagaaaaagtttctcgtttttcaaatgtctagcatctctcaatggatatttcaaaaaacttcgggaggcagatacgggccaaagggtctttttatattgggcctgaggagggagagtgggactgaggcttcgccggacacgagggtgacccatctggcaatttacggaagcatctgccaacccagcagaccatagggtccatccaggttaccccacagacacactttatttcctaagggctggccaaggctcccatagaggcgctgtgtcagtgaagatgtacgactacctgttgggaaggacaaagggatgaggctccagagagagttggctgccacagcctctgccaagctttgtctttggggcttgctgcagaaacctggcctacggaagatacgacaccactgggagggttgtgtaggtgccaggggaccatcgtggttctctagggcgctgtggaaattgggtcttgggctgggtggcatctggcagtcatgggtaacacttgcttttccagttaatgtggccatgtgattccaagtgtcatgttgctttgtggcaagattgttgtgtgacttgtttttttgtttttgtttttgtttttttaaaggaaactatttgtgggctataggaaactttctgatgcctccggattgtgttagtagtagccatcaggagggtctccaactaaaacacttgttccctgcttgctcctttcccctctcattgttcagcattcttgtcaagttgcccagcttggagttgtctgtcacgcacatgtgtcctgtggttatagctagaaggacaggagtctcctgctgatgcgtgatagcttaagcttggggagaaggtcttttccactgcctagctaagcagtctggggagagcatggggatcatttctatgtgtgtgggtaatctggtcagtaagattgagacttagttaagattccccttggaaattccttaatgtttattagcttctaactagtgttgtaagtccgatgccagaatttggagatttgagttcttcttttcatggcttttattcactgtgactaataagcttcctaataaatccttgccagacttaaaaaaaaaaaaaaa

SEQ ID NO: 47335 - DNA, 661 bp, Homo sapiens
  misc_feature (1)...(661): n = a,t,c or g
gttgtgattccactcaaggacgtatctttgctgactcagaagttgaaagaacactgcaaagttgaatatcaaattaaaacattttctgggcagactcatgggttcgtgcatcggaagagagaagattgctcacctgcagacaagccctacattgacgaggccagaaggaatttaattgagtggctgaacaagtacatgtagcaagaatcaagggcaagccttcctagaatagctttcatcccaaaatttgcttggaaatagttagatcatttgatttaattttcacttttataaaataagtgtaggaatcctaaaattgattatttcatttgaaacacaaattcagtaggacgtaatgcatgaaataatttaatttttgacatgtacatcgaatcataatttaaaaacaaggtctgaccaggtgtagtgcctcatgcctgtaattccagcactttgggaggccaaagtgggtggatcacctgaggtcaggagtttgagaccagcctggccaacatggtgagaccccatctctacaaaaaatacaaaaattagcctggtgtggtggtgcacgcctgtagtcccagctacttgggaggctgaggcacaagaatcaatagaacccaggaggtggagactgnaatgaanccaaaattggccctat

SEQ ID NO: 47336 - DNA, 2447 bp, Homo sapiens
gattccgggtgcgccgcgggtgctgggggctcgagaaccgagcggagctggttgagccttcaaagtcctaaaacgcgcggccgtgggttcggggtttattgattgaattccgccggcgcgggagcctctgcagagagagagcgcgagagatggagatgggcagacggattcatttagagctgcggaacaggacgccctctgatgtgaaagaacttgtcctggacaacagtcggtcgaatgaaggcaaactcgaaggcctcacagatgaatttgaagaactggaattcttaagtacaatcaacgtaggcctcacctcaatcgcaaacttaccaaagttaaacaaacttaagaagcttgaactaagcgataacagagtctcagggggcctggaagtattggcagaaaagtgtccgaacctcacgcatctaaatttaagtggcaacaaaattaaagacctcagcacaatagagccactgaaaaagttagaaaacctcaagagcttagaccttttcaattgcgaggtaaccaacctgaacgactaccgagaaaatgtgttcaagctcctcccgcaactcacatatctcgacggctatgaccgggacgacaaggaggcccctgactcggatgctgagggctacgtggagggcctggatgatgaggaggaggatgaggatgaggaggagtatgatgaagatgctcaggtagtggaagacgaggaggacgaggatgaggaggaggaaggtgaagaggaggacgtgagtggagaggaggaggaggatgaagaaggttataacgatggagaggtagatgacgaggaagatgaagaagagcttggtgaagaagaaaggggtcagaagcgaaaacgagaacctgaagatgagggagaagatgatgactaagtggaataacctattttgaaaaattcctattgtgatttgactgtttttacccatatcccctctcccccccccctccaatcctgccccctgaaacttatttttttctgattgtaacgttgctgtgggaacgagaggggaagagtgtactgggggttgcggggggagggatggcgggtgggggtggaataaaatactatttttactgccactctttatttttttcccctactttttctttgtgtccggtttttgtccctgtaaatgcgatagctaagtacacactaagtgagcatttgttcctgactctcaaagaggatggtttggagttctcttacgtttcctggtatttcccaagtctcttgggttggttggaaggctgtggctggtctcagtttggttactcaatgccccaggaggggctgagcaccagcccatatcttttgctttggttcacatgatgatacctgcttttctcaggcctgctagaggcatccaacgccctggtttgtaaatagcaacctaaaggcgtattttggcactggtctggggacattccccatctctcatcccttttcccccttcacagatggtggtgggcttcgctctacaaagaggactctgatgttactcttgagcttatgagccagagagctgaaaaccgcaggcttgttgtgttaagttacaaggaaaatggatttggtaattaaaattagaagaaacacaccttcaaacttcaacttctttaaaagaaaaaaaaaactgtcctatcttgttctgtaaaatattagaacgctttgttttacaaaaaatgatgagagaattcttccacatgtacttctgtgcttagaacatttttacggacctaagcgctggagacgttgctgcatgtcggctgggttttttttttcatacacccgagcacggaaaaactaacgcaaaattgtattttcttacctagtggaaatctgaaatgactgcaaattcctagtgaatgtacaggtttgctttcgtgtccctcttctggttgctttagaagtgacgtgtaatttctgaacccatgtttcatctgtataaaagaacatctgcaccagtttttctcctgcccctcagaagagccaaactttgagttttatgtctgtttgtcattgataaatttcaataaatctttttatacaatttttttggggatggcttctttgagtccaacaggccattgatcttttcaagatgcattccagatgaactgctaggtgagggggaagcttcatttttgttacctgatagaatagcttttcttatgagatatatataatgtgatactatgtttggatatttttggtcttaaagcaagactcagtggtgtatcttcattaaaagcttcctttaaaaaagttacagagttactaaaaaaacaagtacccaaacaatcaagttgggccaaccttggaaccttgttttgaatatctttcattgttttgtttgtcgtattgtaaaaagaatgtatggttgaaaactcaggaatgtttataaaacaaattatttcacaaa

SEQ ID NO: 47337 - DNA, 1520 bp, Homo sapiens
aggactttttttttttttttttttttgaatgagaaaacatttattccgtctccaaacagcatcccaggccgggcatctcccccacgattttataatacactcggcacagacagagtctgggagccatggggcacccctgccctccccaggcttcctaagtaacaactgcagaatatttacataaagctgggtgttgtcaggcaaagcccttccctgctgccaggggtgggagcaaggaggaagtgccatgagcaccagccccgccctcacaccacgggaggcagcccagaggccaccggcacagggtggtggcccccagatcatacagcagtgggcacaggggaagcaaacctgagtgaggacacaagagcctggtccggctccgctgcacagggcaggtgtgatggcccccacgagtctttggcagagaacgcagataatagcggctcccacggcctgacccgggccggggggaagctgaggcacttgtcagtagcacatgggcacctgctggcttctagccactgcaggcggggctgaggtcattaaaagcgaggaaaaacactagctaaaaaccctttcctaaaagtgccctggaggagtgagcggctgactgaagccctctgggcacaggcacttggggtgtggctctgccagcccccgcccaggctatgaggctccttagctgtgtgtcagctgcacaggatggaacaggtgaaagagaggggctggcagttccaggaggctcatgggaaagtcccagggcagaggggagggcccctctctgtcccccttcccacggctaaccgccgctcagtacacagggggcggctggtagccctcggtggtctccgcgttctgggtgaagggtggctgttggtagttgtccacagatgcacctgggtaggaggcgtaggcagtgttggggtccggagtggggtcaacgtaattctggatgaagtcgtccacgccagccttgtagcgctggtaggccagggaggccagcacaccccaggagaagatggaaaagaagctgaaggtgatggctgccctcacagagtcggcccccaccagcacgtccttcgggttggtgactgcccactggttggtgaggaagcagaaaccaacaaaccacaggaaggtccagagagctgagaagagcaggtcaccaatgacccaggtacttgcggtcagtggcgttgctgatctgggggaaatacgcgtcgaccaccaagaagcaaggccgaggccaggaaggccagcaccccgcatggcactgccatagcggcaggcatcctcgttgcggttgaacacgcagtacatctgcttagactcgtgggcattgctgtagccctcaccatagatgcaggagaacacgatcaaggcgaagaccaagcacacggcgcgcgccaccacctgcggctgcgtcaggaagcgccgcaggttgaaggagccgcccgccttggccgcgccgtaggccccgctctccatgtcgccgtcgccgccctgccgccgccgcc

SEQ ID NO: 47338 - DNA, 1089 bp, Homo sapiens
gcgaccgctcgcccggaccctgaggctgctgggcccaccctcccggaaccgtccgaccctcggtggcctcggctcgttctgccatctccggtcctaccctggggcggagggtggaaggcagcttccgtcgaagaggagggggctgcggtggccaccgcgggcggagcccgagttattttaccaagaaaatggtttgcacgactttgaacatatactatccatgctgatgggacaggatccaatatgaatataaatgatggaggaagacgacgctttgaagataatgaacatacattacggatatatcctggggctatttcagaagggacaatctactgtccgattcctgccagaaaaaactccacagctgctgaggtgattgagtctcttataaacaaacttcatcttgacaaaacaaaatgttatgttctagcagaggtaaaggaatttggtggagaagaatggattctcaatccaacagattgtccagttcagcgaatgatgctgtggccccgaatggctctggaaaatcgcttaagtggagaggactaccgcttccttctgagagagaaaaaccttgatggatcaatccattatggtagcctgcagtcatggctacgggtaacagaagaacgtcgcaggatgatggaacggggttttcttccacagcctcaacagaaagactttgatgatttatgtagtttacctgatttgaatgagaaaactctcttagaaaacctacgaaatcgctttaagcatgaaaaaatttatacctatgttggcagtattctaatagttattaacccattcaagtttcttcctatttataaccccaaatatgtcaaaatgtatgataaccaccaactgggaaaacttgagccccacatttatgctgtggctgatgtagcttatcatgccatgcttcagcgcaaaaagaatcagtgcatcgtgatttcaggagagagtggttctgggaagactcaaagcacaaactttcttattcaccaccttactgctctcagtcagaaaggatttgccagtggagtagaacagattattcttggagctggaccagtacttgaggccgtc

SEQ ID NO: 47339 - DNA, 4164 bp, Homo sapiens
  misc_feature (1)...(4164): n = a,t,c or g
ttttttttttttttggagttccaggtttttaattttccctgaattttttttttaaacaacaaaattggcaagaagaaaattcttcgacatttgggggctggtcgacatttgggggcaagggttccactgaaaaatcccccaaattcacgctgaggtttcaggtcatggttgctgaggtggaagatgaggtcagggctcttggagattttccaacccaccctagaacttgtttctaaatggctggggaagaggtcagtataggtccccccgttactgcagatgaaggcagaagtcattctctcccccacccctcaacttcttcagagatgtggagataggaggcttcgatctctaattgcctacgatctcttaaaaatataaaacacgtgcagttgactttggtacaaaaaagaaaacaaaagaacaacaaaacattctggtccctgtgggttttttccctcacccccaacaaaccattatggccaccccaacctttattccatcaactccaggaagccaggttatctcccagggcttccatgaaggacggagaaagggagaacagcagtaagaggttgaggggagaggagaaagggacatggccctgcccacagccctcctttatttaaagggcagtagggtgctgtggctgcagcctctcctccaagacggatgttgcaggggagggccgttagggcaagaacccagcagctgcgtggatgagcctgaatataccccagtagtgttcaaggacaaggccctctgatccctatggcttggttcccatgtccctggtcctttaaatctcccctctccccccataactaataaacaataaataaataaattttcctaaagttgcgggaagaaggcatgaaccactggcatctgtggtgtagctttcggatgtcccagggggtgttgtggcctaattcccctagcttcttaaatggccccaggtatccaaggatcccaagagctggcaaggacaatttgcagttctttcaaatgttccctcattattggcaaattggagtccccaaggttagccccctcagtaatgttcttcagtggggcacggggcaggggggaggggcccccttagctctcgagctacagccctccccgtcgcggctctccgtctcctccgggatgtcctgaaattctggtaaagtctcgtggactgtggggcggaaacanacggctgctaccttcctcctcgctgccagtgtcagggtcactgctgtcttgcagccgctcttcggggctccccagttcctgcctctctcggtcctcaaagtttcgatggacagagcgagtagtgacaggtagatccaggcggtcagtgcctcggctgggctgtggggggttgaaactcaagtacagggcatcgcctgcggggagctgcgccgccgaggatccacaggtctgcgggcccagggggcctcagctgggagttgctcggtctggcccagggcggccagctgccttcgagcctcttcggcctcacgctccagcagtgcccgggcctgctcactcctnccggagccgggcctccaggctgccagcttcggttgcccgttcttcacctagccgccggcagcgccgtagctcctcctgcagcagcgcatgttgccgctgcagtaatgccagttccgtggcctgcttttcaggggccacaggggcagccccagccctgccagcctccccatcccgagagttggctcggcacagcttctcccgccgctcagggccctcagggaaccgggcttccatcagagtgtcctgctgggccacagctgcctgtaggccatgtagaagtccatagagattgaccaatcgctgtaacgcctcctcttgcggtgatctcagctgatttccatttcgatccctctggctagagtctgagtcagctctgcagagttcaatggagccattgaaggttctggcctcaccattggcagtgaccccaggactcgtgttaccaccgctgtctggttccaagggcagggctggctctcggggtgtcaagagcagttccactcctggccccaccagcaggtctttcagaccctccacctcacggatggcatcctgcagcagccgctcgccacgaggggactcaagggactcagagcggaaaaggcccctgggcatggtgggcagggccagcccactgccaccagcctcttcggcctggaaatgggtcatcttagcgaacagccgacttctctcgcagcagctccacagtgcccggtccttctgctgcaactccatcttaattcgccgcaggtaagcctcatcctctgtctcaatcagggggaagtcctccctggatgggcatgtgcgcacgctctgctgaatgacccggatccaggtgctccggtcatcccgggatgctgtgtgcacctcgtacatctcaggtggggctgcgctgatcagaaacatccctttctcctggttggcaatgtctcgtacgattagattctgcagcgataccactgaaggcttgtccagggtaggaaagatgtacttctggtccttttcctggagaaacaccagtacatctgtcatcagcagcactagcacatctttgaagcgccccgtcgctgtcttccagagcaggcagccatcgtggatgagtttgcgcctcagaagttcctctcggccaaaggggcccttgccaggcactggggtttgggcccgagggtccatgcggttgtagatctcctgcagacgggcccctttctccagctgataaataccctcgtccacattggacagcagctccttcactagccccagtgctgtggtcaggtcctggcgctcctcctcgatcccgtgggaatgctgcaggatgcggctgatgagtaacgggtacttggtgatgcgctgagtcaccagcaggatgcactcctgtaccccgtgccgcttgagcacggcggggcgggtcactttccggatgaattgctggaagcgtttgtctcgggcgtacagctccttataaaactttaaggccttgctgtggcggctgcagaactccgagtaggtcttacacatctgctccgcactaccacctgagaactggctgatgagcagatcacccaagcgagggatgacaaaattcccggtgctgccaagggcacagggcctggcgtcggcgttctggtaactggctgaggaagcgtgtatggatgtcactgaagctcgtccacgcaggggaaacaggccctggaccactcctggctccaagtgtagctcttccagcatccccgtgcggaagaggcgggtcatgatcttcagtgtcctcacatggtgcagctctgtctggattaactcatacatgacatcttgctgcttcatcacctcctttttatgctgctgcaggaagctgctgtccacagcaagactccaagagtcagctgcaaagtccttctcatccatctcaaagtcactcatcagctcactgtagattacctctgcttcgtcaatgagggattccacggatagggttcggttccgcatgttgagggagtctgtggactgtgagaagatccggcgcatccccaagggagactcatcattgaaatgtccagcaatgttggtggtagaaacactcttggctaaaaacaaagaagaaacgccacggcgggagcccacgaaggacggccggaatctgtcggaagggtagatggccgagctgggccgctcccggatggttgtcttacttcgaacaaaaactgactgcaaggcggtgttgttcttcacaggggcgctttccggttcttctgcttgaacttggtacagttggcgaagggtgttctttacagcggttgggatagtcacattgcaggttgggcagaggagagcttccttggaagtgatgctcttggtacaggcatagcacatggtcatgcctgaaactgaaatggtggtgaagaggtgcccattggtatagcgggcatccttggcttccttcatcttctccttttcccgggtcttgctcgccagctctctgctccggtcgatccgcgcccgcgtgagggattcgatccgagacataatcggacggggggaccagggaggacgcggcgcggaccccggcgtcctgtattgttgggggaaggcggggggaggggttcggcccgcacgcgttggtctcgg

SEQ ID NO: 47340 - DNA, 657 bp, Homo sapiens
aaagctatgacatgattacgaatttaatacgactcactatagggaatttggccctcgaggccaagaattcggcacgagcggcacgagggggtcacggtgtttgccgtggggaagtacactcatttcatccagtccttcctggagtcagccgaggagttcttcatgcgtgggtaccgggtgcactactacatcttcactgacaaccctgcagccgttcccggggtcccgctgggtccccaccggcttctcagctccatccccatccagggtcactcccactgggaggagacatccatgcgccggatggagaccatcagccagcacattgctaagagggctcaccgggaggtggactacctcttctgccttgatgtggacatggtgtttcggaacccgtggggccctgagaccttgggagacctggtggctgcattcacccaagctactacgccgttccccgccagcagttcccctatgagcgcaggcgtgtttccactgcctttgtggcagacagcgaaggggacttctattatggtgggcagtcttcggggggcaggtggccagggtatatgagtttactaggggctgccacatggccatcctggcggacaaggccaatggcatcatggctgcctggcgggaggaaagccacctgaa

SEQ ID NO: 47341 - DNA, 2416 bp, Homo sapiens
agataatgcatttttttagggctgcacatttgattatcattgtgtttcaataggtttaaatggtgttgtgtatcccttgagagcagtaccacccttgagagcagtaccagtttaatttgtcattgatgaaatgaaactttttttctttttgtctcctctattaggtttcagcgttaaaaacaatggccagtcagggaggccccaagtatactctctcacagcagccttgggcacaaccagcaaaggtcaatgaccttgcggcaactgcatataagacaataaaaacaaagctgcctgtgacattgagaagtatgtccttgtacctatccaataaagataccgagttcatcttgtttaaacctgtgaggaataatattcagcaagtcttccagaagttccacgctctgttaaaggaagagttcagccctgaagacatccagatcattgcctgtccatctatggaacagctgagccttctgctgtcagtttctaaataagcaggccagccgggctgtgcacctaaatgtctgtctgggaggagcaggctgagaagtcttgcagtctgcaggacaccgaggaatcgtatgtgggaacgtccccgagaaccacacgagcgtgctgctcagtgctgactgcagaatgaaatagaagcaaagtgttacaggatcagtgttttcttttctaaaacatcaaaatgccaaagattaatctgtgattggtgataactgcctcgtttaaatggtcacaagaaatgtgaagagagagctagggcagacatgcagtgaaatggttctttgttaaaaatgtgcaataaaaatagattacaataagtagtgcaaagaactttacagaaatcaagcgaattagaaggcctgtaagagtaaggtttgctaaaacgtgaaacactgtaacacttttaaccactgagcattccacagtgaaatgttatttctatgctcttatttaatgtaatgtttctcctgtcatttttgaagttgagtttggagtagattggttgcttctgagaacacattctgccttcctgggaagtcggggtgtcatcctttcctctgtttgatgtgaggtagtttaaagatacaaggactttgtgtgaagctccagcatctgtgccccttgaattgcttaggtgcagacagttctaaagcaaggagctgcagcatttcttcatccataggatacgtgcagtatctttaaatgagtatcttcatggtatgatagtgtgtgtttgtgagtgcgaagtacccaattaaaggtgtccttaaatttggccgcatagaggagagaaggaaccctgaggagtagtgttcctcctgaatgaaggttcaggtcaccagccttctgtacactgcctttggttttagcagttctttgaaaagcaaacactttcatgtcctgtctattcattcagctggctgtgctgtgctgtggaaccagctgtgtggatctctagcccagctacagcagaatacattttaccagcaaacctaaggatgacaaacactatccacatctgaaaactaccacaccatatcagggatcataaattatgcatatctatgaatttttccaaacaaattccctacttcctggattggaattgggttttgccgctgatgttaaggcagccagcttcttagttcaaaaagaattctgagtttttcaaacactagtctagaggtggacattgtcaggggttctggaatgggaccaggggaccttttggtgcagtgggtgcctgtaactcattagacgtactgaggcagcacttctgcagggtgcatacccgtgattgttgtcatttgtaacaggtcacttccttttcactcagtttaaattggtgatggacgttgcttgattgagcttattactctctattttgagaaggtagaaggtaagagggcccatattcattctttgccatgaaatgaatgaattaggaagattgtatttacttaactgttttttaaatacatgtttaatgaaataaactgtaaaatatcccagttttgtgtattatatgtacatttgatttttaatagcctttccaaagaaatgagggcatgattattgtacagtaagtacgtgactgatttaatttgatttacagagcggagtgtgttcttataaaaatatttaatgacattggttcttgtcttttgatcttttatttctgaaacactcaaacaccttacaaagtgctgagtaggtaatagtgacccaacttgtttgctaaatgattatttgtttaaatctgtacagttttaagtgttcacttatacaaagagtgtatatactttcaaataatttaaaatgctttatattatttggctagaaattgctgtttttaataaatgtgaattttttaaaaataaagatttttgcttcctaccttgtc

SEQ ID NO: 47342 - DNA, 400 bp, Homo sapiens
gagctggacaaagtctagggggcccgcctggtagagggtcccgggaagctggatctgtcagcctcggccctgaggcccctgttaactcaagactgtgagctgcctctaggtggtcacgtctgggagctagcttgtatggcttctgaccagtatcaggatttctgttctgagagcagcgtgggcagcaaggcagggcagcccagaggtggcagcggcaggcaatctggtcactaggtctttgtgatgccaaaaataaaagagggtggggtgggtgctttctgttcctctgattggatggagtccgccagcaggcatggggctacattccagtgcctgactatagggaggcactcctgattccatggagcagcccggactttgagaatgggctctggtttgc

SEQ ID NO: 47343 - DNA, 673 bp, Homo sapiens
tttttttttttaatttttaataacaatttatttccctttaaaaagatcaaatgtttttctcataatatattattttacaacaacaaagaaaaagaaagagagaaggaaagaaagacctgaagagaaagaaataaccagattttagctcaaagagtatagcctgggattaattttttaagatttgtttgtcaatttcaaaaactcagcagtggaataaagagcttaatacaggtatgcaaaaaggaagccctcgagatgttttcaccaggatgaaatgggattagctttgtagttcctataatcttcttcacagaagaatgcaatttcagtttcactggcgattccagctgctttcagagtgctgtcttctttcagcaggagtctttcgtcatcttccaaactcaacacaagttcatttgtctttgatttatgtgcttgatgaataatctttagtgcatcatatttataatttctgaatggtggtggcaggttggtccttaaagggacatcttgctttagaaatacgataaattcctttacagtttggtccaaattcactccgtgatacactacaggtttgaaattggcgatgttccaaggaacggatgagggcgaactgtgatggtcacttctccaggagccatgtgaagaaattcctgttcccggcgtcccc

SEQ ID NO: 47344 - DNA, 1172 bp, Homo sapiens
gtgacttcaacatgatagaattttatttttctctcccacgctagtctggctgttacgatggtttatgatgttggggctcaggatccttctatcttccttttctctatccctaaaatgatgcctttgattgtgaggctcaccatggccccgctttgtccacatgccctccagccagaagaaggaagagtggaggtagaagcacacccatgcccatgggtgggacgcaactcagaagctgcacaggacttttccactcacttcccattggctggagtattgtcacatgggctactgcaagctacaagggagactgggaaatgtagtttttattttgagtccagaggacatttggaattggacttccaaaggactcccaactgtgagctcatcccctgagacttttgacattgttgggaatgccaccagcaggccatgttttgtctcagtgcccatctactgagggccagggtgtgcccctggccattctggttgtgggcttcctggaagaggtgatcactctcacactaagactgaggaaataaaaaaggtttggtgtttcctagggagagagcatgccaggcagtggagttgcctaagcagacatccttgtgccagatttggcccctgaaagaagagatgccctcattcccaccaccaccccccctacccccagggactgggtactaccttactggcccttacaagagtggagggcagacacagatgttgtcagcatccttattcctgctccagatgcatctctgttcatgactgtgtgagctcctgtccttttcctggagaccctgtgtcgggctgttaaagagaatgagttaccaagaaggaatgacgtgcccctgcgaatcagggaccaacaggagagagctcttgagtgggctagtgactccccctgcagcctggtggagatggtgtgaggagcgaagagccctctgctctaggatttgggttgaaaaacagagagagaagtggggagttgccacaggagctaacacgctgggaggcagttgggggccgggtgaactttgtgtagccgaggccgcaccctccctcattccaggctcattcattttcatgctccattgccagactcttgctgggagcccgtccagaatgtcctcccaataaaactccatcctatgaaaaaaaaaaaacaa

SEQ ID NO: 47345 - DNA, 552 bp, Homo sapiens
  misc_feature (1)...(552): n = a,t,c or g
aatttgaanccnttgactgattacgaatttaatacgactcactatagggaatttggccctcgaggccaagaattcggcacgaggttgagagtgctttccggggaggcgaccgccgcggtggaaagtgcaggagtgggcgaggaggaggaggaagaggaggccatgattgattccggagcgcagttaatcaaggcataatggcatgattttcagttttgctcataaagtttgccagtaccaccatccatttcaaaaatcgtatccaagcacgaaggacttgacacagcaagcaaaagacatacagaacataacagtccaggaaaccaacaaaaataactctgaaagcattgaatgcagcagaataacaatggatctcaagttcaacaattccaggaaatatatttctatcactgtgccatccaaaacccaaacaatgtcaccacacatcaagtcagttgcgacgttgtggtcttgcatgaatctcatcaaggttacaaacttactcagttttcatatgngttgctggagtttttgattttacctaattaatgg

SEQ ID NO: 47346 - DNA, 985 bp, Homo sapiens; identical to SEQ ID NO: 2674

SEQ ID NO: 47347 - DNA, 349 bp, Homo sapiens; identical to SEQ ID NO: 2676
  misc_feature (1)...(349): n = a,t,c or g

SEQ ID NO: 47348 - DNA, 391 bp, Homo sapiens; identical to SEQ ID NO: 20074

SEQ ID NO: 47349 - DNA, 422 bp, Homo sapiens; identical to SEQ ID NO: 20075

SEQ ID NO: 47350 - DNA, 1536 bp, Homo sapiens
tttttttttttttttttttgctaggcgattacaacagctgatttttatttttcttcttgattctcttctacagtttccaaattctctacaatgaacatgtacttctttttaatatcaaaagacaaaagaattggtacgtaaaaagaacatccttcccatcttcaaggtcaagattgaacgctgactcctgcaggaagtcttccaggattcccaggcaggaatgatggctccctgtccctgtagctccaggagttcttgcttcacgcacgcctcacataccagactgaatgttggcaggaggagtgaccaggtcggtcatctgtgtccctaccacctacaacaggccagcaatctacccgtgtgtgtttgttggacagaattaaccatgatgggcggccgagggcgcctggagctatttgggggcttggagagaacctcttaggagagtgtcaggctctaggccagtgtcaccagaggaggtcagtctcagtccttggagtggtgggatggaaaccagacgggactggcatggtccacagttcttgccacaagagggcttcaggagaggctgagggcccctctgaggcgtgtgcttggtcagggtgagcaagggcaatgcagctcatacaaaggcccagatggacagagggacctagcccagcccacgcatcggtaccgagcctggctcaggggcaggccgaggcttgtgcagtagacaaacatttacagcagacaccaggcagctcctggaaaccactccccaaaaaacagcattggaatcggggacccccagctgtgaacgaaggagcaaggaggccctgggagaggaggagaaccccagggaagatggagggaggactggggggctgagggagggagggggcctgggctcagaggtaggcgagctgctgctgtgctcctggcaaagggcctctcctccgccagggctctggccctgaaggtctgccctgggccccattcgccctgggtgccacctgaggttaaaatgacagaggatgcagagtgccctcagggtgaccacgagagacagagcaactggagccacatttctgtcccaggcaggggcacaggattaaggatgtgccagaccctcaagatccaaggcctggcccccagcaatgagggctgggcccaggggttgtaaggagagaccaggcctccagctgggttgggacagatgtggggacagtaccctaggcagcatggcggcgcacttctgagtcccgtgggagctgagtgagagccgagtagtccccaaggccaattcaaaagcccagcccgggagtccgtccaccatggcaacggcccatctctccatggtcgttgggctttccaaagtctgcggctgactggcctggggctgggcctggctcgggggccacaggcagtgtgcgacgaggccgcatctctgcttcatcacatgggcaggtgggctggaggcctagatgcggctggacgaggtgctgcccgagctgatggggagcctggcgctgtctgagttgctcttcagagggg

SEQ ID NO: 47351 - DNA, 1154 bp, Homo sapiens
gacgggcgatggctgtggtccttctgctaatgcaaacaacaaaacgggcacactagtcacccccgagggaggccaccatcactgtaactgttggccaaagctacaaaagaagcgagggaatccaaccgagcgcaggccaactgagaacagcttcacctgccttctgcggcggcagaagtgaagtgcctgaggaccggaaggatggtgcagtcctgctccgcctacggctgcaagaaccgctacgacaaggacaagcccgtttctttccacaagtttcctcttactcgacccagtctttgtaaagaatgggaggcagctgtcagaagaaaaaactttaaacccaccaagtatagcagtatttgttcagagcactttactccagactgctttaagagagagtgcaacaacaagttactgaaagagaatgctgtgcccacaatatttctttgtactgagccacatgacaagaaagaagatcttctggagccacaggaacagcttcccccacctcctttaccgcctcctgtttcccaggttgatgctgctattggattactaatgccgcctcttcagacccctgttaatctctcagttttctgtgaccacaactatactgtggaggatacaatgcaccagcggaaaaggattcatcagctagaacagcaagttgaaaaactcagaaagaagctcaagaccgcacagcagcgatgcagaaggcaagaacggcagcttgaaaaattaaaggaggttgttcacttccagaaagagaaagacgacgtatcagaaagaggttatgtgattctaccaaatgactactttgaaatagttgaagtaccagcataaaaaaatgaaatgtgtattgatttctaatggggcaataccacatatcctcctctagcctgtaaaggagtttcatttaaaaaaataacatttgattacttatataaaaacagttcagaatatttttttaaaaaaaattctatatatactgtaaaattataaatttttttgtttgtaatttcaggttttttacattttaacaaaatattttaaaagttataaactaacctcagacctctaatgtaagttggtttcaagattggggattttggggttttttttttagtatttatagaaataatgtaaaaataaaa

SEQ ID NO: 47352 - DNA, 2020 bp, Homo sapiens
  misc_feature (1)...(2020): n = a,t,c or g
ttttttttttttttttgaaaaaagatcacagaataattttatttacaatgaatgttattctctccagacttcaactcatcagtttactcttataacagagaatcaatttaaataacaccatcaaaatggaatgaatataaaacaatctgctattacgtatccgatttctttgataggatataattatagccaattagtcttgcaacacatggtccatttccagtgaaattctcaataaactgctaggaattacagtccttcatattgacattttattgtaaagtctgctagacgtggctctcttgattgctttggaagtcagtcaaacaaatgctctgaagaaaaggctgacaccgcaaaacaacttcatatgaaatctgtccacaaatgggatagcaatgcctccagatcctttggtttttatcagtccctttggaaagttaattaattgatgattgttcccttaaaattctattttaaataggacaatcactgtctatacagtctgtgccagcgtccttgactttcttgcttccactgatttggttatcaaatcatacagtgatgggtagtcctaatttaaccatatttttgctgtaaacattaagaaatataccaaggacaactaacaaaccagaccatacatactgaaacgtgaatggtttagcaaagaatataaacgaaagtacaatggtcattgcttttcttcctgttgtcactgttacagcaataagtgcaccaaaaattttaatcaaagccagaacaaaggagattccaaaatatccagtgagggaaaaaaggaacgcataaccataggtccgaactggattctttgcacaaaatgttactgcagggcctaatccactagtgcatgtcaatcccagtaaaatgtatacaaaaccaattgaatacgaatacaataccatttcagaattagaagcattatgaagtttcatagctttctcttgaacatttccaatgacggcatctgcacatagtgccagggaaataagcaccacacccgtcaggttgaaatttggtgcagttgtgctgtcagcgagggtaaaccatatcaggccaaggctcatacatatggcagcagacacatctgcaacattataacgctttccttgaataaaaactcctcctagcataacaggaatcaatttgcagcacttgaagatgacttgggtagggtaattcaggtagcccaaggaagtgtttgataaccccatagtacccacagttagaaaagctattatcatgtaggtttttcctggtattctcctccttttgtcctgaataagctgaagttctattaggccaaatatggagtaaaaggcaaactgcactaaggtaaggtaccagccacaggacttaaaaccctccactgaaaatattaattcctgtaaatacccataaattaggtaaaatacaaaaactccagcaacacatatgaaaaactgagtaagtttgttaaacttgctgagattcatgccaagtaccacaacgtcgtcaactgacttgatgtgtggtgacattgtttgggttttggatggcacagtgatagaaatatatttcctggaattgttgaacttgagatccattgttattttgctgcattcaatgctttcagagttatttttgttggtttcctggactgttatgttctgtatgtcttttgcttgctgtgtcaagtccatgccattatgccttgattaactgcgctccggaatcaatcatggccccaaggccggtatgtcacccggaagggtgacggcagcctgcgtggcgtctgagctagacggagcatctcccccctcccctggtccgtcgccatcacctcctcttcctcctcctcctcgcccactcctgcactttccaccgcggcggtcgcctccccggaaagcactctcaactccggcgcccgcaggcctcgtgccgaattcttggcctcgagggccaaattccctatagtgagtcgtattaaattcgtaatcangtcataaaggtnttcaaa

SEQ ID NO: 47353 - DNA, 484 bp, Homo sapiens
  misc_feature (1)...(484): n = a,t,c or g
tttgaaacccntttgacatcattacgaatttaatacgactcactatagggaatttggccctcgaggccaagaattcggcacgagcggcacgaggtcctgtctcccaggacaaccaaaacaaaggttgttttgcatcttctgcacttttaatgaatggtattacatggtgtatgttctttgcaggttggtctctttcactcagcgttgccttcaggagagtcatccacgtggttggtttagagcacattgtgtcactataagccttcttatgaagacactagactatccatctcctatatggatggacttttgggttgtttccaattgtggtttacgaggagtagggttgctgtccacattttagtacctggtttttggtgaacacatttgcttctgtggggtgtaaaattaggagtggaattactgagtcatagggtatgcatgtgttcaacttttgtggatgtttccacatgattttccaaag

SEQ ID NO: 47354 - DNA, 741 bp, Homo sapiens
  misc_feature (1)...(741): n = a,t,c or g
ttatgacatgattacgaatttaatacgactcactatagggaatttggccctcgaggccaagaattcggcacgagctcgtgccgacagaatgtcttgctatcagcgacactcacagaaggtgtaacgcggctagctgatatcagtttgcatgatccagtcagtatttctgtcctggacaagagccatgaccagttgaacccaaaggacaaagcggtccaggaggtctgtcctccaccagctggcgacaagctggacagctttgcaataccagagagtctcaagcagcatgtgactgtggttcccagcaaactgaggcttgtctgcctagcggccttcatccttcagaaatgcaagtttgaggaagaccagaagatggttgtctttttctcaagttgcgagctggtggagttccactacagcctcttcctacagaccctgctgagcagctcaggggcgccggcatcagggcagttgccatctgcctccatgcgattaaaattcctacggctgcatggcggcatggagcaggaggaaagancagcagtgtttcaggaatttnnacattccagaagaggcgtccttctttgcacggatgttgcagctcggggcttagatctccctcaagtcacgtggattgttcagtacaacgntccatcttcaactgcagaatacatccaccggattggaagaaccgcccggnttggctgccatgggagcagcctgctcattttgggtccttcg

SEQ ID NO: 47355 - DNA, 2795 bp, Homo sapiens
gcgaatctggtttacaccggctcctgccctgccttcactcttctctccctgatttaagactcctctgctttggactgaagcactgcaggagtttgtgaccaagaacttcaagagtcaagacagaaggaagccaagggagcagtgcaatggatttctcagtaaaggtagacatagagaaggaggtgacctgccccatctgcctggagctcctgacagaacctctgagcctagattgtggccacagcttctgccaagcctgcatcactgcaaagatcaaggagtcagtgatcatctcaagaggggaaagcagctgtcctgtgtgtcagaccagattccagcctgggaacctccgacctaatcggcatctggccaacatagttgagagagtcaaagaggtcaagatgagcccacaggaggggcagaagagagatgtctgtgagcaccacggaaaaaaactccagatcttctgtaaggaggatggaaaagtcatttgctgggtttgtgaactgtctcaggaacaccaaggtcaccaaacattccgcataaacgaggtggtcaaggaatgtcaggaaaagctgcaggtagccctgcagaggctgataaaggagaatcaagaggctgagaagctggaagatgacatcagacaagagagaaccgcctggaagatcgagagacagaagattctgaaagggttcaatgaaatgagagtcatcttggacaatgaggagcagagagagctgcacaagctggaggaaggtgaggtgaatgtgctggataacctggcagcagctacagaccagctggtccagcagaggcaggatgccagcacgctcatctcagatctccagcggaggttgaggggatcgtcagtagagatgctgcaggatgtgattgacgtcatgaaaaggagtgaaagctggacattgaagaagccaaaatctgtttccaagaaactaaagagtgtattccgagtaccagatctgagtgggatgctgcaagttcttaaagagctgacagatgtccagtactactgggtggacgtgatgctgaatccaggcagtgccacttcgaatgttgctatttctgtggatcagagacaagtgaaaactgtacgcacctgcacatttaagaattcaaatccatgtgatttttctgcttttggtgtcttcggctgccaatatttctcttcggggaaatattactgggaagtagatgtgtctggaaagattgcctggatcctgggcgtacacagtaaaataagtagtctgaataaaaggaagagctctgggtttgcttttgatccaagtgtaaattattcaaaagtttactccagatatagacctcaatatggctactgggttataggattacagaatacatgtgaatataatgcttttgaggactcctcctcttctgatcccaaggttttgactctctttatggctgtgctccctgtcgtattggggttttcctagactatgaggcaggcattgtctcatttttcaatgtcacaaaccacggacgactcatctacaagttctctggatgtcgcttttctcgacctgcttatccgtatttcaatccttggaactgcctagtccccatgactgtgtgcccaccgagctcctgagtgttctcattcctttacccacttctgcatagtagcccttctgtgagactcagattctgcacctgagttcatctctactgagaccatctcttcctttctttccccttcttttacttagaatgtctttgtattcatttgctagggcttccatagcaaagcatcatagattgctgatttaaactgtaattgtattgccgtactgtgggctgaaatcccaaatctagattccagcagagttggttctttctgaggtctgcaaggaagggctctgttccatgcctctctccttggcttgtagaaggcatcttgtccctatgactcttcacattgtctttatgtacatctctgtgcccaagttttccctttttattaagacaccagtcatactggctcagggcccaccgctaatgccttaatgaaatcattttaacattatattctctacaaagaccttatttccaaataagataatatttggaggtattgggaataaaaactccaacatataaatttgaggaaggcacgatttcactcataacaatcttaccctttcttgcaagagatgcttgtacattattttcctaataccttggtttcactaagtagtaaacattattattttttttatatttgcaaaggaaacatatctaatccttcctatagaaagaacagtattgctgtaattccttttcttttcttcctcatttcctctgccccttaaaagattgaagaaagagaaacttgtcaactcatatccacgttatctagcaaagtacataagaatctatcactaagtaatgtatccttcagaatgtgttggtttaccagtgacaccccatattcatcacaaaattaaagcaagaagtccatagtaatttatttgctaatagtggatttttaatgctcagagtttctgaggtcaaattttatcttttcacttacaagctctatgatcttaaataatttacttaatgtattttggtgtattttcctcaaattaatattggtgttcaagactatatctaattcctctgatcactttgagaaacaaacttttattaaatgtaaggcacttttctatgaattttaaatataaaaataaatattgttctgattattactgaaaagatgtcagccatttcaatgtcttgggaaacaatttttt

SEQ ID NO: 47356 - DNA, 776 bp, Homo sapiens
ctaaaaatacaaaaattagctggatgcgatagcacgtgcctgtagccccagctactcggaaggctgaggctggagagttgctcaaacccggcaggcggagattgcagtgagccaagatcgcaccactgcactccagcctgggtgacagagcgaccctctgtctcaaaaaataataataataataaataaaacaacaacaaatgcatcagagagccaaaacattcagtattgcattttcacataggtgatgaaatgactttggaactttatctgtgttatagttatgagttgctttgggagacttggagctctctgtagctattgttcataacactttgctccataaccctgatgtccgcagtatctaagtatctcagccttcatccattaactctactagggagcccacagccaccatttccactaggaggtatcaatatttgtggtatgacataaggctcccttgaaataacaagacttttgagcaatctgaattaaaaatacatcaaaaaagtaatagcgctcatttgctaaatgcaaaaaataatcacctttgataccaatgtgcaccaatatgcctaactagctagccagctggagataatttaccagggaatgtttcaaagccctaaccttgaagtttggaaacaggtggtcttctatgctgcagagaaactatgcattaggtctcttttcaattagaaacctttactatttccaatgtatgtttgttaaaaataataataataaaaccaaaagcctttgtggaaacccaa

SEQ ID NO: 47357 - DNA, 324 bp, Homo sapiens
gaactggaagttgctctgggtgagtttaagtgagtggtggtgagtaaatgtgaaggcctgggacattcctgtgcactaccgtagactttaaaaacactgtacacttaggctacactaaatttattttttaaacttttgctttcttccataataaattaaatttcaaggttgggcgtggtgactcatacctgtaatcctagcactttgggaggtcgaggcaggaggactgcttgaggccaagagcttgagaccacctggccaacattgcgaaactccttcactacaccaatttaaaaattagctgtgtggtggtgcgcacctgta

SEQ ID NO: 47358 - DNA, 1853 bp, Homo sapiens
gatgtgagacagtattcagaataatgaagataataatgatgattattataataatgatgatgattccaaggaaaaaacctacagcgaatgttccatttctaccccgcacgcagacactctccctaacactgataacctgagcccccagcactggacggaagaatgctggcgtctccgtgtgtactggttcagggttctggccccagccttgtcaggaccccctggtgtccagagcccccacccctcccgcaacaagcagctgatgccccagtgattctctatacatttttcacctcggccaatatgtccaggaaaactgcttacttctcttttcttgcctggagccttcattgttcacccttacgttgcaatataggaattaatgctacaaaataaaagtaaagcttacctgaaaagtgcatagtttggggcaatggtatctacatctcccactgtgggaaaaccagcaaagcatcaaaactctcaattctcctgttaccgaatgcagatctgaattataagatgtttatgtttgaccattgtttcaacaatgggattttgttacgaattatccctttaactgaaaccctcagttttactgtttacattattaggaaaacagggatatcttttgaatctaaaaatttgatgtacagcatgtgatttttgaagtttacatgtaaagtcacagtataggtgaaataacgtttgtcatattttgagacgtatcctgcagccatgtttttacgtgagtgttttagtcaaagtacatggtagacagtctttcacaataaaaggaaaaggattttttttcctccaaatgtacatttatcaacctaatgattgatttttttaaaaagagatttcgccccagtctgggtttatgaaagttcattgccctaaactgtgctgattgtttttaatcaagttataaatttccaacctagatcatgtatctaccaactctcctgcattttccaaaaggcattgagcttaaatattagtcttgcttagagtaggttatccacttacatggctgcgctaaagccatgcctttgaaactccttgtttaaaacatgatatgatttttgtgggcagtttcagaaaagaaaacaaacaaacaaaaatcgaccctttaattattacttgcaactcaacagatctccctgccgtactgccttttccaggaactttacttcagggctgtccagattgcagttgtgccccgtgtatgtggatctagttcacagagtctttggaagccagcagtcgtgccctccgtatactgtccactcattttatgtagatttggtatcctcagcagccagtgttaacaccactgtcacgtagtgtacagattcatcttttatgtatttaaagtaatccatactatgatttggtttttccctgcaccattaattctggcatcagatcagtttttgtgttgtgaagttctactgtggtttgacccaagaccacaaccatgagaccctgaagtaaagataaggtacacatacattatttgagtaactgtttccttgggggccaatctgtgtatgcttttagaagtttacagaatgcttttatttttgtctataacaaacagtctgtcatttatttctgttgataaaccatttggacagagtgaggacgtttgccctgttatctcctagtgctaacaatacactccagtcatgagccgggctttacaaataaagcacttttgatgactcacaagatgaatccttttttcctctgtcccaattgtgtgtctctgttccaaacacattttaaatactcggtcctgacagtgtctttagctaatccttgaagaaataaaagtggaattgaaa

SEQ ID NO: 47359 - DNA, 700 bp, Homo sapiens; identical to SEQ ID NO: 2694

SEQ ID NO: 47360 - DNA, 604 bp, Homo sapiens; identical to SEQ ID NO: 2696

SEQ ID NO: 47361 - DNA, 1603 bp, Homo sapiens
ggccactttctgctaccctagggaggccaggaggagcttcggaggaccatcgccccactggtctagccatcatgacacctctggaggtgtcaagctcctgaaacaagctcatttcagtttctggcaaccccgtgtatttccgttttccccctaaagaacatatcataatcattgcacaaataaccatgttctttggtaatgaagccagaaaagaaagcgcaaaagaatggtgactcatttggactcttatctgtcttggaatgtcactgcttcattgccttctctgattgccttttgcatgtaaaactatgtgtctggagtcttttgccatctggatcttagtacctctttattatgtgcaatttattcctcaggtgtggaaatttctactgcaattgactacgtttgattattttgagcttgtgaaagatttctgaacagtgattgtcccgttaatagcccctcagaagatgttccctggctgataacagcatcctattttacttacttttatagcattactgtgcctagtcgtggggaaagagatggggctgtatagattatctgaatcatttgtctaagaggtacattcttccagatggaatcaataacttttttttttccaggttcccgtgcttgctatcacagtatcattgttaagtgacacttttgtctctcataacaccatcacactcttccttccaagtctgagctgtgctggggtttgaactaaaagccatatgtggaatattgacatgtgtaagaagcactttcagaatgttgtcctttttaagaaatgattctcaaaataccagtttttattccaaaaatttagagaacaaacccggaatatgaagtgcagattgtaacatggagctatttttttttcttaatcccataatacagctcctaaaagttgtgtgggatttgcgttgcataaatagccatgtgaattccacaagaagcaccagggaaagtttagagatttgcggcaatggaccgaagaacgggccaggaagtcctccaatttcctttggtctttccaggagattggactacacattgtaaagactgactgggtttcaactagtcaaaaagcactttcttctgttttcaatccctgttcgatttgtgcttctgtgcttgtaggagagatggccagggtggcagccctcatgcaggttgaagtatatgtagcctcagcctgatattcttggtgcgaaggtaaaaaaaaaaaaataaataaaaccattggcctggttgagggcgtgaccaccaagacatatatgttgtgcccgtgttcatcctgtgtatttatactgtatatgtagagtctagatttatatactgcaatgtaaaatatatatatatttaccttttttaaagacaatggaaattccaagtagctaaaacttagcttcatttatttaatgccactttaaatgtcttaaatttgtttcctggtggacagccgggtaatgcttttagctgctcgcatgcttgtctttctgcatctccatcatctgtttaccttttggttaaactaataaactagtttgggacttggctggcatgtgctgccagacccaaagggaaaaaaaaa

SEQ ID NO: 47362 - DNA, 1929 bp, Homo sapiens
  misc_feature (1)...(1929): n = a,t,c or g
gggatttttaaatgtaaatctatttttgtaactttgttgcgggatatagttctctttatgtagcactgaactttgtacaatatatttttagaaactcatttttctactaaaacaaacacagtttactttagagagactgcaatagaatcaaaatttgaaactgaaatctttgtttaaaagggttaagttgaggcaagaggaaagccctttctctctcttataaaaaggcacaacctcattggggagctaagctaggtcattgtcatggtgaagaagagaagcatcgtttttatatttaggaaattttaaaagatgatggaaagcacatttagcttggtctgaggcaggttctgttggggcagtgttaatggaaagggctcactgttgttactactagaaaaatccagttgcatgccatactctcatcatctgccagtgtaaccctgtacatgtaagaaaagcaataacatagcactttgttggtttatatatataatgtgacttcaatgcaaattttatttttatatttacaattgatatgcatttaccaatataaactagacatgtctggagagcctaataatgttcagcacactttggttagttcaccaacagtcttaccaagcctgggcccagccaccctagagaagttattcagccctggcgccagtgacatcacctgaggagcttttaaaagcttgaagcccagctnnnnnnnnnnnnnnnnnnnnnnnnnnnnnnnnnnnnnnnnnnnnnnnnnnnnnnnnnnnnnnnnnnnnnnnnnnnnnnnnnnnnnnnnnnnnnnnnnnnngaactactggcctagggattagccacaaggacatggacttggaggcaaattctgcaggtgtatgtgattctcaggcctagagagctaagacacaaagacctccacatctgtcgctgagagtcaagaacctgaacagagtttccatgaaggttctccaagcactagaagggagagtgtctaaacaatggttgaaaagcaaaggaaatataaaacagacacctctttccatttcctaaggtttctctctttattaagggtggactagtaattaaaatattaatattcttgctgcttatgccagctgacattgttgccctccctaaagcaaccaagtagcctttatttcccacagtgaaagaaaacgctggcctatcagttacattacaaaaggcagatttcaagaggattgagtaagtagttggatggctttcataaaaacaagaattcaagaagaggattcatgctttaagaaacatttgttatacattcctcacaaattatacctgggataaaaactatgtagcaggcagtgtgttttccttccatgtctctctgcactacctgcagtgtgtcctctgaggctgcaagtctgtcctatctgaattcccagcagaagcactaagaagctccaacctatcacctagcagataaaactatggggaaaacttaaatctgtgcatacatttctggatgcatttacttatctttaaaaaaaaaggaatcctatgacctgatttggccacaaaaataatcttgctgtaccaatacaatctcttggaaattaagagatcctatggatttgatgactggtattagaggtgacaatgtaaccgattaacaacagacagcaataacttcgttttagaaacattcaagcaatagctttatagcttcaacatatggtacgttttaaccttgaaagttttgcaatgatgaaagcagtatttgtacaaatgaaaagcagaattctcttttatatggtttatactgttgatcagaaatgttgattgtgcattgagtattaaaaaattagatgtatattattcattgttctttactcatgagtaccttataataataataatgtattctttgttaacaatgaaaaaaaaaaaaaa

SEQ ID NO: 47363 - DNA, 880 bp, Homo sapiens
tttttttttttttttttgcaaattttaaatttttattaaaaatcacagtttttaaaaatgtccagtgacacaatgtagctcttctgaaatgaatggaaaacacaacacactgctaaccagtggagggagctctctgcagggctgggagacctgacaatgcagctgtagcctctgcaagtgaaaatccaggccgacttgcagtcattggactgatgtccaagtgcaatcaccatacagcagctacaggcagggctggctgatagggagtatgggagaaggacacgctcagatgaaaacatgcatgcaacggattttcaccactgaacacactgttttctgtgatagaaactgtcggccctgctgggggacaagatattcacggcctcactagccagtgtgatgccaccagggcagcctgcccctgatgctcctttgttacctgctaaagaaggaccataaggtaaaaggcaccttaccttatggagtgagcccagaccccagggaaaagcttgggtagaacaatccaaggggcagcctgggtatgagaatccagcccaagctagctgctctagaagcctggaggcctttcccagcttcccaaatgtagcccttttcacatgaccaatccttcaattaggttacctttctctatttgccctccttggtggctacaggggaaaggataattattcctgaccacaagacacattttcactagaaaagacttcctcgtgctgggccacagtgggaattctgcacacaggtgcctgctccaccaagcagagaggctcaggagattgtccagggacaaggagacctggccggacctctgcagggaggtgaggcccctgcccccatcttgtcccatcacattctggat

SEQ ID NO: 47364 - DNA, 3430 bp, Homo sapiens
ggtgcgctcaggcggcgctcccggagatgccccgcggcagccgcgctcggggctctaagagaaaaaggagttggaatacagaatgcccatcctttccaggagaaagaccactgcaggtcagaagagcaggtctcaggacagcaggggcagctgcctctctctctgaagcatggctcaggtgtggagaagggtttcagaacacttctgggaatccgtcattaacagctgaagagaagacgattacagaaaagcaccttgaattatgccctagacccaagcaagaaaccaccacatctaaaagcaccagtgggcttacagacataacatggagctccagtggaagtgatttgtcggatgaagataagacactttctcagttacagagagatgaattacagtttatcgactgggagattgacagtgacagggcagaggctagtgactgtgatgaatttgaagatgacgagggtgctgtggaaatctcagactgtgcttcttgtgcaagtaatcagtctttgacaagtgatgagaagctgtcggagcttcccaagccaagttctatagaaattttagagtattcatcagatagtgaaaaagaagatgatttggaaaatgtcctactcattgattcagaatcccctcacaaataccacgtgcagtttgcatcggatgcaagacagattatggagagactgatagatccaaggacaaaatcaacagagaccattttgcatacacctcagaaacccacagctaagtttcccaggactccagaaaattcagcaaagaagaagcttttaagaggtggactagcagaaagactaaatggactgcagaatcgagagagatctgctatttctttgtggagacatcaatgtatttcttaccaaaagacactttcaggtagaaaatctggtgtattaactgtgaaaattttagagctgcatgaggaatgtgccatgcaagttgccatgtgtgagcagttattggggtcaccagccaccagctcctcccaaagtgtggctcccaggcctggagctggcctgaaagttctcttcaccaaggagactgcaggctacctcaggggccgtccccaggacactgtccggatcttccctccctggcaaaaactgattattccaagtggaagttgccctgttattctgaatacttacttttgtgagaaagttgttgccaaagaagattcagaaaaaacttgtgaagtgtactgtccggacataccccttccaagaagaagcatctctttggcccagatgtttgtaattaagggtctaacaaataattcacctgaaatccaggttgtgtgtagtggtgtagccactacagggacagcctggacccatgggcacaaagaagcaaaacagcgcatcccaaccagcactcccctgagggattctctcctgggatgtggtggaaagccagggagctgcctcgtggccaggagctggagtccgagtggtggtgcaaagagtgtattctcttcccagcagagacagcaccaggggtcagcagggggccagctcaggacacacagacccagctggaactcgagcctgccttctggtacaagatgcctgtggaatgttcggtgaagtgcacttgggagttcaccatgtcgaaggcaagacagttggaagggaagtcttgcagcctggtgggaatgaaggttctacagaaagtcaccagaggaaggacagcggggattttcagtttgattgacaccctgtggcccccagcgatacctctgaaaacacctgggccgcgaccagccctgttgaagagataaaaactcatctgcctcctccagccttgtgttacatcctcacagctcatccaaatctgggacaaattgatataattgacgaagaccccatttataagctttaccagcctccagttacccgctgcttaagagacattctccagatgaatgatcttggtaccccgttgcagtttctatgccacggtgatttaccaaaaaccacagctgaagagtctgctgcttcctgggagcaaagggagatctggctgctagtgaccgatgtcactctgcaaacgaaggaggagagagaccccaggctccccaaaaccctgctggtctatgtggcccccttgtgtgtgctgggctctgaagtcctggaggcactcgctggggctgcccctcacagcctcttcttcaaggacgctctccgtgaccagggtcggattgtttgtgctgaacgaactgtcctcttgcttcagaagccccttttgagtgtggtctctggtgcaagttcctgtgagctgcctggcccggtgatgctcgacagcctggactctgcaacacctgtcaactccatctgcagtgttcaaggcactgtggttggcgtggacgagagcactgctttctcatggcctgtgtgtgacatgtgtggcaacgggagattggaacagaggccggaagacagaggcgccttttcctgtggggactgctcccgggtggtcacatctcctgttctcaagaggcacctgcaggtcttcctggactgccgctcaagaccgcagtgcagagtgaaggtcaagctgttgcagcgcagcatttcctccctgctgaggtttgccgccggtgaagatgggagctacgaagtgaagagtgtcctcggaaaggaagtggggttgttaaattgttttgtccagtccgtaaccgcccacccgaccagctgcattggattggaggaaatcgagcttctgagtgcaggaggggcctctgcagaacactagcggttgccgcaggatctgtgaactttgcaatgtggctgcaagggtggtggtggtggtggtgatttggggtagttatttgttaactatggacacagtgaacgtagtttacgatcttgaaatgaaacttagatttttctggggaaatgttcagatacagttttgtgaactgtaaatcaaaatacctttttctacagtttatcttttattttctgcaaatttaggaacatatttactcgttttcacattgaatcttaagtttaagctcttcatttggtatttaggcaatatatgagaaaaaaatttttttttgttcatttgtaattttaacaagttgaacattttaccatgattgaacatgtttttattacagtatttaacattcccccaaagaataccctgcaaagtgtaaacctttgtcccatactgtgatattactgttctgctacaataaatgtcaaacctaagcactttgcagttcactacttttgggaaaatgttctagggaactgtatcacaggtgaaactgttacccataaagtgtagctctctgaactggtgtgatcgtgtctctgctgaatggtggtggggatagctggctccaccacacacacctgttttaattaggctgggtaatgtgcacggagagcaa

SEQ ID NO: 47365 - DNA, 459 bp, Homo sapiens; identical to SEQ ID NO: 20124
  misc_feature (1)...(459): n = a,t,c or g

SEQ ID NO: 47366 - DNA, 970 bp, Homo sapiens
cggacgcgtgggcggggcctttgtccctcgctgtggcctgagctccaggtctcgtcttcagcgctctgtgtcctctgctcctagaggcccagcctctggtcctgtgacctgcaggtattgggagatctacagctaagacgccgggacaccctggaagcctagaaatggacaacctgaggtatggagtgtatcctgtcaagggggcaagtggatgccctggggctgacaggaatcttctggtgtactcttattttgaaaaggggccattgacatttagggatgtggccatagaattctctctggaggagtggcaatgcctggacactgctcagcaggatttgtataggaaagtgatgttagagaactacagaaacctggtcttcctgggtattgctgtctctaagccagacctgatcacctgtctggagcaaggaaaagagccctggaatatgaagagacatgagatggtggatgaatccccaggtaggtgagagtgaatacagacaacatggatgagaggtcgaaagtcaaggaggaagccagtccttaaagtgattctggaagctgtgttccaaaagaagtagtttctggaaagcctgaaatttaaaaaaaaatatactctcagataggggcatcttcggtcttacacttttaaaatttctaagaattctactctcccttcaatgatcttccttaacgtttacagtgacagccaaagtactgttcatggcatataaaagagtgtacaatctgactttttttttcttgtttttgtggacagatagatatctgcatagttttgagacactctatgttaaactatcttataagttctctctttccatcatctctgaaatgtgtgagagtagtagtttctgtatctttggggtttttttgttcatttttctgtacatttcatcctgtttttattactgtagtcttgaaatatagtttgaaattataaagtaaa

SEQ ID NO: 47367 - DNA, 1032 bp, Homo sapiens
agcctataaacaaaaactagtttgaggcacccaagcatttagtgagagattgagaatgatgcttaatggatcaaaaaagcaattaggagtatgttcctgattttattctctaaattatactcaatttcatggtaattacatgaagaagttacctgcaattattcttaacactacatggaattcactgggtaattgtgggtcatttatttcctgaaagtcacgtgaaatccttagctggttgaatgttgcacagtatttgagaattacggtttgaagtgatttctgtgggagggaatcattgcaatgtatattctaaataaagtcatctaactattaaaaaaaaaacacccttcctaacccttcttttcttaaaattccacattcatccacaatctcatccctttgtagaaattcttgcctgaattctcaccaagttttgaattcctaaggtagccccgatctaggatgtgaaggctgcccagaaaaagtttatggctggaggagtatcatacagtgtctacatatgatagtacttacagattaggtctttggatgctttaacacaaaagatttttgttatccttattagtcaaataacgctattcttttgtggttctagaccctggcttctatctccctgtgatttgttttaatgctgaaatgacttggctatccaaagcttctagtctagaggtctgttggttgaaggcagacatttccaagtttgttgaaataatacgaagctgactagcttacgtgaatgatgttgccctcatttgttttgggtgaggactcattactgcagtatattgatctcttcaccaaatgctttttctttttctgaataaatgctgtattagaggttctatttatatatgatttttaaaactttggtttccttctatccaccaaatactgtgaattgtttttccatttatttttcttagctaatgtaactttattcttcacttttttttagccctagacttcctagattttctgtggcattctgtaggacattgtattgcttgg

SEQ ID NO: 47368 - DNA, 436 bp, Homo sapiens
gtgaaaagcatccccaaaatttcaatgatgtgaatttttaaattacctttatttctttaaactaattccattgattgttacttaaattttccacctggaatcatggatttaaaatttccccacctcatgggaaaaaaactaacccagaagttcaaagcctttaaagtttcatctgattctggccttagaattgtccttaaaagctttctcctggccgataggaggaagcatatatcaaggaggttctttcccttcccattatcattttgtggcaagccttaagttaacaatgtgtctaccaagaacaattgagttttctaaaagtaataatgaagattatgcaattctaactgtagaagagatagctattaaaataatcagtagcctgggcatagtggctcacacctggtaatcccaacactttagaaggccaagg

SEQ ID NO: 47369 - DNA, 1217 bp, Homo sapiens
ctatcacgtggtgctctccgactactcaccccgagtgtaaagaaccttcggctcgcgtgcttctgagctgctgtggatggcctcggctctctggactgtccttccgagtaggatgtcactgagatccctcaaatggagcctcctgctgctgtcactcctgagtttctttgtgatgtggtacctcagccttccccactacaatgtgatagaacgcgtgaactggatgtacttctatgagtatgagccgatttacagacaagactttcacttcacacttcgagagcattcaaactgctctcatcaaaatccatttctggtcattctggtgacctcccacccttcagatgtgaaagccaggcaggccattagagttacttggggtgaaaaaaagtcttggtggggatatgaggttcttacatttttcttattaggccaagaggctgaaaaggaagacaaaatgttggcattgtccttagaggatgaacaccttctttatggtgacataatccgacaagattttttagacacatataataacctgaccttgaaaaccattatggcattcaggtgggtaactgagttttgccccaatgccaagtacgtaatgaagacagacactgatgttttcatcaatactggcaatttagtgaagtatcttttaaacctaaaccactcagagaagtttttcacaggttatcctctaattgataattattcctatagaggattttaccaaaaaacccatatttcttaccaggagtatcctttcaaggtgttccctccatactgcagtgggttgggttatataatgtccagagatttggtgccaaggatctatgaaatgatgggtcacgtaaaacccatcaagtttgaagatgtttatgtcgggatctgtttgaatttattaaaagtgaacattcatattccagaagacacaaatcttttctttctatatagaatccatttggatgtctgtcaactgagacgtgtgattgcagcccatggcttttcttccaaggagatcatcactttttggcaggtcatgcttaagggaacaccacatgccattattaacttcacattctacaaaaagcctagaaggacaggatactttgtggaaagtgttaaataaagtaggtactgtggaaaattcatggggaggtcagtgtgctggcttacactgaactgaaactcatgaaaaacccagactggagact

SEQ ID NO: 47370 - DNA, 757 bp, Homo sapiens
gtttttgtttaacgtggacaaagacttacagataggtgcaaaaaataaatcctcttttgcaacccagaactcgattgttcgagtatgagcttttgatacatataagaagggatattatgatacctgagacagttgattgatgggagtattgatagccataaaggttggttccaggccaggtgcaatgggtcaagcctgcaatccccacaccaaggtgggagtattgcttgaaaccaggagttcaagaccagcctaggcaagaaagcttttatcttgagaacatggtgtctggagttaaaggtattggcatactccacacatctgtaccattcttgagtgatcgcttaggaatgaatgtgatttgaactcattcatgttgagagggtgtcaaattgagaaccaggtagatccccaccacctacagtaaaaaggaccctaaagtaaattggttgaagaaattagatcccaaagattcttggtgaattttgaagtcttcatcagtatatccatattaaaacgagatgacagaagccaaagtaattatgggctgacaggacaactggatcagtttcattaaaaagggcaaacttgaagataaatcttttgactccagctctttagaggatctaaagtgaccttgatggacagtggaagaaatcacaacatggaattcctcgaataacaatttattgactttaaataattttgtctaatgctacatatacacaattaaaaaacctttacactaaaaaaaaaa

SEQ ID NO: 47371 - DNA, 850 bp, Homo sapiens
tttttttttcaggaatatccctagctgctttcatatcggctttgatctgctcactggtgacctgacagcctttctcacagctgctttcctcgaggggaaactgcttcgactggcccatctgatgggagttgtacctctttcgaagtggagtcttgccttttccacttactgacaattctctggactgcactgactctccagttttttcttcacgttcagagtaacgccgagtaccgttcttaggaatccagacttcttggagttctagactatcttcttcatcatcactctctgaatcatgaacagtaattgaggttggttttactacacgctgaagaccactgggtcctgcttgttcctcatcaacatccacaggaataattgcctggctgtgagctggagtattatttccactctcggccaccacctctccatcttcttggacgatgtcttccatctcatttaatgcgtcagctgcaaactgctgctctcctggctgcagatcttgccgaaagtcattctcctcgtctgagtcatctggatgatggtgattgttgtcgtggatgttggcattgttattctgggcattattatcgtcattgttggagttctggttgctaacaagagctgatgaaacaccaattcctgtgcctgcactcagaccaactcgagcacaacccttgggtggttcacgaaacatctgatccagtgaaataaactctaggctgggtaataattcaataaactggccaaaagagtccagcttcaaagcatggcaccgtactaggttgatatcaaccaatcgagtccatcttgagtggtctttgagaagaggagagttttcattttg

SEQ ID NO: 47372 - DNA, 507 bp, Homo sapiens
gctacctagtgggtcttggggaccttcgaaatcgccgccgctctcacaatggcttgggtccagactgcgccacagcctctcgggagacgtgggccctcggaacctttttagtgccggactccgggccgcaggcagtcccgcggcagcaggatcacagaacctctggatggactcttcctgggaagctttgctactttgcagcagctggaccatgttcctcattaacatctgtctgtccgcttagtcatcacatcatttcactgtggtggcagggactcagctcggaattctgtatagaaaaagcacctggatcccagtctttcaatggcttcaagacaaccagaagtgcctgctcttgaggctagtgcgcctctaggcaagaatgtcccctgcccatcgggattataccgccggggcagtcagctatgatgataccctcgaggacctgcgccatgactcttctccatcggacatggcagcgtccttggaagccagtgattcagagcg

SEQ ID NO: 47373 - DNA, 1152 bp, Homo sapiens; identical to SEQ ID NO: 2736

SEQ ID NO: 47374 - DNA, 1308 bp, Homo sapiens
tcgacttttttttgaactgatgaattcattttaatcacagaaatttgcctgggcttgagcaaactgtggggactcaatagatttggaggcctcctctcccttctgagaggcctgcctgcttcctgccctgatcgaatccctaatttcagtacaaactgaggaacttgaaaaacatctgtgcactgggaccgcccctcacaggagggctgaaagcaggcacagctgagttcagcgggcacattcagcaggcgttcagtgggggaagcaggagacagagggcgggcgctcacaggacccgctccaggcttgtcacagccacacatcacagcactttgggttttgccacaacagagcagctctgagctcaatccttgcacctcagaagtgcatttatgattaaaatcatgctcgacatgaagccctgttatgatgtgcagtttaaaaagagaaacgggtccaaatcagcaccaacagagccccccagggggctccaagactcgccccagagacagcagaaggaccccatgtgcgcgctgatctgtaagaagggtggtggatgcagcagcagggggctgcgtccaaaggcagcaggtgggggcctctcatagtgtgacccctgggcaggcccactcccctaccccggtaccctcacctgaaaaatgggacagcaacacaatgagacaacagagactgtctagaatataaagaaaagaatgaaaaggtccatcccaagggcagcctggtggggacggggacaggcagtggggggaggctgcctctggaagacctgtcccagcagaatcagcccccacctctgccctgccttcccaacctttgaacccacccaggcagtagacacattcccctgggaaacagaatttgcaaggcaggtggaaagagcagcactcacactggctgtgactgctgaaaaatgctcattggcccttctcgaggactgaaaggagattcggaatcacatttaaaattaacccgtgacccacttcctgtaaaactgaagatcaccctctaacagccctaacaaacaggctctggccgtctcctgaccctaacccggtggagcagctgactggacgcagtgacgccaccactgaggttctgcagggtggaggcggccaggctggctcactgcatgaggtggacggtagctgccttgcggatgagccgctcggtcaggggcgagttgggcttcaaggcatcacgctccatcagaaggctccgggctacgttcttatggacgctggaggtgcagtttaaggccgcgtgaatcagcagctggttgaagacgtc

SEQ ID NO: 47375 - DNA, 479 bp, Homo sapiens
gtgaaggcaagcttgatgcaaaacctcctgacctttcctacctgaagagccctttgacttctaggaagaaaggtcaaaaatgttatcttcagttgtgttaatcccagttttagtgcagcttaggaggctgctagttaggaagatggcagtggctgtaggctgggttgccagaaaagatggtggcctagtcttattattcagatggagaacttagaaaacctgaagagtacccaaattggattgtattttaatggacaatggctgtattttttccatgttagaaggatcctaatgaaagcacctgttatttttaagtttctaagggtctagttgttcagaatccccaaggatatttccctaacctcactcagtcacattgtaggagccagtgtagctatggaattatccttaggaactcaagcttctaaaactatccatgtagtcaaatctaggggaaaaagcaaataaaaatagtaaaa

SEQ ID NO: 47376 - DNA, 530 bp, Homo sapiens; identical to SEQ ID NO: 20165
  misc_feature (1)...(530): n = a,t,c or g

SEQ ID NO: 47377 - DNA, 1917 bp, Homo sapiens
tggatctgaaagccaaaatgccagatgaccatgcacgaaaaattttgctttcccgtattaataactatactatcccagaagaagaaattgggtctttcttatttcatgctattaataagccaaatgctcctatctggctcatactcaatgaagctggactatactggagagcagtaggaaatagcacttttgctattgcctgtcttcagagggctttgaatttagctccacttcaataccaagatgttcctcttgtcaacttggccaaccttttgattcattacggccttcatcttgatgccactaagctgctacttcaagctttggccatcaatagctctgagcctctgacctttttgagcctgggaaatgcttaccttgctctgaagaatatcagtggggcacttgaggcctttagacaggccttgaaattaaccaccaaatgtccagagtgtgaaaacagcctgaagttgatccgctgtatgcagttttatccttttctgtacaacatcacttcttctgtttgcagtggtaattgtcatgagaaaaccctggacaacagccatgacaaacagaaatattttgacaactcacagtcactggatgctgctgaagaagagccctctgagagaggaacagaggaggaccctgtattctctgttgagaattcagggagggactcagatgcccttagacttgaaagtacggtggttgaggagagcaatggttctgatgagatggagaattcagatgaaaccaaaatgtcagaagaaatactggctttggtggatgaatttcaacaggcatggcctttggaaggctttgggggtgcactagagatgaaagggcggcgtctagacttacaaggaatacgggtgctgaagaaaggtccccaggatggagtggccagaagctcttgctatggagactgcagaagtgaagatgatgaagcaacagaatggattacattccaggtcaaacgtgtaaagaaacccaaaggagatcataagaaaactcctgggaaaaaagtagaaacaggtcagatagaaaatggacatcgttaccaagcaaacctagagatcactggccccaaggtggcatctcctgggccacaagggctactagactggaagaccaggaaagtgccatagacataatgtaactggatttcagcaaggcatttaacagagcctcttatgatatccttgtgaaccagatggagagatgtgggcttgaagccttcccattgcctacaggataaaattcaaacttcctagtgtggtgtacaagaccctttacagcccgcctctgtgtacccttcaacaccattctctgaaccaaccatgctcatgtttttacctcagtgcctttgcacatgctattccctctgcctggaatgccctgtgccccctctgccctctgccgtgctaaaatatcactcatccttaaacttcaaaatcaagtgccatctcttccttgttaccttcaggcagaattagttactctttcctctgtgcaattgttctatatcttcgctctagctcttttcctgttgtattgtaatgatttgtttatgtttaccttccttactagactgtgagctcaagagcaggccgtcttaattattcctttctgtacccctagtgtcttttatggttctcagccccttataacaggtgctcaataaatatttttcaaatgaaattattaaatgtaaaagaaaattaagattttttgtgaaaattatggcttatttaagttattaatttaaacagagttaatttgaaactcttccaaaactgttcctttctgttttgttaaaatctcaatctaaacccctgcctgtacctcaaacagttttctactgttcgtaaattcctataatataaaaagcgctatacagaactaaaaaaaaaa

SEQ ID NO: 47378 - DNA, 1484 bp, Homo sapiens
aaaagagtatgatacacttggacacagtgcttttactagtggtaaaggacaaagaggtagtggaagttcttttgagcagtcatttaacttcaattttgatgacttatttaaagactttggcttttttggtcaaaaccaaaacactggatccaagaagcgttttgaaaatcatttccagacacgccaggatggtggttccagtagacaaaggcatcatttccaagaattttcttttggaggtggattatttgatgacatgtttgaagatatggagaaaatgttttcttttagtggttttgactctaccaatcagcatacagtacagactgaaaatagatttcatggatctagcaagcactgcaggactgtcactcaacgaagaggaaatatggttactacatacactgactgttcaggacagtagttcttattctattctcactaaatccaactggttgactcttcctcattatctttgatgctaaacaattttctgtgaactattttgacaagtgcatgatttcactttaaacaatttgatatagctattaaatatatttaagggttttttttttttgacaaattcaacattcaacgagtagacaaaatgctaattatttccctgattaggaaagtttctttaaaaaacacgtaattttgcctagtgctttttctctacctgcccttgggctcactaatatcaccagtattattaccaagaaaatattgagtttacctgattaaactttaaaagttaattgtagatttaaattgtgtgaacctaatgatttttgcagtgaaacctttactaattcaaagttgcatgttctatgacatctgtgacttgcgttgcagagtgtacatgaaactgtataattgagtcattcagtaaaggagaacagtatcttggttaattgctactgaaaggttgagaaaggaatggtttgatatttaccacagcgctgtgcctttctacagtagaactggggtaaaggaaatggttttattgcccatagtcatttaggctggaaaaaagttgaaaacttaacgaaatattgccaagagattgttatgtgtttggttccagcctaaaaatgattttgtagtgttgaaatcatagctacttacatagctttttcatatttctttcttagttgttggcactcttaggtcttagtatggatttatgtgtttgtgtgtgtgtagtttatcctctctctcatctttatctagagattgactgatacctcattctgtttgtaaaaccagccagtaatttctgtgcaaccttactatgtgcaatatttttaaatcctgagaaatgtgtgcttttgttttcggatagacttatttctttagttctgcacttttccacattatactccatatgagtattaatcctatggatacatattaaaacaagtgtctcatacaacattgtatgtgagagaaatataaatatttacaacctgaaaaaaaaaaaa

SEQ ID NO: 47379 - DNA, 1792 bp, Homo sapiens
gtcgtaatatcatctgattctttagctgataaaaattatacagaagatctttcaaaattacagactctgtggtggaaaaaactgttgcctgaactttgtcagagaataaaatgtggtggagagaagtatcaactctacctgtcatcattaaaagaaacattgtcaattgttgctgtggaactagaactgaaggatttcatgaatgttctcccagaagatggtactgcaacatttttcttgccatatcttctctattgcagtcgaaagaaaccattgacttaaaggtatcatttgaaaaataccataatggcatttgagactgaatttctaaaaattgaatgccaaagtacaagtagaggagttttttattttatatatcacacacacacacacacacacacacacacacacacacatatatgatacaaatgctttcaggctgcttaccttaccgtgtagtggtaactattcacttcttaatttatgacctcaatcaatttaattgtctagaatgtaaaaagtctttaagacataagaattcctcaaagaagccatacattttttaaggtggggattgacttttattccaaggaacaacatcagttcactgttgttggagacatgacaatcattttcatcccaagaacactttaaggaaacattttacaagtatgcttgaaagaatgtcactaactggtccagaattttatcttcttgatttttccagatttctctatgtttttgagaaagatgttaatgttttgccatggtaaaagatttcaaacctcattttttttgttccttttcttgttacttttaagaaaactcatgctctgtttctctgaatcaaatgaagtagaagtttacaaagctaactttcttcttgtctagctattaacatgatttgtcaaatgcatgtttttttcagccaaagccttgtttccattttttgttgatgtgtactcttgctcttttagctagagtgtatgtgaaaataaagaaatacatcattgtattcacaaccatgtgtcttcatttataactttttgtttaaaaaatttttagttcaagtttagttcattgatattatcctctgaatgcagttaaggctgggcagaaattctactcatgtgacatctgccacaggtctattttgaagcttttcttctaatggcaatgtttgtccttaccaggatttaatctatagaattgtctctcaactctgcttttctccagttccagataacgtccttaagaccatctgttcaggggttcacaaaactcaaatttgtgtcattctattttatttattttattttttatttccttccctcataccttgcccattccctctgaatattaggtgtgatgtcaacagcatgttagaaggatcaatgggaaggcaatgattgaaaacatttcaatgaaccttaatagtgttcctttgaggagcacccaggagaatatctggtcatagatctttttttaaatgcagttttataaaaccctaacagcggtgatatcattagactgtatgaatcagttttattacctagtgtacaagtgtcagtcatgtatcattatatagtctgttgatctttccatttgcaaaaaattaatagttttcccccacaaatgtacaaagttggtatgcttccagtcttcctttaatggtttatagtcattcccaaaggtaacattccaattttacactttcacatacattgttatgaatcattggtttttctcttttttccacttatcaccaatttatttcattcagcctcgtgcc

SEQ ID NO: 47380 - DNA, 1606 bp, Homo sapiens
gaattcggcacgaggaaaggcagcggtggccacagaggcggcggagagatggccttcagcggttcccaggctccctacctgagtccagctgtccccttttctgggactattcaaggaggtctccaggacggacttcagatcactgtcaatgggaccgttctcagctccagtggaaccaggtttgctgtgaactttcagactggcttcagtggaaatgacattgccttccacttcaaccctcggtttgaagatggagggtaccgtggtgtgcaacacgaggcagaacggaagctgggggcccgaggagaggaagacacacatgcctttccagaaggggatgccctttgacctctgcttcctggtgcagagctcagatttcaaggtgatggtgaacgggatcctcttcgtgcagtacttccaccgcgtgcccttccaccgtgtggacaccatctccgtcaatggctctgtgcagctgtcctacatcagcttccagcctcccggcgtgtggcctgccaacccggctcccattacccagacagtcatccacacagtgcagagcgcccctgggacagatgttctctactcccgccatcccacctatgatgtacccccaccccgcctatccgatgcctttcatcaccaccattctgggagggctgtacccatccaagtccatcctcctgtcaggcactgtcctgcccagtgctcagaggtttccacatcaacctgtgctctgggaaccacatcgccttccacctgaacccccgttttgatgagaatgctgtggtccgcaacacccagatcgacaactcctgggggtctgaggagcgaagtctgccccgaaaaatgcccttcgtccgtggccagagcttctcagtgtggatcttgtgtgaagctcactgcctcaaggtggccgtggatggtcagcacctgtttgaatactaccatcgcctgaggaacctgcccaccatcaacagactggaagtggggggcgacatccagctgacccatgtgcagacataggcggcttcctggccctggggccgggggctggggtgtggggcagtctgggtcctctcatcatccccacttcccaggcccagcctttccaaccctgcctgggatctgggctttaatgcagaggccatgtccttgtctggtcctgcttctggctacagccaccctggaacggagaaggcagctgacggggattgccttcctcagccgcagcagcacctggggctccagctgctggaatcctaccatcccaggaggcaggcacagccagggagaggggaggagtgggcagtgaagatgaagccccatgctcagtcccctcccatcccccacgcagctccaccccagtcccaagccaccagctgtctgctcctggtgggaggtggcctcctcagcccctcctctctgacctttaacctcactctcaccttgcaccgtgcaccaacccttcacccctcctggaaagcaggcctgatggcttcccactggcctccaccacctgaccagagtgttctcttcagaggactggctcctttcccagtgtccttaaaataaagaaatgaaaatgcttgttggcacattcaaaaaa

SEQ ID NO: 47381 - DNA, 818 bp, Homo sapiens
ggtcgacagggcaaaacttttttttttttttttttgtgagaaacataacattttaatagatgaaataaatactccagtacatgcaaggtaaaaacttgacgttgggggaaaaaaaaatcactctatagtgtaaattaaaaaaacacacgctcacagtagcttccccccatttgcaaatcacatggcaaattcatactctttccacaccaagtatactcctaattcaacacgattgcttaaaaaaaaaaaagacatacaaaaaaaggtagctacatccatgtctaaggagtgaaaactgaggtaacctttcttttaattaaaaacacaaaaaacaaaaatgaaatgaacccatgacctccttcctgcccaataatgaaatttagttgagaaattccggaagacgggctggggtagggggtgggagtgataacacaaccagcagatgacatatcttccagtccctactgcatgggggctggtggagagacacctgggccctccaagtgcgtgtgcaggttgcgtgcatggccctgccttgtggaagattcctctcgagcatttaacgttggggagggtagggggtttcacctatgatttctttggtataaatggagaggggcagagagtaagtatcttcctttagtctgggggtggaagaaggggtatgggggtggggtgctaattcacagaattggaattcactggcggtaaagtcctgggcgaagacctctcccttaaagcctgagatagcagggtgcagccttcagacacggcgcaggccgagttcctcagcctctccctgtggtccgacatcttgg

SEQ ID NO: 47382 - DNA, 1656 bp, Homo sapiens
ttttttttttttttttcttgggtaacataagacatttattactttatactaattttttcattcataaaaaggacaaagcacagtcctatactactccattgaaaaaatgataaaaaataactaaaaaatcaattcaatatttatcagtatcaaataaaactactatcacctttcctgaaatacaaagaaacaacagatgtatctatacctatataaagtttaattcagaatcttgcgtcttaaagcagatgattattagttagcttgacaacagtttaaaactgatggtcccagttaaatctgtacaactgtatgagaaaatgaaaagcttgagttatcagtgtacgagagattttaaactactttatctctgtcagaaattcaaaactaaacaacctccaaagtctgttttcctcttacctttcagaaccatttcatgcaaaatctaaccagttttgctcgttattatcatatattagaaaataaaaggcaagcatgcatttggcaaaagatttagttgttgattatataaaaatgcccaacatgggtcacattgcaaaagtaaaaccccaaagtgtaacaatgaaaacacaaacatttgtacagaaggtatacagtgtattcgtttccctaaagtatgaagacattttgtttctttttcaaatacttaaatattttatgaaatctggcaatgatcttaagactgttgacatacttcccactgggaaatcatcccatttcacttatttttaaaagtttcattttataccagagttaaatgtaaactaatgaaatatttattgatattttcataatgaagactctaaacatttacacatcgatatatagtacaaaaattatacaaattaaagaaagggggtaaagtcggtaaagtagtaatagatctattttgcttcctgtaaatattttttacgaacctatacggtgtcctttctaaaaagataaactctaattagctagcaagtttgtgctaataaaataggattatacctcttgaagcatccaacactgcactatttcacaagccagctaattctttattactcgatttcttttacatccacactcaaacacatttccatgcacaccatggagaatgaagaaatgtgcatcttccttttcacaacttataaaaacccaaagcacccaacacttgggagacaccatcggaaagacatattatttgcctcctccctggccttccagttttgcatactcttcaaagtaccattagcagtatattgatttggtatttttagccagttttcagtattgcattgaagtgggaaatgagcttaaaactaattattattattattattattgttatttttacaaaatggaatacggtagctttttcaacctacaggtgactttttgatctgacatctgcaataaagaaacgtaatacttaggaatgaagcagaaaaaccaacatactagtaattgtgatattcacttaactgtcacttattcctaaccatgtaaagactgtcacatctcaataaaaaaggaagcactctacttttcaaaatttgtcactccacatatgaacaaatatagcaatattatgatactctagataagagctgtgatttttgagatttgaaattgataagaaaagcataaaataac

SEQ ID NO: 47383 - DNA, 1011 bp, Homo sapiens
tttttttttactgggaaggctagttgtaaacataaacattctcactgaactactggccccccaaaacctaacctatctgacaatcaataatcatcttttgactataaaatcataaaaacttgtactctgtggctcttttgtctcgatgatttttcagagaaaaaaattagctgtgttaagtagtttcactgatttatccatcttgaatagctgccagttctggaacttcatacatcctcaggaacgtcttcataggaggcaaataattatgtaggcttctgggaagtgggcagctgactaatataactgtcagaccgtagacgttctgattttagactggaccgaatttccaaacgacaaagatgggtcagggatggaacagtggcaatatgttgctgtagaatcccaagcgtttgaggcacgagcagagagcatcctttcaacagctggtgcaagtgtcttccaattagtaaactccaaagtgaagataagggtgtcaatgctgactgagtcaatccaagaattgcacagtagaatcagtgggtcaaatccagcaaccagaagatgtggcaaccactccttatattttggcttgtgctttaattgcatgatttacaaattcatatatatggttccatggtcccaatgagcaacctttcctcaaaaagtagcgaaatatcgaaaacttctcgtacttcaggcagtatgccaaatgaagttcatttatctgggctccatatttcaaaagaatgttcacaattccaaagaactcacagtccttttggaaagccatgcacacaggagaactgaatccaaaaacaaggcacgcctgggcgtctgggctgtagccattccggagtaatatttctaggcaatcttcatgtcccccaaacactgctgagtaaacagggacttactttgtttagcccagtgtcacaggcccggttagtaagtggtattaacaagtccaagatttttgtatggcccatttgtgcagctgcatgaataggt

SEQ ID NO: 47384 - DNA, 446 bp, Homo sapiens
  misc_feature (1)...(446): n = a,t,c or g
tgnanaccngntatgacttggnnnaccagntatgacatgattacgaatttaatacgactcactatagggaatttggccctcgaggccaagaattcggcacgaggacctgaaaagggaagaggattctctacagaatgtagatttttccccacaggagatagctttgcagggccatttcaaaatctgtcaaagaaatatattttggggtaaaatgcctcaatttctttcagggcctgctatctgtcatgtgatgttatactagagtcaggttggaatttggtatcttattgctacaaagaatctgttttgtcagtcttgggatctctattttaatgttactgttggtcagttgtacctgaattccaaagggaggagagtataatgaggcatactcaacccctccttcccatcatggcctgaagtagtttttcaggcttattctggaa

SEQ ID NO: 47385 - DNA, 1428 bp, Homo sapiens
accagctatgacatgattacgaatttaatacgactcactatagggaatttggccctcgaggccaagaattcggcacgaggactttcagagagcccaggctgctagacaggctgccacgagtgtccctaaccctccctgatggatatccactgggagcacttcatcctgttctgacagcttgataacattcctgttataaccaaggatggaagtgtacaccagtccgtaggtattgcttttcttgtttgaaggaaccaagaggggctctgccattagttggaccctgggtcctggagtaaagtcaggagtgcagggatgactataggtaggagagattcccatcccttggtgtgggagagcaagttgcctatgtccatgttctgtgagatggctttcctcatagatggatgggaaaatgtcaggctctttgctgctggtttgaattggacacactgctgcggctcctcctgcaggcctgagggggcttcccctctgcttgtggagtggttggcattcccagcagtatcaaccctcagaggagcgggaactggggaattctggccctacgtgcattcacaggcaatgatgggtttgtgtgtatggtgtcatgagatcctctacctcataacaaaaggacagtgggtagactaaggcagtagctcaaagggctttgcaaaattttaatatattaaaacaagaggcatctgctagaaaacattctattgtataaaacccgagttcttaaaaacatgttttctttggcactttcattccctccctcccctttccccagcatattgcaaaaagctctccagtgctaaggcattggcagggtgtgtaaacagcagccagcatatgtggaagaataatacaaagcttttttttttcttctaatatgtctgtgcagcaagcataaataacaggacccattccaaggagtgtgtgtgggttttccccctcccctgtgtcctctgtcaccttggtgatgaggccagagtgatgtgaagactgggagggaaccctaggtcagaccttggtttcctgttgttcttcccaagacccagggttccctcggtttccatttggtcctgtagtgaaatgctggtggttggttttaggttggggaaaagacgggtgctggtgtttaaaaggagtaaaggcataggcccctcatgacctgcagggaccccagccactgcctctgggcttggcttgagctcctgggagtcgggaagctggtttgacattttgtaggtttctctctactgtggagctggagatcaaatgattgggatggttcttcctctggcttacggaggcaaggaagtgctcttccttagtcccgtggtgttgtaaggctgagactagggagatgggtcttgtaactgaaaagtaactgcttctccaaacaccacctgcagctttctg

SEQ ID NO: 47386 - DNA, 740 bp, Homo sapiens; identical to SEQ ID NO: 2758
  misc_feature (1)...(740): n = a,t,c or g

SEQ ID NO: 47387 - DNA, 1924 bp, Homo sapiens
aggcgggcctgaagcggcagcgggcggccttcgtccggcgagagctaggccgaggacccgcgccgcgctccccggcacctcaccgcgtccttcaccgactcccgcggcgcgcggccgggcggggaagggcgggcgggggtctcctccgagctgcgcgctcggagccgcctgctgggcttgggcggggcgcggggcccgcggccgccctacccggctcagtcctccccctgtggaccctggcgacggcggcggagggagaggggagcggcgcccgggccggggccgggggcggcgtggggaggggggagggcggcggccgggctggggctcgggatccgcatcgggatcgggccgccatggacgacaaggcgttcaccaaggagctggaccagtgggtcgagcagctgaacgagtgtaagcagctgaacgagaaccaagtgcggacgctgtgcgagaaggcaaaggaaattttaacaaaagaatcaaatgtgcaagaggttcgttgccctgttactgtctgtggagatgtgcatggtcaatttcatgatcttatggaactctttagaattggtggaaaatcaccggatacaaactacttattcatgggtgactatgtagacagaggatattattcagtggagactgtgactcttcttgtagcattaaaggtgcgttatccagaacgcattacaatattgagaggaaatcacgaaagccgacaaattacccaagtatatggcttttatgatgaatgtctgcgaaagtatgggaatgccaacgtttggaaatattttacagatctctttgattatcttccacttacagctttagtagatggacagatattctgcctccatggtggcctctctccatccatagacacactggatcatataagagccctggatcgtttacaggaagttccacatgagggcccaatgtgtgatctgttatggtcagatccagatgatcgtggtggatggggtatttcaccacgtggtgctgggctacacatttggacaagacatttctgaaacctttaaccatgccaatggtctcacactggtttctcgtgcccaccagcttgtaatggagggatacaattggtgtcatgatcggaatgtggttaccattttcagtgcacccaattactgttatcgttgtgggaaccaggctgctatcatggaattagatgacactttaaaatattccttccttcaatttgacccagcgcctcgtcgtggtgagcctcatgttacacggcgcaccccagactacttcctataaatttctcctgggaaacctgcctttgtatgtggaagtatacctggctttttaaaatatatgtatttaaaaacaaaaagcaacagtaatctatgtgtttctgtaacaaattgggatctgtcttggcattaaaccacatcatggaccaaatgtgccatactaatgatgagcatttagcacaatttgagactgaaatttagtacactatgttctagataggtcagtctaacagtttgcctgctgtatttatagtaaccattttcctttggactgttcaagcaaaaaaggtaactaactgcttcatctccttttgcgcttatttggaaattttagttatagtgtttaactggcatggattaatagagttggagttttatttttaagaaaaattcacaagctaacttccactaatccattatcctttattttattgaaatgtataattaacttaactgaagaaaaggttcttcttgggagtatgttgtcataacatttaaagagatttcccttcatttaaactaaattactgttttatgttgatctgcatatttctgtatatttgtcatgacagtgcttgcatcctatttggtgtactcagcaaataaacttttcattttaaacaaaaacaaaaaaaaagtcg

SEQ ID NO: 47388 - DNA, 1894 bp, Homo sapiens
tttttttttttttttatacatgttcaagttttattaccaagtatgatgggcagaaaatacggtacttcttatacaggaggctgaaacagaatgaaagggtgaaaattaggtttaatttacttaggaaacaagaaatagaaagtcatagctataacactccactttcaggtgcccatgaagtagccttcaatggagattccccatagttgtttcacagcacagtgttaaaattttattacaagccctgtgtacaatcagtcctgtgaaaatatttataaaagaaaaatattacagtacagttctgcaaggggcagcttcctctacacctgaccgtggatgccacaaaacctataatatagagggaaagtttaaatatataacaagaatggaagttcagacatactaggctaaaggacacagaaatggatcagttagagcttaacatttcagagcaagaaatctccattttctacatagaggtttatacaatcatgctacaaattcactctgggtggggtgggggaaggaaggtcactgacaagaggggtagtaaaatacacaggaaccaaagcaagtgagtcagactcaactaaatcgattcaaagcttcagctcaacaattttcataacacatggtataccacaatcaacccaaggtgagaacatttcttttaaatagtagatatcacatgttcataatcactgggttgtcccaaaggtgggtgcctataaactttccagctgttacatagactgtcaacatctttcttcttgagtttaaactttctttagcttatttgtttctcgttggatataccagtccaagcctctttggggaaaggcacctgccatgtttcccatattttaaaaaatgaacatcccagaaagtaagcctgagaggaccctggccccatccccatgtggcccacacatttgactttgaccattagcagcagtgacactgtgagagggggagaaggtgcaggtgggtgaagtgggcaagggtctgcaacacgagacgctctcaggaagctggcccaggccagggcctggcccagggttcacagtgactttgctctgctccgccctcttccctgggaaaaccaatctaagtatcaagcatgatcttccttcttcgtcctggagtacacacagtaaagggaaaagtctgctttgaggcttctacttcaatggtctcccctaccccaagccaggaatgaaaggggctgccatattctcaaagtggggaaggcagagggacagtactgggctgccctcccacgtgtggtaaaccctgcagctgctacatgtcttcacagcccaggaattcaaggcccaggtggcagcaggaagaaacagtggaaaagcaaggggaagagaaaagagaaaaaggagggggaaagtctgcataactgtcataacctctgcttctcctgctctgtaacaaacccacaaccaggaagagtcatggtctggaacaatcatgggaccccaaacgcctgtaggttttttaccaccaaacatcacccatggctgctcctaaagctgtcaatttggttccccacagttacctagcatcacggatgccccaatttatggccccaggaaggctgaccccaggctaagggcagtctcactcccacagccatgcaatggacagtctgaaatgtttccctaccccagaccttcactgacctctactatttcctcctctgatataaagaaaacactttaattttctcctgcatcctacatctcctcctaaaattttggccctaattgtcatcaaaaccttgtaggattctgaattttttgtttcttcctgaatcttagccagttctctcagagccaatcctggatttataaggaattttcacctattttttttttttttt

SEQ ID NO: 47389 - DNA, 1944 bp, Homo sapiens
gtgaactcctggcctcaagggatcctctggcatgccttggcctcccaaagggctaggatcacaggcaaaagccaccgtgtgtttatttttcccattcccttcctttatctgcaatgcttttttctttaaggcagcctaatttacaagcttggccttgaattaaaagagaacccagaacccgctcttggagtttacgttctcaaaccaacatcagagcaactgtctatccccatataaataaagttatctacccctgctcctaactgggtacaagttatgactacaactcagtgattttttaaattagtgtgcctatttggtgaaatctgtgaacttaatcaaggacaaccacacatgtcaattactaaacatttaaaatatatttctaaacagaatgggccgactcagtcacagtaactgttgatctccatagtagagcaacccacaaagacagaactgatttttttcccataatcaggggtgaaaaatatacaacttgtttctgaaccaaaaccacaatttctgcagtttaaaatgtttcactgctaatatggccctggtagaaattatgtagttttttttcttctttaaaaaaaaaaaattaaaaaaatttcctaagacactaaatcctcaatctggaatgtagattctgagcacaaagcagctcagttaacctaaaaaataaagaaaaaattcccatcacctgtctcagtagggcctgaaaggagagaagtagtgtggggaacccctgctttggtatggagagtcacggccccttgacccagaccgagaccgtgagtagccatagctggtgcttctctcaggataaactcggatgtaggaagtttcaccctcatgagagcggaatttggtgtcatccagtttacgcagggcatattccatgtcttcttttctgagatactcgaccatccccactccatccttctgcacatcagcataacagacatccccagcttctcgcatgtgatccttcaggtcctgcccagctgcctgacggaggaagtcctaggcatggagaacataagaaagcccacatccttcagctatgttaactgccctgttaagagccagcaatacctatggtcccttctccatgatcacttaaatcctgagggtccccaaatcataaaccttgataagggacatgaaatcagaaaagagcactgaagtatgtgtggtaaatgaaccaccttgagaagctggttttaagttcatcttccagagaccaggccttttcaacagagcaagaagtccatcccattacaggtttagtatctttgagaattcatagcctctttctttgtcctttaaaatcaatgccaaactcctaatactttgagttccaattttttccattatgaaatttaacagtaccaattatttattgcttgacagggtttcacaggacatgggaattttgaaaccagacatgaaataaccaaagagtagctgaaggtaacaacacaacaacaaaaaatctaaagtttgttttcttgtaggtatgaatgacaaactatacagagtacctcttaaaagatcaccaacattcttcaatacagtgggggggaaggtaagactcagatgctaaaactagtcgggagtcatacaaccctacctgatgtcatgaaagggaaatgtgctcctgctctcaaaggctgtgtttaccgctcacagctcaggactgcagccatttcctaatagttttctaagcaggatttcagagcagcatggagagaaaaaaagataatgtatgacatcctgaaggagggaatagagttctggggttaaaaaattacaaagggacacaagataggcagatactgagagtatcactcttaagcacatgggagtatgctgtgattgtgtgacattcacatcttaaaaaggtgccaggctcctcgatttatttcattccaccaggcc

SEQ ID NO: 47390 - DNA, 1643 bp, Homo sapiens
  misc_feature (1)...(1643): n = a,t,c or g
gatgagtggcggagggacagagacccctgtgggtccgtgaggccgccccggggtngtggcagcaagaagagggactccctggggactgcgggctcagcgcacctcattatcaaggatcttggagaaattcattcaaggcttttggatcacagaccagttattcaaggtgaaactcgttattttgtaaaagaatttgaagaaaaacgtggtcttcgagaaatgcgagttcttgaaaatttgaagaacatgatccatgaaacaaatgaacatactcttcccaaatgtagagacacaatgcgggacagcctcagccaggttctccagagattgcaagcagctaatgactcagtctgtagactccaacagagggaacaggaacgaaaaaagattcatagtgaccacttagtagctagtgagaaacagcatatgctccagtgggacaacttcatgaaggagcaacccaacaaaagggctgaagtggatgaagagcacagaaaagccatggaaaggcttaaagaacaatatgctgagatggagaaggacctagcgaaattttcaaccttttaagaacttgaaccacacaatcacaaactaatgagaagatgttcacctctctcctgaaaactattcccaccagaccgtttagcctctgcttcaagcttagcaatatattcagtggcactcttatatcagaagaaagaagtttctactggcattctgattggatatttaaagaagggtgccacatttttccagctttaagtgcctatatatgattatttgaatgaagaggagtaggaaggaaaatggaatcaatatactctttgttagtcagaattgatcatcttttccattgattagctcagagaactgtaggtatagacttcttagaaagataatttcattcatttctatacagggttaacaatagtttattattgtggcttaatgggaaggtatagaagctacctgtcatagcctccttggctgttggaaggatgtataaagtgttactgcatgagtaatgtagacaaaaaaaaaaannnnnntgtccttgnancaaatatcacntttcaaanaggtgaaagngaacncnttgtctntgntgnggcaaaaatggccnccctggtgtttgagctgccttttggaaagcgttgcatattttacagtgcagcataatgccatgggcttccgtggatgggaagacacatgttaagttttgtggccttccagcacttactattttcagctttttaaagcatgcttagaaggaaaagcttaccaaaaatatattttgacatttagtttttccaagaagctgtaatcttgcccatagtatttacctcatttttgtgtctgttttgctgtgggtaagctttataagataaataatgtctatacatgtttccgactgtttaatgagtaatcaacaaaatctgccagagagtccctctggaaccgtataaagttcctggctttgaatgaaccagaagtgtttgcccacacagcaaatggtccatgttaaatgtaaatcctttttagtgttaatgtctgttctcataagcaggtatattatgatgaaacatgtaccagttctgtcatcactgtgatctttaaaaacctgcatttaacagtctaatttg

SEQ ID NO: 47391 - DNA, 884 bp, Homo sapiens
ttttttttttttttggcgtcagatctgtaagtttatttgctcaatgtacgacagctacataatgactcacattcatgatattccatcactgaggaaactgctaaagatggtccgtgtgtgaaataattccttagagaaacacggagctggaaaaataatcactgattagaccttaaaaatagttcactgcataacatgacaaaaagcacaaaggctcattcagagaacatatttgttgttctccaacactgtaatagttataatttcaccatgacaaacaccagacattaagattaagctaacactggtgtttcttttgctcccccccttttaaaaacaaaatatataactgcatgtcactatagcaacatccaaaacagatcaatttgttacaatcactatttggtagagcaaactttacccccaaaaggaaaaattaaattaaaaaaaaaaaacctttaaaaaatttgaagacttaatttttttttgtcataggaatacataacacctacagtataagttaatcaatttcaagctactgtatagaaatacaacactagcatgcacaatattgtatcaatagagtaatggaggagtaatcatttcactggagagacagtatccataggcaagtgcatttctttaaaaataaagaaaagaaaaaccattcaagctgcttaaatatcaagtctcccattccctctccgttttcagccctcaggtgtgatttttatcttgcattattctaaaaagcagccagagccaaagctgaaatttaaaggaaaaataggttttgtaattccagtaaatcatttccaaatgctacaaggaaaaacgcaacactgctcactggacatgaagataaattagggaaagccccacct

SEQ ID NO: 47392 - DNA, 546 bp, Homo sapiens
  misc_feature (1)...(546): n = a,t,c or g
ttttttttttttccaaaacaattaagctatttttatttaacatgtaatagtcataaagcaactccatatatttagttttctgatatcctaatgtatttccacaaaccttttaagtctacaattttatatagttttccatcagggaggcaagatatatataatttctttttatatttaactaaaggttttaagagggcttaggtctctaaatcaggtaacaattaggtcataacaccatacaaacacatttaaatattcagggaaagaggttgttaaggattattgcttaggtcttattaaaatgggtggaattttaaccaaattggatacctctggtaatcttatttatgtttcctattaacatcatactggcttgggccaggtaatgtaagttttgacataatttaaaaattcaagtagttgtaaacaaattctaatttgttaaacaattcatatattccccctttagttactatactacctcagaattaatccccccttaaaaaaggaatcctcccncataggaaaaactgcngagcctccatc

SEQ ID NO: 47393 - DNA, 836 bp, Homo sapiens
cacacatcacttgtaaatgtgaactgtgatactatgaagaggtggaaggctgaagaattcaaaatgttcgccccagaaaatattgtctgctttggtcttgctggttgtacgagcaaagagggtatcatcaaggcacagttcgcagaaatatttctttttaggggcaaggtccttggcttcaatgatccataaacgaagaacattttcagctcagcctgcaattgtccttattaggttgaactgtcctgcgaaggttttccatccacttgtctctctcagaagcagaattacagctgaagcatttacttccacttaagtaggtaacctcaaagcagaagtcttgtccaaggatgctactatgaagtgggtttcactgatacaggttcccctctaccaagatccagacattccactgtgctgcatgggctcagcaaggattcatgggaacgtgactcttttagtttaggcagcccacgagacctgtcatctgtactgcgaagggatggaagccgaaagctcgtgtttctgtcaagctttgactggcttttggtcctcttgatggagcctttcaggcgcttgctgaagaatcctggtactttgaagggtgaggtatttgcagtgtccatggagttgggtttctctgatgtactggtccctgagatactccgtctacgaggggacctttctgctggtacctctggggtctgcatcgtgtgaagtttctgggtgtgctaacatgatctttccggcacgccagtcagaaactcaaaacactttgtatactgtactcgcctgtgctcgctttcctgctctctccctttttgctctcatttcgt

SEQ ID NO: 47394 - DNA, 517 bp, Homo sapiens
gtcaccatgacgtgagcggcaccgacagcccctttaggagacctccaacatttacgacggctctgccttctgtgcagacatggctgtgcagaacttcgtgggagatgcctgtcgcggagccacctgggtcgcccttcacaacggagggggcgtgggctggggtgaggtgatcaacgggggattcggcctcgtgctggacggtaccccggaggccgaggggagagccaggctgatgctcagctgggatgtctccaatggtgtggcccggcgctgctggtcagggaaccagaaggcctatgagatcatctgccagaccatgcaggagaacagcaccttggtggttgacactgcctcacaaggtggaggacgagcgggtgctccagcaggccctgcagctctgagggagccaggagtcgcggcccctgcctcccttcctccctggcgatcctcacctgcccagccatggcacacacccttcctgcacacccgcactacctgcacttctcgcacatcctcc

SEQ ID NO: 47395 - DNA, 1853 bp, Homo sapiens
aaacatggctgcggcccggtttggcccttctttgtaggagagtttcatccgccctgaaatcttcccgatcgttaataactcctcaggtccctgcctgcacagggtttttttcttagtttgttgcctaagagtacaccaaatgtgacatcctttcaccaatatagattacttcataccacattgtcaaggaaaggactagaagaattttttgatgacccaaaaaactgggggcaagaaaaagtaaaatctggagcagcatggacctgtcagcaactaaggaacaaaagtaatgaagatttacacaaactttggtatgtcttactgaaagaaagaaacatgcttctaaccctagagcaggaggccaagcggcagagattgccaatgccaagtccagagcggttagataaggtagtagattccatggatgcattagataaagttgtccaggaaagagaagatgccctaaggcttcttcagactggtcaagaaagagctagacctggtgcttggagaagagacatctttggaagaatcatctggcacaagttcaagcagtgggttataccttggcacctaaataaaagatacaataggaaacgattctttgccttgccttatgtggaccattttctcagactggaacgtgagaaacgagcccgcatcaaagcacggaaggaaaatttagagagaaagaaagcaaaaattcttttaaaaaagtttccacatcttgctgaagcccaaaagtcaagtcttgtctaagatgtctgaactattaaatttaccattttgtttttcttgaatagtctgtgtacaggagtaaatatgttaagtggtttataaagaaattctgtttttagtcaagtgactttactaatcagttgttctaagtgtgaatatggcatgctaattagctaatttggtagaagctaatttgcttctaaaaatcaggtataaagttcagatgagattcccactttataaattctgacatttaagcaggctttaaatgtcacctgctaccttagagtgtgaaggtgatggtaactgccacagcaaaggcaataccgtagtttttgaatttgaataatagttttacctctgttgttaataggctatgaagaggatgtgggtattgctgttaataaacggaggactttgattcaaaataatgagaaatacatttagtccttaaagtagtaatcacagtgcacaacagtccaaaatatatttctggaatggctaatttttatttaattctgtaagcctaaggtaaaaagcataggcagtaacttttactagtcaataaaaagcagttctaccaatccactggtaattaatacactaaacagagttggaaagcattttactgaaagcaaaatatttagagaaaatagacatttatacaaaattataaaatgcttgtaataagaataagtgcatttcaaggaaagcacaaacttaatttatagagccagttaaagctttaaaaaatttaagtggaaattgaaatatgcaaaaatgtataaacattctacaaaagatggtcattcttttcctgagtatactaaagctatgaaacgtaaggtgacaaaaggaaggtagaagcttggggaactctttccccaagggcattttctttctacacactgcttccctccttcttcatattcttgcttggaaatccacatctgttgaaaggtacccaaagaggctagaatggagccgccaatccatgagctaaactgcagttcactgttgtattattgcaatcagtttcaacgcatacttggaggagttttctgagacagctctctattcaacctgtcagtaaaactctgtattagtgtgttgct

SEQ ID NO: 47396 - DNA, 513 bp, Homo sapiens; identical to SEQ ID NO: 2794
  misc_feature (1)...(513): n = a,t,c or g

SEQ ID NO: 47397 - DNA, 479 bp, Homo sapiens
  misc_feature (1)...(479): n = a,t,c or g
tttnnttgannccctaacagctatgacatgattacgaatttaatacgactcactatagggaatttggccctcgaggccaagaattcggcacgagaggaaatagggtagagaacaggctgtctagtcagatgcagcttgatctgtggcaaaaccaagtgtggtctttcagcttcagtgtgttagcatcccagcacctgggatggggtttgtgggcaagttgattttgccacaccgtagggcccaggtggtcccattgccaccgtgaagccaaattctagcccaagtctggtagagcagtcgggcagctagttttcgggggaggatgatgtggtgggacagaggacctcagtggcctattacggagccctcttcccagactaaattcatagccganagctcggggggatggtagagttaaaatttaaaataattttctaaattctgtatttgatattaactgnntaagtggtaatttgccg

SEQ ID NO: 47398 - DNA, 336 bp, Homo sapiens
  misc_feature (1)...(336): n = a,t,c or g
gagcggagggagaagtaggttgcgagctcagcacaggctccggcgctggctcccgcagctgagtttgggagatgtctaagtgatttttttttttttcccgnaaggcaaaggnctgangcgaataccnancccgnttnnntttttcaaatttgggctnagntcttttnttgnnccttgcaactcgggaccaanatgctgnnatgtgtcccnagggaggaattggncagntacncaaccnggatnttaccncagttngnatatnactgaggctttccaangggccaaatntcantggcaacggntgatcaaaggngcanccagggatgatgattcagg

SEQ ID NO: 47399 - DNA, 818 bp, Homo sapiens
ggcaacatcagactcttcttgtggaaggccaagagcggaagctgcttgtcctgcagctgatggctgttctgtgcgagagaatgtctgagcagatattcacaaacgtcactcaggtggtggactttgtagcagcaacattgcagagagcctgtgcaagcctggcccatcaggcagagagcaccgtggaatcacagacgctgagcatgtccatggggctggtggctgtcatgctaggaggagctgttcagttgaagtcaagtgattttgctgttctgaagcagttgttgcctctgttggagaaggtatccaacacataccctgatccggtcatccaagaactcgctgttgatctccgcatcaccatctctacccatggagcctttgccactgaggccgtcagcatggctgcccaaagtacactgaacagaaaagatctggaagggaaaatagaagagcagcaacaaaccagtcatgaaagacccacttgatgtagctcatagccaccttgaacaacagcagagccatgagacagccccccagacaggcctgcagtcaaatgctccaatcattcctcaaggagtcaatgagcccagcactactacaagtcagaaatctggaagcgtaaccacagaacagctccaagaggttcttttgtcagcttatgaccctcaaattccaacacgggctgctgccctgcgtactctttcccactggatagagcagagagaagcaaaagcccttgagatgcaagagaaagcttcttaagatattcttgggaaaacttggaacatgaatgacacttttgtatatctatctgc

SEQ ID NO: 47400 - DNA, 1621 bp, Homo sapiens
ggttgaaaagaattggggtgcagtagttcgctccccagaagggaccccccagaaaatccggcagctgatagatgaggggattgccccggaagagggaggcgtggacgcgaaggacacgtctgccacatcccagtcagttaatggatcaccccaagcggaacaaccttcattggaatctacaagcaaagaagccttctttagcagagtggaaacattttcttctttgaaatgggcaggtaagccctttgagctgtctccactcgtctgtgcaaaatatggctgggtcacagtggaatgtgatatgctcaagtgctctagctgtcaagcttttctctgtgccagtttacaaccagcttttgactttgacagatataagcaacgatgtgctgagctgaagaaagccttgtgtactgcccatgagaagttctgtttctggccagacagcccatccccagaccgatttgggatgttgcccctggatgagcctgctattcttgttagtgaattcctagatcgttttcaaagcctttgtcacttggacctccagcttccttccctaaggccggaggacttgaaaactatgtgcttgacagaagacaagatcagtcttctcctacacttgcttgaagatgaacttgatcaccgaactgatgagagaaaaactacaatcaaattaggctcagacatccaagtccacgtcactgcctgtattctctctgtgtgtgggctgggcgtgtaggctgaaaagagccctggtcccattgtctctcgaactcggagctgggactcttccagtcctgttgaccgtcctgagccagaggtcggtagccccaccaccagaactcgcccagtgacccgaagcatgggaacaggagacacccctggcctggaggtaccatctagccctctgcggaaagccaagcgaggctcgcctctgctcctccagcagttcggacacatcttcccgaagcttctttgatcccacctctcagcatagagactggtgcccttgggtgaatatcacacttggcaaagaaagcagggagaatggtgggaactgaaccagatgccagcgcccccagcagagccagggctggaaagcagtgctgaccatcctcttggcgcacaaacagtctagccagccagctgaaacggactccatgagtctctctgagaaatcaaggaaagtattccgaatatttcggcagtgggaatctctgtgctcatgctgaagatactccagcgccttcctggagatagctggaatgagagtgactttttgaaaaattaaggctgagttcctttcggtcagctgacactaagtttttcctgttctgggttaatcataaggagccccctgccatagcaaaggcagtgagtgtcaactatctgcatctggctgagagagacccgtttcctttcagggatgtggacagggtaagggcagcaagcatggttctgttaaaggagtgtggggttaacagactagaaggaagactaaggacctgaccacccatttcagcatcttcaatgtggagcagtgttctgaggactcttctatcctaggactatgacagtgtgtattaataaaatatttgctaagaaaaaaaaaaaaaaagtc

SEQ ID NO: 47401 - DNA, 1560 bp, Homo sapiens
ctggtggaggacggctcctgtcgatacgcagcccaagaaaacttggaatataacgtggagcctcaagaaatctcacaccctgacgtgggacgctatttctcagagtttactggcactcactacatcccaaacgcagagctggagatccggtatccagaagatctggagtttgtctatgaaacggtgcagaatatttacagtgcaaagaaagagaacatagatgagtaaagtctagagaggacattgcacctttgctgctgctgctatcttccaagagaacgggactccggaagaagacgtctccacggagccctcgggacctgctgcaccagggaaagccacttccaccagtagtgctggttgcctcctacttaagttttaaataccgtgtgctcttccccagctgcaaagacaatgttgctctccgcctacactagtgaattaatctgaaaggcactgtgtcagtggcatggcttgtatgcttgtcctgtggtgacagtttgtgacattctgtcttcatgaggtctcacagtcgacgctcctgtaatcattctttgtattcactccattcccctgtctgtctgcatttgtctcagaacatttcccttggctggacagatggggttatgcatttgcaataatttccttctgatttctctgtggaacgtgttcggtcccgagtgaggactgtgtgtctttttaccctgaagttagttgcatattcagaggtaaagttgtgtgctatcttggcagcatcttagagatggagacattaacaagctaatggtaattagaatcatttgaatttatttttttctaatatgtgaaacacagatttcaagtgttttatcttttttttttaaatttaaatgggaatataacacagttttcccttccatattcctctcttgagtttatgcacatctctataaatcattagttttctattttattacataaaattcttttagaaaatgcaaatagtgaactttgtgaatggatttttccatactcatctacaattcctccattttaaatgactacttttattttttaatttaaaaaatctacttcagtatcatgagtaggtcttacatcagtgatgggttctttttgtagtgagacatacaaatctgatgttaatgtttgctcttagaagtcatactccatggtcttcaaagaccaaaaaatgaggttttgcttttgtaatcaggaaaaaaaaaaattaatgaaccttaaaaaaaaaaaaaaaaggttttgaagggaaaaaaaagtggtttcacacctcttgttattccttagagtcacttcaaggcctgtttgaatgtggcaggttagaaagagagagaatgtctttcatttgaagagtgttggacttgtgtgaaaggagatgtgcgtgttggaatctgcttttccaagccgccaggtcctgacggcagcaggacgaagcctgttgtggcgtcttctgggaaagcctgaccgtgtgttcggacggcactggctcctttacgaagttctcagtaactgagcccagagtaactgcacgccttttgtgcagct

SEQ ID NO: 47402 - DNA, 1399 bp, Homo sapiens
tttttgacgctcacacttagtttttattagccacagtttcccacagttttctacctcctaggaaatacacagctcaccaagggcacccagtcaccattctgtcctgcttgcatggctgacactgttgctcaccgagggtgagcagatctgcaaagtcacccagggcctggtttcctcaggtacagagaaccccaaagaaagaagagccagaacttagagcccctttcttctccatatgggataggacacccaagacaaatgacccatgcatcatgaaacagaggcagggccctaagctgcccaagaggcctgggcacttggagttcctgccaacagccaggccactgaaccattgcctgtccaccctcccacagtggctaatccctggcctagttgtaaatgtcttttcagcgctgcacacttaatgcagtcggatgccttctgattactggtctctgagaccttcagctgctgaggtgcaagaatcaagcatgggcatgaaaggcaaagggctaccacagcagcatcgttctgcctccaccctgggctacgcgacccagcccagcaggctgtgacctaggagagctgctccagcctggggaatgaaggggccctagagcaggatgccggggctaggagtggactgccctgctgatggtcgtttttctgtgaagaagcttttcaacagtagcacctgactgaagctgaccacgaacagggcaaatcgtctcgccaacagaccagtaaagagactcggctattaaggtcttccggctctggccctggtcctgggcctcccgcagccggtaatgcgtctgggagtcaatcaccgttttcagagcctcatggatggtcacgcaggcggactccatctgggtgagagctgtgaccctgttccccatgtctgggagaatgggaggctcatcgcccacttgaaagtcaaaagtagacggtcttgtgagagaaggtggaaaactcattactgaagcaaaactgataaacgcccttgacttcagcccggtacgtgaagctgtcgtactgcttcttcgtttctctgtagatggtgttcccctgggggtcctctacatagcagtcaacatcgtagtggcctccagtgatgacctggtaatccagggagaacttcacgccctgctccacctcctcgtggaagcactgcttggcgttgtccggcagctcgaaggtgagctcggccccgcagggctgctcggcccggcgcaggagcagcagcagaagcagcacggaggcggagcgcgggacagtgctgcccatgatgctctcggtcccgtctcgagggccgcggctcggcgctgcccccggcgggctggggcgacgactaccgaccgggtcctaggaggatgtaaggggataaacgtgcacc

SEQ ID NO: 47403 - DNA, 560 bp, Homo sapiens; identical to SEQ ID NO: 2805

SEQ ID NO: 47404 - DNA, 407 bp, Homo sapiens; identical to SEQ ID NO: 2808

SEQ ID NO: 47405 - DNA, 1824 bp, Homo sapiens
ttttttttttcttttaaaaataatatttaaatttattgtttcacattagtttgaataaagcacaagccaagatggtttaaatatcatttgcagatgtccaagcttctttacaattacaggtcatgggcatcatcaacctagtccttgacttgcagctaaaaaaggcaaaaggtctgtgtgaagtgacagaagagcacaccctactcatgtcatgagcaaggaatcaaagtcgaagaacagtaacagtcttgacatcagcactgtaagaattactctgcagtaaactccaacccagaatggggaagaatactgaattagctgagcacattctggacacaattctgaccaatttcagtctcatgatctctgttggagcaggtttcattctccaattctcttttacagaacagcagaactcgagccttcataaaagtgattaacggcctttccgcttcttcatttttcctccagccaccttgttcctgacaccaatagcaccctctgtgtcatcattatctccagcatcctctcgcgagcgtttcttcttttctccatgctcccttaactccattcgggcaaacctttgggcttcagcgacgcgttctgtcagcatcataacctcatcatcctgtgttggaaaacctggtagtttcttcccaattaagtgttctatgcgctggaagagttccacatcatactgtgtgacaaaagtaatagcctttccggagcgccccagctctagctgttcgacctactcgatggatgtaatccttggaatgggtaggaatgtcaaagttgacaaccacatctacatgaggtatgtccaaacctcggctggcaacgtcagttgctagaagaatggaacgggccttggccttaaacttattaagggatcctaggcgcttactctgactcatttgtccatggagggggatggcagtgaagccaagatttccgccagtagcaaagcctgttctctgggtattattacaggtgcctgccagaatatccataaaggagtttcccagcccaattcatttagaatataaacccaggtaggtatccttgaatttagagggaataaaaatataatattgctgtaatttttcaactgtctggtatttagaggaaacggcacatttcacaggattcttcagagctgctcgctgaagtttttgaaccttcttggtcatggtggcagagaagaggaatgttttccgatctcgaggaatcactttgaggatcttgtcaacctctgtctcaaaatccatattcagtattcggtcggcttcatccatgaccaagtatttgagagctctcaagttgaaacctttcgtattttccaagtggtcaatcagtcgaccaggagttgctattattatatgtggtttttttgcaagggccaaagattgagacattgaatcaattccacctacaatcacagcactctgcactccaatagaggaccccagggcttcaaactgctctgagatctgaaaggccagctcccgagtcggggtaagaactagggcaaacaaacgctgcggggtctccagcagtgcgtttagaatgggcaaagcaaaggcgcctgtctttccagagccagtttctgcaagcccaatgatatcacgaccttgtaaggccaaaggaatagcttcaatctggatcttggtgggttttgtccatcccaactggtcacaagcttcacacaacacatctgtcacacccaggtctttaaatgttttagtttcctcctcttccacaatcggctgggacgcttcggtcggagaatcgtgttcctcgggtgccgccatcttgtgtgag

SEQ ID NO: 47406 - DNA, 1860 bp, Homo sapiens
ttttttttttttcccttttttgcggacagtaaaccgtttattactgtgtggacacagacaccgtggtgcatgacagacagtttcaacaccatgagcgctggggacggagctgtgcctggacagctctgcggtgtgtggtggcgccacgcttgggccggctgtcaccgccagctgaggcgctaacagcgtcacctgggagaaaacctggaaaccgtctaatgaagcaggtgacttaggggcgtctctagaaacccaaagaaatgtaccttaaataagcaaatataaaacacaaaaaagacgagcagacctggtgttccgtgtcaggcagaatctaaaaaaacccaggagttgcacttggtttcctcactgtcatgtgtgatcacaggtcaggacgtttcacagcagcgcgcccaggctcctgtgcgtgctctggtgcactggagtctggggctggctgggcttctggctgtcctctgtcgccgggatgggctcgacgaatcagcgcagccgcggcccgggccccttacgtggtgctgatcccactcagctcctgcctgatggcgtcgatgatctcctccttcaccttgtggagctctctcaccacctcctctaggatctcctgcttcatccggtccaagtcgaaggcatccagggccatgtcattcacgctcccagcaggcttcatcctagagtgaggctgcgactgaagggggctcttagcttcggggctctttgccacagacggggttctggacagaatcgaggacacaggcttctccaccgagttgctccgctcccagggcttccggccagcctctgaggagttaggtggctggctggctgctcgggtccccggaagagggggaggtactaggatcttccatttggctttcatcttccttcttctcggctggcttgtctgactgggaggctgcttttctcctcttggccagcagtttgttcatttcctccatgaggcctcctccgccacccccgctgccttgcccggttggccaatcggactttgaggtcccactgggactggagcctccagatgcgtcttcctggccgttggactcttctcagcttggcccccagctaatggcaagcggccagtcctgaacatggaagctctcgtcgtggctggaccccctgggcttcctccggctggcaagtgggggtgggggaggtggggtaagccccagtgggtggaggtgggactgggggtggagggggcggtggaggcccactacatgagacgggggcgctggctgcagatgaaggatgtcctggtgggaggatgggccctgtggccgaggttcttctttctagagattcctgacgctgctgctggtgctgctccatcacttgtcttctctggatgtcaatctcatcaggagaggggccattctgcacctgacgctggctggaggggcctccttcttgggaattcatgatgttcagggcaaacagcattgcattggagaacgtggttgcctcttctttacttgcaaagtttaagccgtagacctggcgggcatctcgccactggtggaaggttggcgtggcctgattgtacttcagccctttcacgattgaataattgatcacaacctgctgatcctgcaacttgactccaacgactctgaaggtgttgctggcagtgttgtggtagatgttgatccggctgaatccctgctggccaggtttgattggtacccatttcttactggtgtcatcgtagaccatcacggaagcccgggcttggcagatactctgttcacttgtggccatggctgaaaagtggcagcacagggaaccctgaggaggcgagtcctgtactcccaccagcctatgttg

SEQ ID NO: 47407 - DNA, 8611 bp, Homo sapiens
gtgctgtacgtccaagatggcggcgcctgtaggctggagggactgtgaggtaaacagctgagggggaggagacggtggtgaccatgaaagacaccaggttgacagcactggaaactgaagtaccagttgtcgctagaacagtttggtagtggccccaatgaagaaccttcagaacctgtagcacacgtcctggagccagcacagcgccttcgagcgagagaatggcccaacaagcaaatgtcggggagcttcttgccatgctggactcccccatgctgggtgtgcgggacgacgtgacagctgtctttaaagagaacctcaattctgaccgtggccctatgcttgtaaacaccttggtggattattacctggaaaccagctctcagccggcattgcacatcctgaccaccttgcaagagccacatgacaagcacctcttggacaggattaacgaatatgtgggcaaagccgccactcgtttatccatcctctcgttactgggtcatgtcataagactgcagccatcttggaagcataagctctctcaagcacctcttttgccttctttactaaaatgtctcaagatggacactgacgtcgttgtcctcacaacaggcgtcttggtgttgataaccatgctaccaatgattccacagtctgggaaacagcatcttcttgatttctttgacatttttggccgtctgtcatcatggtgcctgaagaaaccaggccacgtggcggaagtctatctcgtccatctccatgccagtgtgtacgcactctttcatcgcctttatggaatgtacccttgcaacttcgtctcctttttgcgttctcattacagtatgaaagaaaacctggagacttttgaagaagtggtcaagccaatgatggagcatgtgcgaattcatccggaattagtgactggatccaaggaccatgaactggaccctcgaaggtggaagagattagaaactcatgatgttgtgatcgagtgtgccaaaatctctctggatcccacagaagcctcatatgaagatggctattctgtgtctcaccaaatctcagcccgctttcctcatcgttcagccgatgtcaccaccagcccttatgctgacacacagaatagctatgggtgtgctacttctaccccttactccacgtctcggctgatgttgttaaatatgccagggcagctacctcagactctgagttccccatcgacacggctgataactgaaccaccacaagctactctttggagcccatctatggtttgtggtatgaccactcctccaacttctcctggaaatgtcccacctgatctgtcacacccttacagtaaagtctttggtacaactgcaggtggaaaaggaactcctctgggaaccccagcaacctctcctcctccagccccactctgtcattcggatgactacgtgcacatttcactcccccaggccacagtcacaccccccaggaaggaagagagaatggattctgcaagaccatgtctacacagacaacaccatcttctgaatgacagaggatcagaagagccacctggcagcaaaggttctgtcactctaagtgatcttccagggtttttaggtgatctggcctctgaagaagatagtattgaaaaagataaagaagaagctgcaatatctagagaactttctgagatcaccacagcagaggcagagcctgtggttcctcgaggaggctttgactctcccttttaccgagacagtctcccaggttctcagcggaagacccactcggcagcctccagttctcagggcgccagcgtgaaccctgagcctttacactcctccctggacaagcttgggcctgacacaccaaagcaagcctttactcccatagacctgccctgcggcagtgctgatgaaagccctgcgggagacagggaatgccagacttctttggagaccagtatcttcactcccagtccttgtaaaattccacctccgacgagagtgggctttggaagcgggcagcctcccccgtatgatcatctttttgaggtggcattgccaaagacagcccatcattttgtcatcaggaagactgaggagctgttaaagaaagcaaaaggaaacacagaggaagatggtgtgccctctacctccccaatggaagtgctggacagactgatacagcagggagcagacgcgcacagcaaggagctgaacaagttgcctttacccagcaagtctgtcgactggacccactttggaggctctcctccttcagatgagatccgcaccctccgagaccagttgcttttactgcacaaccagttactctatgagcgttttaagaggcagcagcatgccctccggaacaggcggctcctccgcaaggtgatcaaagcagcagctctggaggaacataatgctgccatgaaagatcagttgaagttacaagagaaggacatccagatgtggaaggttagtctgcagaaagaacaagctagatacaatcagctccaggagcagcgtgacactatggtaaccaagctccacagccagatcagacagctgcagcatgaccgagaggaattctacaaccagagccaggaattacagacgaagctggaggactgcaggaacatgattgcggagctgcggatagaactgaagaaggccaacaacaaggtgtgtcacactgagctgctgctcagtcaggtttcccaaaagctctcaaacagtgagtcggtccagcagcagatggagttcttgaacaggcagctgttggttcttggggaggtcaacgagctctatttggaacaactgcagaacaagcactcagataccacaaaggaagtagaaatgatgaaagccgcctatcggaaagagctagaaaaaaacagaagccatgttctccagcagactcagaggcttgatacctcccaaaaacggattttggaactggaatctcacctggccaagaaagaccaccttcttttggaacagaagaaatatctagaggatgtcaaactccaggcaagaggacagctgcaggccgcagagagcaggtatgaggctcagaaaaggataacccaggtgtttgaattggagatcttagatttatatggcaggttggagaaagatggcctcctgaaaaaacttgaagaagaaaaagcagaagcagctgaagcagcagaagaaaggcttgactgttgtaatgacgggtgctcagattccatggtagggcacaatgaagaggcatctggccacaacggtgagaccaagacccccaggcccagcagcgcccggggcagtagtggaagcagaggtggtggaggcagcagcagcagcagcagcgagctttctaccccagagaaacccccacaccagagggcaggcccattcagcagtcggtgggagacgactatgggagaagcgtctgccagcatccccaccactgtgggctcacttcccagttcaaaaagcttcctgggtatgaaggctcgagagttatttcgtaataagagcgagagccagtgtgatgaggacggcatgaccagtagcctttctgagagcctaaagacagaactgggcaaagacttgggtgtggaagccaagattcccctgaacctagatggccctcacccgtctcccccgaccccggacagtgttggacagctacatatcatggactacaatgagactcatcatgaacacagctaaggaatgatggtcaatcagtgttaacttgcatattgttggcacagaacaggaggtgtgaatgcacgtttcaaagctttcctgtttccagggtctgagtgcaagttcatgtgtggaaatgggacggaggtcctttggacagctgactgaatgcagaacggtttttggatctggcattgaaatgcctcttgaccttcccctccacccgccctaaccccctctcatttacctcgcagtgtgttctaatccaagggccagttggtgttcctcagtagctttactttcttcctttcccccccaaatggttgcgtcctttgaacctgtgcaatatgaggccaaatttaatctttgagtctaacacaccactttctgctttcccgaagttcagataactgggttggctctcaattagaccaggtagtttgttgcattgcaggtaagtctggttttgtcccttccaggaggacatagcctgcaaagctggttgtctttacatgaaagcgtttacatgagactttccgactgcttttttgattctgaagttcagcatctaaagcagcaggtctagaagaacaacggtttattcatacttgcattcttttggcagttctgataagcttcctagaaagttctgtgtaaacagaagcctgtttcagaaatctggagctggcactgtggagaccacacaccctttgggaaagctcttgtctcttcttcccccactacctcttatttatttggtgtttgcttgaatgctggtactattgtgaccacaggctggtgtgtaggtggtaaaacctgttctccataggagggaaggagcagtcactgggagaggttacccgagaagcacttgagcatgaggaactgcacctttaggccatctcagcttgctgggccttttgttaaacccttctgtctactggcctccctttgtgtgcatacgcctcttgttcatgtcagcttatatgtgacactgcagcagaaaggctctgaaggtccaaagagtttctgcaaagtgtatgtgaccatcatttcccaggccattagggttgcctcactgtagcaggttctaggctaccagaagaggggcagctttttcataccaattccaactttcaggggctgactctccagggagctgatgtcatcacactctccatgttagtaatggcagagcagtctaaacagagtccgggagaatgctggcaaaggctggctgtgtatacccactaggctgccccacgtgctcccgagagatgacactagtcagaaaattggcagtggcagagaatccaaactcaacaagtgctcctgaaagaaacgctagaagcctaagaactgtggtctggtgttccagctgaggcagggggatttggtaggaaggagccagtgaacttggctttcctgtttctatctttcattaaaaagaatagaaggattcagtcataaagaggtaaaaaactgtcacggtacgaaatcttagtgcccacggaggcctcgagcagagagaatgaaagtcttttttttttttttttttttttagcatggcaataaatattctagcatccctaactaaaggggactagacagttagagactctgtcaccctagctataccagcagaaaacctgttcaggcaggctttctgggtgtgactgattcccagcctgtggcagggcgtggtcccaactactcagcctagcacaggctggcagttggtactgaattgtcagatgtggagtattagtgacaccacacatttaattcagctttgtccaaaggaaagcttaaaacccaatacagtctagtttcctggttccgttttagaaaaggaaaacgtgaacaaacttagaaagggaaggaaatcccatcagtgaatcctgaaactggttttaagtgctttccttctcctcatgcccaagagatctgtgccatagaacaagataccaggcacttaaagccttttcctgaattggaaaggaaaagaggcccaagtgcaaaagaaaaaacattttagaaacggacagcttataaaaataaagggaagaaaggaggcagcatggagagaggcctgtgctagaagctccatggacgtgtctgcacagggtcctcagctcatccatgcggcctgggtgtccttttactcagctttataacaaatgtggctccaagctcaggtgcctttgagttctaggaggctgtgggttttattcaactacggttgggagaatgagacctggagtcatgttgaaggtgcccaacctaaaaatgtaggctttcatgttgcaaagaactccagagtcagtagttaggtttggtttggttttggacatgataaacctgccaagagtcaacaggtcacttgatcatgctgcagtgggtagttctaaggatggaaaggtgacagtattactctcgagaggcaattcagtcctgggcaaaggtattagtacaataagcgttaagggcagagtctaccttgaaaccaattaagcagcttggtattcataaatattgggattggatggcctccatccagaaatcactatgggtgagcatacctgtctcagctgtttggccaatgtgcataacctactcggatccccacctgacactaaccagagtcagcacaggccccgaggagcccgaagttctctgctgtgcagcatggaattcctttaaaaaggtgcactacagttttagcggggagggggataggaagacgcagagcaaatgagctccggagtccctgcaggtgaataaacacacagatctgcatctgatagaactttgatggattttcaaaaagccgttgacaaggctctgctatacagtctataaaaattgttattatgggattggaagaaacacatggtcatgaatagaaaaaaaacaaacccaaaggtaggaaggtcaaggtcatttcttagatggagaagttgtgaaagatgtccttggagatgagttttaggaccagcattactaaggcaggtgggcagacagtgacctctctaggtgtgtccacagagtttttcaggagagaaaactgcctgacctttgggactaagctgcggaatcttcttactaagcttgaagagtggagaggcgagaggtgagctactttgtgagccaaagcttatgtgacatggttggggaaacagtccaaactgttctgagaaggtgaactgttacgacccaggacaattagaaaaattcacccaccatgccgcacattactgggtaaaagcagggcagcagggaacaaaactccagactcttgggccgtccccatttgcaacagcacacatagtttctggtatatttgttgggaaagataaaactctagcagttgttgaggggaggatgtataaaatggtcatggggatgaaaggatctctgagaccacagaggctcagactcactgttaagaatagaaaactgggtatgcgtttcatgtagccagcagaactgaagtgtgctgtgacaagccaatgtgaatttctaccaaatagtagagcataccacttgaagaaggaaagaaccgaagagcaaacaaaagttctgcgtaatgagactcaccttttctcgctgaaagcactaagaggtgggaggaggcctgcacaggctggaggagggtttgggcagagcgaagacccggccaggaccttggtgagatggggtgccgcccacctcctgcggatactcttggagagttgttcccccagggggctctgccccacctggagaaggaagctgcctggtgtggagtgactcaaatcagtatacctatctgctgcaccttcactctccagggtacatgctttaaaaccgacccgcaacaagtattggaaaaatgtatccagtctgaagatgtttgtgtatctgtttacatccagagttctgttgacacatgccccccagattgctggcaaagatcccaagggcattgattgcacttgattaagcttttgtctgtaggtgaaagaacaagtttaggtcgaggactggcccctaggctgctgctgtgacccttgtcccatgtggcttgtttgcctgtccgggactcttcgatgtgcccaggggagcgtgttcctgtctcttccatgccgtcctgcagtccttatctgctcgcctgagggaagagtagctgtagctacaagggaagcctgcctggaagagcccgagcacctgtgcccatggcttctggtcatgaaacgagttaatgatggcagaggagcttcctccccacttcgcagcgccacattatccatcctctgagataagtaggctggtttaaccattgggaatgggaccttttcagtgggaaaccctgagagtctgagaacccccagaccaacccttccctccctttccccacctcttacagtgtttggacaggagggtatggtgctgctctgtgtagcaagtactttggcttatgaaaaaggcagccacgcattttgcactaggaagaatcagtaatcacttttcagaagacttctatggaccacaaatatattacggaggaacagattttgctaagacataatctagttttataactcaatcatgaatgaaccatgtgtggcaaacttgcagtttaaaggggtcccatcagtgaaagaaactgattttttttaacggactgcttttagttaaattgaagaaagtcagctcttgtcaaaaggtctaaactttcccgcctcaatcctaaaagcatgtcaacaatccacatcagatgccataaatatgaactgcaggataaaatggtacaatcttagtgaatgggaattggaatcaaaagagtttgctgtccttcttagaatgttctaaaatgtcaaggcagttgcttgtgtttaactgtgaacaaataaaaatttattgttttgcactac

SEQ ID NO: 47408 - DNA, 1073 bp, Homo sapiens
gaatttggaggatggttagctgttaccttggtacagatataaatgaatttttctctataaagagatcttaataatggactttggacttataaacacaggagaataaggagacttataaacccagtgaattccttgtgcaagattcctggcatagcttctgctcaagtacttctgtgctgaagcacgatgcctatagcagcccattcagttagtagagagaatctgttagaattcatattgggataaaatcctattccccgaaacatccatttgtctggatttttcttctaagcaatacggtatgattccagttaccttgtctatagattgagaagccttgcttcttatgatggtttccagagaaaccatttatggttgtggctcgctcctctgggatatcctccctgtaacgttagtgtctctctttaaaaacagagcccagttcccttaggagtacgtaggcattaatttttgatttgggatgtgggacatatttatcatttcctgttattacaggatggagatctagtttcaggcctttatgaaagcatttatctcctgtatgacataggttctctgatcctgtttctttaacataattggatagtgaaaatatattctacttgatagtctcaaatgaagaacatctgtatataaggagtatatgaaataccatgactgttgatcatgctgagaggcctttagcataggggagtgtgtaacataccatgactattgataacgctaagaggcatttagcataggtgatttttttgactcattctacctaccacctacaaatcgtaaccaacctgtggaagccagcgtcccatcttatccttatgtagtagggggagtaataaatgttttcaacctattatttatgtaagtaagcccccttaggagcagctattatttgggtaacacagaggaattagataggggaagcacaagattttttttttattttgacagtctcactctgttgcccaggcaggagtgccagtggccatgatcctggctcactgcaacctccacctcctgggttcaaggaattctgctcggccttcaaa

SEQ ID NO: 47409 - DNA, 516 bp, Homo sapiens
aatttaatacgactcactatagggaatttggccctcgaggccaagaattcggcacgagcagaagcagctaagctaaaggagaaatatgaaaaggtacagtgtcatcttttttaaagccgtggataagactaggtataggtaataactgtagaaaacctgggaaatttagttaatcttgtattaatggttgtcagctatgttttgaaaaggcctaatgaaaattgtacacttcaacacaaggtaattgaaaccttccttttgactgaaaccagtgtttgtagcactagtatattcctgcagacagacttgtagttacttgtagttattgtatagtctgtatagtctgttatttttttttttaagcagagagtcaaagaaattgttttatgtagatatatataaaatgtgaaggtacaggagggactatggcactgtgtgtgatgtaaaagggtattggtagtgaaagtactgatactgctgtatcgcaacccttgtcattttacgtcattaacttgg

SEQ ID NO: 47410 - DNA, 318 bp, Homo sapiens
ggaaaatgtgctttgctagggttttggtttgtttgtttgtttgtttttcagataagggtctcactatgttgcccaagatggctgcaaactcctgggctcaaaggatcctcctacctcagtctcccaattagctgggactacaggcatctgccaccacgtctggctataggagctgtgtttttaatttttgttttaatgagaacatgtttaaggtagtttgctgaccctatcagtttgtctttcgaatgacagcaaagaaattaacttcatatcttgataagtttattataaatggtcgacatctgcttgacacaattt

SEQ ID NO: 47411 - DNA, 1762 bp, Homo sapiens
ctcactcaccagcaggcccgggaggtcaagcgggaggccctggagtgcagcctcaagttcgtcggcttcattgtggtctcctgcccgctcaaggctgactccaaggccgtgatccgggagatccagaatgcgtcccaccgggtggtcatgatcacgggagacaacccgctcactgcatgccacgtggcccaggagctgcacttcattgaaaaggcccacacgctgatcctgcagcctccctccgagaaaggccggcagtgcgagtggcgctccattgacggcagcatcgtgctgcccctggcccggggcttccccaaaggcactggccctgggagtacgcactgtgccttcacaggcgaacggcttggcccacctgcaggccaccgacccccagcagctgctccgcctcatcccccatgtgcaggtgttcgcccgtgtggctcccaagcagaaggagtttgtcatcaccagcctgaaggagctggggctacgtgaccctcatgtgtggggatggcaccaacgacgtggggcgccctgaagcatgctgacgtgggtgtggcgctcttggccaatgcccctgagcgggttgtcgagcggcgacggcggccccgggacagcccaaccctgagcaacagtggcatcagagccacctccaggacagccaagcagcggtcggggctccctccctccgaggagcagccaacctcccagagggaccgcctgagccaggtgctgcgagacctcgaggacgagagtacgcccattgtgaaactgggggatgccagcatcgcagcacccttcacctccaagctctcatccatccagtgcatctgccacgtgatcaagcagggccgctgcacgctggtgaccacgctacagatgttcaagatcctggcgctcaatgccctcatcctggcctacagccagagcgtcctctacctggagggagtcaagttcagtgacttccaggccaccctacaggggctgctgctggccggctgcttcctcttcatctcccgttccaagcccctcaagaccctctcccgagaacggcccctgcccaacatcttcaacctgtacaccatcctcaccgtcatgctccagttctttgtgcacttcctgagccttgtctacctgtaccgtgaggcccaggcccggagccccgagaagcaggagcagttcgtggacttgtacaaggagtttgagccaagcctggtcaacagcaccgtctacatcatggccatggccatgcagatggccaccttcgccatcaattacaaaggcccgcccttcatggagagcctgcccgagaacaagcccctggtgtggagtctggcagtttcactcctggccatcattggcctgctcctcggctcctcgcccgacttcaacagccagtttggcctcgtggacatccctgtggagttcaagctggtcattgcccaggtcctgctcctggacttctgcctggcgctcctggccgaccgcgtcctgcagttcttcctggggaccccgaagctgaaagtgccttcctgagatggcagtgctggtacccactgcccaccctggctgccgctgggcgggaaccccaacagggccccgggagggaaccctgcccccaaccccctcacagcaaggctgtacagtctcgcccttggaagactgagctgggacccccacagccatcccgtggcttggccagcagaaccagccccaagccagcacctttggtaaataaagcagcatctgagattttaaaaaa

SEQ ID NO: 47412 - DNA, 835 bp, Homo sapiens
cggacgcgtgggtggcaccggacccctggttctccacatacgattctacttgtcaaattgcccaagaaattgctgagaaaattcaacaacgaaatcaatatgaaagaaaaggtgaaaaggcaccaaagcttaccgtgacaatcagagctttgttgcagaacctgaaggaaaagatcgcccttttgaaggacttattgctaagagctgtgtcaacacatcagataacacagcttgaaggggaccgaagacagaacctcttggatgatcttgtaactcgagagagactacttctggcatcctttaagaatgagggtgccgaaccagatctaatcaggtccagcctgatgagtgaagaggctaagcgaggagcacccaacccttggctctttgaggagccagaggagaccagaggcttgggttttgatgaaatccggcaacagcagcagaaaattatccaagaacaggatgcaggccttgatgccctttcctctatcataagtcgccaaaaacaaatggggcaggaaattgggaatgaattggatgaacaaaatgagataattgacgaccttgccaacctagtggagaacacagatgaaaaacttcgcaatgaaaccaggcgggtaaacatggtggacagaaagtcagcctcttgtgggatgatcatggtgattttactgctgcttgtggctatcgtggttgttgcagtctggccgaccaactgatggcagtaaagagaccaccagcagtgacacctggcaatgacagatgcaagcccaacacccttttggtacgcaaaacctgctctcaataaattcccccaaagctctgaaaaaaa

SEQ ID NO: 47413 - DNA, 415 bp, Homo sapiens
  misc_feature (1)...(415): n = a,t,c or g
gcacagagctccccttgctgcccagacaagctgaaggaccacaggaaaagccatggagacttcagcatcctcctcccagcctcaggacaacagtcaagtccacagagaaacagaagatgtagactatggagagacagatttccacaagcaagatgggaaggctggactcttttcccaagaacaatatgagagaaacaagtcttcttcctcctcctcctcttcctcctcatcctcctcatcttcttcatcctcctcctcctcaggtcctgggcatggggagcctgacgttttgaaggatgagcttcaactctatggagatgctcctggagaggtggtaccctctggggaatcaggactccgaaggagaggctctgacccaacaagtggagaantggagggctctcagttaagaaga

SEQ ID NO: 47414 - DNA, 673 bp, Homo sapiens
gcccagacactggagtcatagacaggaaacagccactggacaccctgaagagctaccgcctgtgtgatccttctgagagggaattgtacaagttgtctccactttttgggatctattattcagtggaaaaaattggaagcctgagagttggcgaccctgtgtatcggatggtgtagtgatgagtgatggatccactagggtgatatggtaaagggtcagctttgcttctgaatacgctgtcttgaagccattgctgcattttcttgtgttaattttttttatgttatgctgctttaattcttgagagaatgaacagttttatattctgatctttggagttggaaaatgcccttaatttctgttccctgcagtaatttgtgtactcctacctcagccttctccacccctatttcccatttaatggtaaaatgctgatggaagaggcctcagcagaaagacaggtatatgttcacagctcattacagaatatcattaaggaatagggaaatgaaggtgattgattctcagagttatgtacattctcagagttatgtatttattttttctgtctcagatagaagggaaaatgtttaaattattcaacatcagcttgggaaatgtttaaattgaatgtcttttatcaaatgtatttttaaagtataattgaagtttg

SEQ ID NO: 47415 - DNA, 1464 bp, Homo sapiens
ctagtctcgagtttttttttttttttttttcaggatccacaaatggtttattgattccaagtcgccacacagggtacattcagcagtcactgcgcctgcagtcggcgacagtttaatgtgaggcaattaccgctacagacatcttgcttcatcttaaaaaaataaaaattttcaaagcatctcacaggccaaagagctaagcaggaccctcactcagacattcaagagtgtttccgaggaaaactcgaggaggaggcagcgtggaacatcttcccatggccacggccccggcacagagctcagatgcctgcgggaagcggcccctccacctgcggaagggaagacgatgcctgttggagccgcacggaagcatccagaactctgaggccctgggggccggcctgcggtcagtgcaaggctgctgacatggtgtgacctcttgcaacggggtgggggcagagcgtgcggtgacaagggtcagactggcggctcccactgcagccagaagtgagggagccagcacacgggggtgggcagtggacaggacaggatgcggcaggccccagtaccccccactcaggaatttgcttcaggccaaaagcccagggcagcagggtaaggcgccatcggccaggacctgcacggcaggggcagccccctccactccctggacccgagaccgtctctctcctggaagatggacatcaaaactgcatccggaggtgcagtctgcacccagaaggaaggggatctccgccagcagagcccaagagtggcgtgcagactgcatgtgcacagcctcagcccggccccctcagccattgcccatgagggcctccacgttgtctgatggtcgctggcatctgccacgtccccaaggactcgaggagaaccagaggctgacaagagcagcatgagctagccctggcgatgctcagccgggctggacacagcggatccacaaggcgttcaggcctcgcagccactccaaaggcccaggaaacaccgactgtcagaaaacccggagcacggtgaccctgcgtccgcacagccgcctttccgtgtgtaccaggcagagaaagccccagccctcccccgtgccagacccctgggtagcagaggccaccccagtccaagcagggtgtctggccagggtgtcacggggtcgagggctccgctcacaggccttacagggtctcctgcggtcaccccagcttcaaggttcgcggctgctggcccgtgtgtccacctggagcaggttcctgcaggccgcccaatgtgtaccttgggctcagacggtgtttcataagaggaaatggggaaaacacttgctttttatgtcatcctaaaaacatccaaaaccctcggggccagatcaaccctggctgtccccgctgagcacaaacagcgtcccagccccacccccactgcccaccctgagacaccccacagaggctgatggag

SEQ ID NO: 47416 - DNA, 592 bp, Homo sapiens
  misc_feature (1)...(592): n = a,t,c or g
atcaatttgcacagcaagtattatctcctgataagatgctggtgaatgcaggggagtgagattcattgctcatctttggatatgaagtctgttagggaagaaacagtgccactattcccttagatgcaacagtagcatagcctcttcacccaggcgtcccaaaagcttggcgtgaagatttcagcaaacatgtcttacaacatgaggaggaggagtctaaatcagtcaggggataaaagtatcgaatcattgacaacacacacttggctttagttcttaggagggttttgtttttgtttttgtttttaggttgaagattttcttttaatattcagttttttgaaaaaaaaatggatctacactgttaactgattgagactccactgtgattcacttgtttacttaaaaacttttcagggatgtctgtaaatttcagtgttaatatgtcatgaaaagtggtgtggattgatctaaggagggaccagaaataatttttgctattccaaatactgaaggaaaaagataattgatttatactatgttttaaaaaaaaaaaangggnggccgttttaaaggntccctcgnggggccg

SEQ ID NO: 47417 - DNA, 1389 bp, Homo sapiens
ttttttttttttggagtcaaaactctttattgtcctgcccagggagcccttcccaaaggaatccacagagcaggggggcgaggcgggcggcacagggccttggtgacaacgtgaagggggagctggagttaggtgggggacagccccttcagctccctgatggcactggctgtgctggcaggccacccaggggagccatcaccagcatgaggtccacacctggggctggggctgagtgctgtctacactgctctgtctggaggatgccagatgggcacacatgtcccccagggcagctgccggcaggagtctgacaaagggacccagccagcccctctggaccattctagaggccagtggtgaaggtcctgaagcaacttggcttatagagacacgttatgtgtacccggtgcaccccatgctgggaccagctctggtcccaggagccaccttgacaggtgagcccaaatgtcctcctctccccatactgggcactgggctgaggcaggaccccagcaggttgtggcgggacaagctctacagcgggaagccaaagcctttcaacagaagaacaaaggggcttccaaggccggagtcaaaggcctggggaggaggggacagggtgcttctgagaggcagggagacaacaaacccccacttcatgctggtcctcagtccttccatcctgccagccccgacccccggtccacaacagcaggcccaaccctgccttttggggtgaggagaaaaaaatctggaaccaaaagggatggcggctgtttcctcgggaccctggtgggtgtggggccaccgagcagccatcaccggaggttaaagaccaggctgacggtgaggatgatgcccaggagaaggatgaagggcagccaggtcttcacgaaggccccaacgctgacgtacttcccgtagagcaggcagaagaagcagagcgtcaccataatcccagttggtgctgttgttgtagcgcatcaagattccagggccaatgccacgtgcgagtggcagttgtcacagcagagattgtgcatgcggtgcttgtactcctcagaggcgtcgtgcacagccgtgtcccatgcgttgggcccgctagcatagacctgagcagggtccaacttccagtacttggcaggctttccaaaggccatgttgtcctctgagacaaagtaggggcccgcgaagtcccgaatgactcctgtggatgtgcagatgcccatgtggccgatgatggggaaaaaccacgtgagcaccgggatgggcgtccacaccacgcagtaggggaagcgactccgttccacatccatggcgacgccgccggagccttgatattgcttcatgtccgtctcggccgccgtcggcgcctccacttccgcc

SEQ ID NO: 47418 - DNA, 1862 bp, Homo sapiens
ttttttttttttttatattaaaagactttattcacaatagagaaattttacaaatataatttttaaaaattatgtgtcaatctattgtttcccataacattggagatttatatataaagttgaaaatgacagaatggatttatgtaaaaataaaaaacaatcaatgtacacaatgtgtagctcatatgaaaacctcatgacaagtcattgagttctgtaaactgccatacaacttacatgtgtaatattaattgcacaaagtatatcaagacatattgaagaaacacaaaattaagtgctattttaacggttcatctttcagtatgtgaatacgtatacaaatttaactgcacagttttgttgaaaataagtttcaacaataagacttcagttgttaaaattaacccaaaatataactttaattaaattacatcactacaatattaatctcttatcttgtttacatttttggtgttttgggacttttgttaaaaaaaaatccaagttctagaattgcaaaaacttcattgttgccactgagagagcaacatatagtacagcttcttgtctattcacaccaggacaccaaggtacctcatagtgcagtgtgtacacacaacctgattttaatattctatctgctgcagaaatacttatcagctttcaaatcaaagtgaaaagaaaatgagttaatttaaatggcaaattcaaggacatttatacaaacattatattcttaattttggcaataatttttaatattttgccttaaagtcctgggaacaaagggctcttgctatccattcatttcattaggtgaactgaagatatgagtgggagaagttattctggatcacagacacacattagcatggaaataatgatgtacggaagagtctttttcatttactaattttactaatttattctttgacatacaccaatgtatgatattgaaaaacagaaagcaggtcataaagatggtcctgtccgataaaggaaatcttttaaaacactttcaaaagctaaaataactaaaactattaagcctattgatagctaagaaaataattgtcttcaataatattaggtggaaccatatgaaactgctgacagtttttaaactacaaatgcagcaatttcatatgtttcagcctaatccatggggttgtactgatctttctgaccattctcggctgaaaattgacatggtcaaagtccttgcccttcagtatatgcatcgtattagccctttcatggaagtatatctacataaatatatatgtatatatagtgggccaatgtaagcaaacacaaggtatcacaccaaatctattcttgagaaaaccattcctatttcaaacttaatgtttaaaagaatcatatattgattttgatttactccaggactgtgggggatggggagtggccatttctttatatttcttctaagttgtgatctctgtgttgactataaccatactaaatatgctatattcttatttggcctaaaatttattagattttccttgattgatcacgaataagtaaaattggcaaagcttctttcagagtcaaatcctgctttcacaaactgaaaggaaaagatttactacatctgagatagagcctttttcaaatctgagaaatctgaaccaaatagaatgctttattttccaaagaggggaatcaagatgaaatacagacaagtgaactaaaagccatatgaaataccctctctttagacagacccaatttcttcatatattcagttaaacccagaagctaatccattaagttgtactattgtcttcagagaaatgtaagtcagtgatagcagagctctgcaaaatttgaaagct

SEQ ID NO: 47419 - DNA, 892 bp, Homo sapiens
tttttttttaatttcactccttcatgactgtcacatggacaaaatgaaactaaacttaaatcataactaaaaaaaccaccaactatatttttgaagatttttctaattcttgccactcaaaggacaacattttccacaccggtttgtatgttatccttttggtcattgtcttctgaaccaatgaaatgttgattctccaagggatttgagttttcgtggcacacgtcacctattttctcctgctgacttgggcttttgaataagtgtttcttttggtgcattccaagggcagcagctgttttgcaaattttgggggcactggaagcaggcatagcccttcccattatgctcccgaatatgcctctgctcgtgattccttttggtggagagatacaaaaatctctgaaagcagaactgacagtggtaacgcttttctccagtatggattctttcatggattttgagggtctcattcaaggtgaatgccttgttgcaatactgacagacgaactccttcaagcccaggtggatgcgttcatgtttctgtaagtttccttgcaccgaaaagcaccgtccgcaggtcttgcactggtatggcttctccccggtgtgacatctcatgtgcattttgagtgtggaagggctctggaactgcttggcgcagagctcgcaggcatatggccgagaagtaagatgtcggtggggccttccttggtttccagcccccactgctttgtctccatcacagagttcacactgcagcttgggcatctctttagtttcttcttcctcaaagggtttatcctgaggagccttccccacggcgcaatccagttctgctgggtatttacatttatggctcgggctcctgtttccgtgctccttcctccag

SEQ ID NO: 47420 - DNA, 1699 bp, Homo sapiens
ttcggcacgaggtgatttcataaattaattagaaagccatctttagcatattgcttatgtctggatccatgtttctgaggaaaaagacattctcaggtgatgtatttttttcatgcattagtatgcatttttaaaaaataatgcatgtttctttaataattaattttcatcttctataagatgccatgtgaagaagttgtggaaatgtagaataaaaagctaaagctgccaaatttctgttgaactcttaaaaacagctcatgtttgtttgtcctctcgggttgtggcctagcctatttgcaatgtaatgaagctgcagggttcttgtatagctaaagcgttcaatgcatttcacgtgctgtggtggatgtgggtgctgtagacaggcttcttctcttcctgctctcaaaatacctcggcttgacatttgggacagatcctgtccattgtttaagctgaggcaaaaaaccacacaaaagttgtgtaagagatgagataacaaaggagcgagagaaatctcatgtgaatttccaagttttaattcgttctccatgaaggattttcatttcagtgaaagtcgcagcagaagagggaactttctggagtttttgagaatgccaaaccacatttttatcacacttctttggaaatcaatgcctttgcatagaaaatcaaattcagggaccacaaagaattttcagtgggaatgtctagtctgaggggtctgaggttgtttttactttattgtgttgtttaaatattttaaaaatatctttagcgtttgggtcttttttttttctgtaaacatttaatttggtctgagaaaagctgaatgtttgggtgtgacgtttgactgaggtggattggggctgcctgtggacattagtgaacaggtggtaggcttcaggaatatccagttttaatcagttgcatttggtacagaattttgagtaatggtgaaaattgttgtctttggaaagcacaaaagaaacctggaaaggcagttcggctcaggtagctacacataacattgtgtatgattttcacttcaaagctgtctggaaggaaatgcagtcagctccagctagtactatttatgtacccagataactaagatattgtttcatggccttgccttagtcagaggcccttttctctgtcctgaacccccaggtatgggtgaaattggaaattactaatctattggaaatcagttcctgacatagtaaagtttgctttcataactgcagcaaaaaaggtcaacttgccaagtcactgctgccatgtgtgtactgtattattttcagaaaaaaatataatagtctgagtccaagttatcttgatttaaaattgatagagaaaagaaactgtcgagcaagttatataacaacctaacaacattgcactttctgtatatgaaatcaatatttaaataacttatttttctccattgctgttcttaaaaacattgtaagtagctgtaatataccagtaccaatatgttcttgcaattgcttcagcccaagaaagctgtgtattgttttaaaaattgtaaaaattattgtgatgattcatttagcataaagagaggtggacggaagggttttcctatgtatcaaaacttgtctataattatgtcatctatgtacctagaaaaaagtaaataaatttcttcagttgaatatgaaaaaaaaaaaaa

SEQ ID NO: 47421 - DNA, 794 bp, Homo sapiens
gatgcctaaagctgtggaccgcgtgggctcgcctccctgggactaggtttcagcggccgctgcgatgaccaaaataaaggcagatcccgacgggcccgaggctcaggcggaggcgtgttccggggagcgcacctaccaggagctgctggtcaaccagaaccccatcgcgcagcccctggcttctcgccgcctcacgcggaagctctacaaatgcatcaagaaagcggtgaagcagaagcagattcggcgcggggtgaaagaggttcagaaatttgtcaacaaaggagaaaaagggatcatggttttggcaggagacacactgcccattgaggtatactgccatcttcccagtcatgtgtgaggaccgaaatttgccctatgtctatatcccctctaagacggacctgggtgcagccgcaggctccaagcgccccacctgtgtgaataatggtcaagcccccatgaaggagtaccagggaggctttacgatgagtgcctggaggaggtgcagtccctgcccctacccctatgaggggctccggtagcacctgggcacctgccgctggaagctattgggctggcagcaggacgactggctgtcctcctgcccacccacactgacggcatcttcccagttccccaaggcacgccttcttcccaggcagctctaacagccctttcatgaaggtaatgctagtcttctgtccatcagtgccatttcctgtagaactaaaggctgttccaagaatgtggggtggggaaagtaaatgctaagactaaaaaaaaaaaaaaaa

SEQ ID NO: 47422 - DNA, 4115 bp, Homo sapiens
  misc_feature (1)...(4115): n = a,t,c or g
gctgaggaagtgggacctccccttttgggtcggtagttcagcgccggcgccggtgtgcgagccgcggcagagtgaggcaggcaacccgaggtgcggacgacctgcggaggctgagccccgctttctcccagggtttcttatcagccagccgccgctgtccccgggggagtaggaggctcctgacaggccgcgnctgtctgtgtgtccttctgagtgtcagaggaacggccagaccccgcgggccggagcagaacgcggccagggcagaaagcggcggcaggagaatcaggcagggggccggaagaccgcagaccgagacccgaggcggaggcggacctcgagccggccatgtcggttggtggggttggacgtgggctcgcagagctgctacatcgcggtagcccgggcccgggggcatcgagaccatcgccaatgagttcagcgaccggtgcaccccgtcagtcatatcatttggatcaaaaaatagaacaatcggagttgcagccaaaaatcagcaaatcactcatgcaaacaatacggtgtctaacttcaaaagatttcatggcccgagcattcaatgaccccttcattcaaaaggagaaggaaaacttgagttacgatttggttccattgaaaaatggtggagttggaataaaggtaatgtacatgggtgaagaacatctatttagtgtggagcagataacagccatgttgttgactaagctgaaggaaactgctgaaaacagcctcaagaaaccagtaacagattgtgttatttcagtcccctccttctttacagatgctgagaggcgatctgtgttagatgctgcacagattgttggcctaaactgtttaagacttatgaatgacatgacagctgttgctttgaattacggaatttataagcaggatctcccaagcctggatgagaaacctcggatagtggtttttgttgatatgggacattcagcttttcaagtgtctgcttgtgcttttaacaagggaaaattgaaggtactgggaacagcttttgatcctttcttaggaggaaaaaacttcgatgaaaagttagtggaacatttttgtgcagaatttaaaactaagtacaagttggatgcaaaatccaaaatacgagcactcctacgtctgtatcaggaatgtgaaaaactgaaaaagctaatgagctctaacagcacagaccttccactgaatatcgaatgctttatgaatgataaagatgtttccggaaagatgaacaggtcacaatttgaagaactctgtgctgaacttctgcaaaagatagaagtacccctttattcactgttggaacaaactcatctcaaagtagaagatgtgagtgcagttgagattgttggaggcgctacacgaattccagctgtgaaggaaagaattgccaaattctttggaaaagatattagcacaacactcaatgcagatgaagcagtagccagaggatgtgcattacagtgtgcaatactttccccggcatttaaagttagagaattttccgtcacagatgcagttccttttccaatatctctgatctggaaccatgattcagaagatactgaaggtgttcatgaagtctttagtcgaaaccatgctgctcctttctccaaagttctcacctttctgagaagggggccttttgagctagaagctttctattctgatccccaaggagttccatatccagaagcaaaaataggccgctttgtagttcagaatgtttctgcacagaaagatggagaaaaatctagagtaaaagtcaaagtgcgagtcaacacccatggcattttcaccatctctacggcatctatggtggagaaagtcccaactgaggagaatgaaatgtcttctgaagctgacatggagtgtctgaatcagagaccaccagaaaacccagacactgataaaaatgtccagcaagacaacagtgaagctggaacacagccccaggtacaaactgatgctcaacaaacctcacagtctcccccttcacctgaacttacctcagaagaaaacaaaatcccagatgctgacaaagcaaatgaaaaaaaagttgaccagcctccagaagctaaaaagcccaaaataaaggtggtgaatgttgagctgcctattgaagccaacttggtctggcagttagggaaagaccttcttaacatgtatattgagacagagggtaagatgataatgcaagataaattggaaaaagaaaggaatgatgctaaaaatgcagttgaggaatatgtgtatgagttcagagacaagctgtgtggaccatatgaaaaatttatatgtgagcaggatcatcaaaattttttgagactcctcacagaaactgaagactggctgtatgaagaaggagaggaccaagctaaacaagcatatgttgacaagttggaagaattaatgaaaattggcactccagttaaagttcggtttcaggaagctgaagaacggccaaaaatgtttgaagaactaggacagaggctgcagcattatgccaagatagcagctgacttcagaaataaggatgagaaatacaaccatattgatgagtctgaaatgaaaaaagtggagaagtctgttaatgaagtgatggaatggatgaataatgtcatgaatgctcaggctaaaaagagtcttgatcaggatccagttgtacgtgctcaggaaattaaaacaaaaatcaaggaattgaacaacacatgtgaacccgttgtaacacaaccgaaaccaaaaattgaatcacccaaactggaaagaactccaaatggcccaaatattgataaaaaggaagaagatttagaagacaaaaacaattttggtgctgaacctccacatcagaatggtgaatgttaccctaatgagaaaaattctgttaatatggacttggactagataaccttaaattggcctattccttcaattaataaaatatttttgccatagtatgtgactctacataacatactgaaactatttatattttcttttttaaggatatttagaaattttgtgtattatatggaaaaagaaaaaaagcttaagtctgtagtctttatgatcctaaaagggaaaattgccttggtaactttcagattcctgtggaattgtgaattcatactaagctttctgtgcagtctcaccatttgcatcactgaggatgaaactgacttttgtcttttggagaaaaaaaactgtactgcttgttcaagagggctgtgattaaaatctttaagcatttgttcctgccaaggtagttttcttgcattttgctctccattcagcatgtgtgtgggtgtggatgtttataaacaagactaagtctgacttcataagggctttctaaaaccatttctgtccaagagaaaatgactttttgctttgatattaaaaattcaatgagtaaaacaaaagctagtcaaatgtgttagcagcatgcagaacaaaaactttaaactttctctctcactatacagtatattgtcatgtgaaagtgtggaatggaagaaatgtcgatcctgttgtaactgattgtgaacacttttatgagctttaaaataaagttcatcttatggtgtcatttctaaactgttgattttgtcactaatttaaaaaatgagatgagggagaatatgaattattctagcagaaatgaagttagtgtccagtttttcttttttactgcttatgttctctcttttctaagtgaaaatgtttttctcctgacagaaaaatagcatatgtttattacattaaagcattttaaaaatactataaagtgaataaaacttaaaatcttgccacccagaagaaaacattgttaacacttcgttatacatccttggagccttttacccctaatgatgggggtatatttgtgtgagtgtctatgttatagtgctgtaggctgtttttaaaaactctgtgccagggaaattagtaaatacagtcaagtgttgtaactgcataaatgtagtgagttcattataaagacatacttaaaaataccaatcttgctattggtagatttaggtgtttctcatttttgctgttctaaataatgctgcaatgaatctatctgg

SEQ ID NO: 47423 - DNA, 1804 bp, Homo sapiens
tttttttgccacctaaaacactatattttatttttaacttttctattgttttggtcacatgtaaagaataaaaatgaaaacacactactctgtcacatcaagaaataactttatccaaaaggaattcaaatgtaagatatatttagcatcaattcatatattagtaacttacacatgtattgtcaagtatgacatccataaaagcacaaaacagtttctaacacgttccatcaaacttctggcgtactttatgtgtcatttccatgactactaaccacatatatagagactaggggatacttagtgaagacagctttccaggaagtttacaaaattgaagaaaaaaaaagtatgtccaaatatggcataagtagcaatggggccctgaatttactttggaaagattgcctaaggcaccactataatgaacagttgtaaatctctgatcagacttcaaatttttctggtcttaaaattgcaattctaaccacaaggttaggtgactagattagctggtatattatttcctctgtgccagcatctgtaagaaatattacatctatcctgggcaccgtcactccgatatatatttgtaatagatctgattatatgaagtgtgaaagtcaatatgggtaatttttctttaaatgcattttaagaacaaacagcacttaaatgaatggtggcacaacagggaaaaggactattttaatgtaaaacaatattaaatcagcgtatgatgaggttgagtgctgaaactgtgaaaactgataatttagaaattgtaaatgcttttattcaaaactgtaaaaaggcaccaattaccctagtttgctggaatcacagttcttatgaataatagcatctactgatgaacatgatcatgaattaaatgtttttaaattttaaaacaattttaaaatagaataattctgataaaatcagaatataaaataatgaagaccaaatccaattgacagtgattacctgttatttggctgaagaaaaccaggaatgctcataaccagcagttcccaagcaccttgtgcaggtgactcaggggctgctgaggagctggttaaggagaaggaggatatgcccagtgactgggaccctgccacagcatcaaacagataagctcacttctgtctgttttactgtacattgagaatatgtgtaagtcattttttaaaaggcttcttgtgattaaaagaggaaaattctgaaaaccacagcaacatatcttatgctgtttccaagcatacaaagagaattagaacatctgagacaactaaggcctcccaaacaatcaagaagaagggttagttttcttttctcctattgataatgtcaaaatgatgtgtccatctattgagcccatactatggaagtagcaggctactagttagatgccttccccagttaacagcacatatccaaaggacagctagcccaagtgggaaggtggtaggtaaatgctcatctgggctaggcaaccaccacagcaagcaggtcccctctcagcctggcccttggcaatgagctgcttctgagaagccacagctatctgtggttgagagctcactcccttgaggcattgcagagaacaagagacatgggctgtggggcagcttttcaataaaactgagaggcacatcaacatggcactgtatgtgtccacttaaggatatatgataaacatgcaatttcaaaaggtaaattattaaagataattggccaatatatagatatgcatagtttttagcacataggccctcaataaaatattaggatctattctgaa

SEQ ID NO: 47424 - DNA, 1140 bp, Homo sapiens
ccagtgttgaagaggccctggatgaggcactgcgggtgagtcctgtgaccccttctcctgtcgacctgcaatcttcttctgctgttgctgctggagaatgatttcacgtaacttctgccgctgtctcaatttctctgtatctgcttgggccatatcctcctgatgttgctagtatggggatgagacctcatggatttagatttggatttccaggaggtagtcatggtaccatgccgagtcaagagcgcttccttgtgcctcctcagcaaatacagggatctggagtttctccacagctaagaagatcagtatctgtagatatgcctaggcctttaaataactcacaaatgaataatccagttggacttcctcagcatttttcaccacagagcttgccagttcagcagcacaacatactgggccaagcatatattgaactgagacatagggctcctgacggaaggcaacggctgcctttcagtgctccacctggcagcgttgtagaggcatcttctaatctgagacatggaaacttcattccccggccagactttccgggccctagacacacagaccccatgcgacgacctccccagggtctacctaatcagctacctgtgcacccagatttgggaacaagtgccaccatctcaacaagagcaaggtcattctgtccattcatcttctatggtcatgaggactctgaaccatccactaggtggtgaattttcagaagctcctttgtcaacatctgtaccgtctgaaacaacgtctgataatttacagataaccacccagccttctgatggtctagaggaaaaacttgattctgatgacccttctgtgaaggaactggatgttaaagaccttgagggggttgaagtcaaagacttagatgatgaagatcttgaaaacttaaatttagatacagaggatggcaaggtagttgaattggatactttagataatttggaaactaatgatcccaacctggatgacctcttaaggtcaggagagtttgatatcattgcatatacagatccagaacttgacatgggagataagaaaagcatgtttaatgaggaactagaccttccaattgatgataagttagataatcagtgtgtatctgttgaacca

SEQ ID NO: 47425 - DNA, 428 bp, Homo sapiens
gctatccaacgtggcgcctggtggccgggccctgtgccggaggacaaggagtgagatggcctcaatcttgcgaagccctcaggctctccagctcactctagccctgatcaagcctgacgcagtcgcccatccactgattctggaggctgttcatcagcagattctaagcaacaagttcctgattgtacgaatgagagaactactgtggagaaaggaagattgccagaggttttaccgagagcatgaagggcgttttttctatcagaggctggtggagttcatggccagcgggccaatccgagcctacatccttgcccacaaggatgccatccagctctggaggacgctcatgggacccaccagagtgttccgagcacgccatgtggccccagattctatccgtgggagtttcggcctcactgacaccc

SEQ ID NO: 47426 - DNA, 1766 bp, Homo sapiens
tcgagtttttttttttttttttttgctttaatacaaaggtttttaataaaaaagtcaaagtctacattaaatcaggaaattgataaatctgaattatacaagctttctatatacttagaaaaaccaaaaacacacggtttataataaaactcttttaattcaaaatagagtctaatttaaagaaaatgtcattatgcccagttgactagatagggttttgtcatttaaattaaattattcacctgaaatatgggaaatatataatagagaaaattcaatctcaagggtactttgcaaattatctagttaatttgcatcatgaatcaaattcttagcttctaaagggcagacacagtctttaattgcttttagataggcacttaagaaatgcttttgatgaggagaaaaccccaaagattgtgaatcactctattaactccagggaagaatgagactctcaacaaagtagctttccagaactacccttccagtgccaagaaagtaaaactatttgcaagctctttctggtaataagaatgagggaactcaaaacaaaaaatgctctattatgcaattaaaaagtaaacttaggtaaatcagtttctttttatcaatctctgtcaatttgaattaacggtatttttcaataccatttcaagaatagttaccatactagaactagacaatgttgcaattatctcatatcttacctattcattatcacactagcaaaacagtcctttttaaaaaaaggggagcgatgtggggtgagaaaatctcataaacctcagcaaaagttaatattatgttaattaaaggcagttataattagaaaaattagagttagtcacattgagaaatccccagagtttttaatagctctctttcctaaatactcaaaaaatccagactagaaaaatggaagtgaactgttagataaacacgtaagtactcaacaaatatttaaaaagaaacaaaccaaaaatgggggagttgggggaaacaggatggccttatgaaacactgtggagctacccagcagcaacatttataaaagcttgtgtagatttgcataatgctcctatgcaattcttccccattaggaagacattcctacaaataattcatcactttagattttgatcatagatcatttataatggttatcatggttgtatctttaaaaaatttcatccattaacagttatgacaaacattaggccattctttgctagtatattattcctcaactattactaatgaaaccaaaacctcagagttgtttgaattagaattaaaatattaagctagaaaagattatttaattcttagagagatacccaaagaatttgatgctgatattatctcccctatcctctcatcacaaccccctggcctgcatttacttccttaattccatctatattcaccacagtgatgtagctaaacaagaacaatattgccctttaataagctgacctctatcaaagatctgtcaggtctgaacacagcatgcccacaggaaaggaaaattctactcagttgtgaacatccactctgttcaagatctttggtacatttggagcataagaaaataatggcacaataatacaagtactatcaaaggaaaaattttcatcaaaagaaataaaagttaaccaggccatgatatgtaacaactttctagaaaaccaaagtaaatagctttttgttctctataagtccatttacatgatagaagtttgacatttaaaaaaatagtttaa

SEQ ID NO: 47427 - DNA, 1424 bp, Homo sapiens
tgcattcaaaacaagtgttatttattataaaatcagtggcttctgattagaagactttttttttttaaaccaaataggctcaagaagctggctggaggttgaattggctgacgaacatcttcttcctccaccagcagtttgtgggacacatcacgtttctgccaagtgctacagctgaagcccatattcatagaagcaccctgacagcccttctccagcaacttccagaaaacagaacctgagcactcaaagctgcatcagcccatgtggccttgctcccagagaagcatctgccagtttgggcatggaggaacagaaagtgggcagggaattctccttggctccttagaaggcagtgggagcccagggaagcgttcggccccagtgcagcctaattgggagggagggatgggtagaggctggctgggcttctccttcctcaccctcatgtaaggtgactgcccctctggctccttcagagctcttcccttccaagttcctactgagaaataagaaggcacaaaggaaaatcagccacctcctggaggtcactgtgggccacctgctttgctaagagccaagcacagacccctgcattctccctgcaggagagcccacccggctcagaagaaagcaattccgcctgtggggaggagaggaagggaggggaggggaggacacatggtgaggtggaagcagcgagcagagcttctccatccctcctctccttccctgccagaaatgcaattaagcaagtggcccagactcagccgcacagacagcgcttcctgctgggggaagtcaaaagggctgtagcagtgggaaagggaggtcatcgggccccagatctaattaaccaacctgccttgcttttgacgttgctgcatttcctctattaacattaatgatggttggtctgaatgtccaagcatggccagaagcttccctccccaccacccagtaggtagcacagcctgtccctgggaccaatatccagtctccgtggcaaccgcctcctgaagatgctttaaagagatctgaccctgtcagagttgttgggagcttcagaggagggaaaatggagtgtggcggattcatcattaaatattgaagcatcaaagtcctctgagacaaaagaaatattttgtcatgcaccaggaaggtggaggcaggcttaagggctggccttgggtggtttggttctaccacagggttttcttcatcccttttggggaggaagtggaaggggcagctctgagcttcttgtttgagctgcagagtggtagacgcaggaagctggcatgcatttctaggtgccatgggtcttcactctgaagcagtgacagagagaaagggaattgcccacggagtgagggaggggtgagcagaggaggactgcagaagtgacactgggaaagctcagc

SEQ ID NO: 47428 - DNA, 683 bp, Homo sapiens
ggttctaaaactgatgtggtttcatttggagttctcttcttttcattaaccacatcaccgtctgcttctcttgcttctagtagtgataaactattttgctctttatggataaattcattcatctcttttgtaaccctttctgtttgctgcttttcttcttccatctgtttatcatgtaatagctgctgttctttttcttttctccaaaaagcttcctgtttttgccggattcgatgccgtaattcttcatcatcagtgtcagatgactcagatcctctgtcactcctctcatcttcactgtctcctgatccataaccacccagtccacctgtgtgcataaagctcagtctatcatatgaaaaaaattatactatgcactaaaaacttttcaaggtctgagaagaaagttcatttcttttttcattgccttttcccagaagaatacgcttattcggggtggggagaagtatttacattcaaacgcttaaggagttcacagaaccttcaggcaaaggttacttaatatcttattctttctggactatttcatatttttctcactgtaaaggaatcataatgggtttgctgtactgtccatactaaccaacaaaactacttaacagggcagtaacaaagccacgctaaagcttaatgatgaccctgaaagtatttctaaaattaac

SEQ ID NO: 47429 - DNA, 533 bp, Homo sapiens
  misc_feature (1)...(533): n = a,t,c or g
ggcatgtttaatgtagatgttgctaacgtccaggtggctcctataagttaagggtccattgatttagaagttctaaaagagactaacctaagggataccaagaacagatatttttaaagaatttcatagaggagatacacattagaaacccagaactctaagatgtgcatttgctaagtcctgtaaacagacaggaaaacacatttacattagtttgccctttaaagattatttcctccttgtctcttatcaatgtgagtacataaaagagaccttattacaattaaaaacaatgatggtttagcagcagatttagataccttacattctctctttaagagagagaatgtaaggcctgttgcggtggctcacacctgtaatccagcactttggcaagccgaggagggtaaatcacctgaggtcaggagttccagaccagcctgggcaacatggtgaaacccctctctaccagaatacaaaaattaccgggngtggtgggcatcctgtaatccacaacttgggaggtgagtagg

SEQ ID NO: 47430 - DNA, 5430 bp, Homo sapiens
  misc_feature (1)...(5430): n = a,t,c or g
ggacgactaaccagagacaagaaatttcaaaggtacctggcacgagttaccgacattgaagctacagacaccaataaccccaatgtgaactatgggatcgtggtggactgtggtagcagtgggtctcgagtatttgtttactgctggccaaggcataatggcaatccacatgatctgttggatatcaggcaaatgagggataaaaaccgaaagccagtggtcatgaagataaaaccgggcatttcagaatttgctacctctccagagaaagtcagtgattacatttctccacttttgaactttgctgcagagcatgtgccacgggcaaaacacaaagagacacctctctacattctctgcacggctggaatgagaatcctccccgaaagccagcagaaagctattctggaagaccttctgaccgatatccccgtgcactttgactttctgttttctgactctcatgcagaagtaatttctgggaaacaagaaggtgtgtatgcttggattggcattaattttgtccttggacgatttgagcatattgaagatgatgatgaggccgttgtggaagttaacattcctggaagtgaaagcagcgaagccattgtccgtaaaaggacagcgggcattctcgacatgggcggcgtgtcgactcagatagcgtacgaagtccccaaaactgaagaagtagctaaaaacttgttagctgaatttaacttgggatgtgatgttcaccaaactgagcatgtgtatcgagtctatgtggccacgtttcttgggtttggtggcaatgctgctcgacagagatacgaagacagaatatttgccaacaccattcaaaagaacaggctcctgggtaaacagactggtctgactcctgatatgccgtacttggacccctgcctacccctagacattaaagatgaaatccagcaaaatggacaaaccatatacctacgagggactggagactttgacctgtgtcgagagactatccagcctttcatgaataaaacaaacgagacccagacttccctcaatggggtctaccagcccccaattcacttccagaacagtgaattctatggcttctccgaattctactactgcaccgaggatgtgttacgaatggggggagactacaatgctgctaaatttactaaagctgcaaaggattattgtgcaacaaagtggtccattttgcgggaacgctttgaccgaggactgtacgcctctcatgctgacctccacaggcttaagtatcagtgcttcaaatcggcctggatgtttgaggtgtttcataggggcttttcgtttcctgtcaactataaaagcttaaagactgccttgcaagtttacgacaaggaggttcagtggacccttggagccatcctctacaggacccgctttctaccattaagagacatccagcaggaggccttccgagccagtcacacccactggcggggcgtttcctttgtctacaaccactacctgttctctggctgcttcctggtggtgctgctggccatcctgctgtacctgctgcggctgcggcgcatccacaggcgcactccccggagcagctcggccgccgccctctggatggaggagggccttcccgcccagaatgccccagggaccttgtgatccagctcacagctccacgaagactcaaaaggaaaagccatttttgcctcagggtttctcctctttattttcctgtggttttgttttttctttcccttttttgttcctccaaacaaaaacaaaannnnnnnnnnnnnnnnnnnnnnnnnnnnnnnnnnnnnnnnnnnnnnnnnnnnnnnnnnnnnnnnnnnnnnnnnnnnnnnnnnnnnnnnnnnnnnnnnnnnnnnnnnnnnnnnnnnnnnnnnnnnnnnnnnnnnnnnnnnnnnnnnnnnnnnnnnnnnnnnnnnnnnnnnnnnnnnnnnnnnnnnnnnnnnnnnnnnnnnnnnnnnnnnnnnnnnnnnnnnnnnnnnnnnnnnnnnnnnnnnnnnnnnnnnnnnnnnnnnnnnnnnnnnnnnnnnnnnnnnnnnnnnnnnnnnnnnnnnnnnngcattgtttataagccctgctgtctagaagtattgcgtttagccattttgagtacagcattaaattgaggagtggggaagagggaaattcacttgatttttgctgcacaggatatctgccaaaaataaatgagatttctggggtttctctaaggaatgttaaatttaaacacatgcactttgatactggagggaggtggaaagatgcattctgtcagtggagaggggactgaatagtgatgctttcatagaaccataaaacttactgcctgaaatgataatcctcttttttctctatcttgaaagctctaacctgaagagggtgatttttttttttatttattgttcaggtctgttactgtatatgttttctttgcaaatttaaattttttaaaccatttatatccaaaacagagaaacatgggcaccaggagataaccatttataaaagtgatagtgaactatcgactacagctttgtgtgagtgtgtgaaaaatcccaagaaaccagcgtgaggggaggcaatgctggttctttaaaaacacacacttcagaatttactggtacattttatttagaaaaatcctcgttactgttatcttttcctgaccgcaggtaattacgctccttattccatatttcagtggcattagaacactgtggttttgaaagaattggaaattcctagtttcaccagtttcggttttattggaactagagcacatgcccacttcttgctcagtattcctcagtgtttctgcttaatcgtgcctcagtttcttccagcttccaattggtgtttcccccaccccccttaattaaaagtcatctcagcttttaatcgtactgggagaccccatgcacagcctgccgagtcctcttcctaaccgcattgactgaggctgttgctggcagcaccactgtaaatccagaagggaagagtctgcatccaatacaggaaataaattcacattttgaaggaaaaaattcgacaatttaagccaaaatctaaaaaggacaattggattggcatatgtgagattggtgttttttcacctatttatttagttgagaagtttggggaattctcgtacagtttttttaggtggagtttgttttgtgtgagtgtctgtgtgtgctgttccctaactccagaacagttaaattcctgtagttggtagcagattagtacccagaagtggggttgttgctataacagataactgaggatattataaaagtggctttggaactaggtactgggcagaggctgggagagtttggagaaacaggagagaaaaggcctgtattgccatgaactgagcattaggggcagttctgctgagggatcagaagagaagaccaagggaattctgtcccagttgtggctcaaactgcctcaggtgcagcttaacctgcgtctctggaaggtaaaatgcatctgatccttgaggcaagagctgtgggggcatggctccctcacctggatttcaaagcgtgttaccagcagcctggggacccaggctctgcctctggatttacctgcatcgtatttgcgcttcgtggtcaaagttgttaagaaaggggtgagcttctggctacctaataagttggtcttggccacctgcctgcgacacttcctggaggagccatggattattggtggaggctgcagggagctggcgatggagccactggtgtcagcagcagagagggaagaaaggaaaggaaggggccacaaatggttgaagtgggcaggtgggcacccagggagttaggggaccccgccttccagctctgggcatagaagagttagtcacatacctgaggatcctgaaacaagggctgagaaaacctcattgctccagctgagaggtagtagtggatttgccatttttaaacagttgcctaagaaaaaacgttgaagaatatgcagcagacactatatgtggcctgtaaagcctagaatatttactaaaatatttacagaaaaagtttgctggtccttgtgagaacaatgcagttcaaaaaaggatacagacagaagcatcctcttaaatcaggaatgtagtttccatttgtgggcacgaaaagatggacaagagaagtaaccaaacttcaatcttaaaatatttgttgcaccagaatttcacttcggatttttccgtctagattatttttcaagatgagttttgaaacaaaccaagaaacctgcccctcacccaaaattgtttaaaaagagaccactcaagggagttcattatgccgtatggagatgtctgcagtcgcagcaaatcacattccagagaaggtctcgcgtaggtgaagacagccaggtgctttctctaagagatacagggtgggtgagagacaagccagggaggatcttaattcaagagaagaattcataccaagagctgaccaagaaggcagtaaattctgtgtacttgtagcagaagaaattggactaggaacttgcccaaagctttatcaaagaaaagcattgtgttcaatcttggtagaaacatgccagcaataagtgcttatgttccatagccatatcatgggcttctcacttttaaacctcctccaggggatgttctcagacatttcacaatccctctggggacattacagtagaagagaaacacatggaactgtaccagtgctttttgcccatgttcatcctaagctccggctttaggcagtgctttctgacctgggcggagtgaagacgctgctggtggctgaggccagtaacatggggcccctgcccagccaccctgaaggctgggtaggtccctcttttcaccaccagttttccacacctgtgtactctagattaacaaactctggataaacagatatttacattttaaactcaggcctacacagagtaggttttcccttataaggagcatgtatcacttagcaagaaacttaaaaatggcaaatgagtttttcatcctttaagaaaaaaaaatcagctttagaattctctgcggtcagttgtgtgcaatgcaacaaaactacctttcagtaaattacttagttatttatttcagtgttttgtttcttttgatactaagtttccctttcaataatgaatgatgtgaccaaccaaggagaatttgtttgttctgtactaaaattatattttacagttaggaattataaaaagcaagggagcatctttaaatgttttttgtttaagcgatgtcttccatccaaagtaagaataatactctcggaaggtccttttggtgtcatgtcacttgctgtatgtggcagccttacagtgccacacttgggtactgaaaaatcaataaaacgaaagttcatcatcccatga

SEQ ID NO: 47431 - DNA, 1468 bp, Homo sapiens
ttttttttgcagagagcaaatcccatttattggaatttcactgacaacaaattgagaggaaggcttccccctcccctgaaacatgccatcctctctgccctcagggctcaagcacagggataagacccccactccgcatgtccccagagggcagcactccaggggggtgggggggaggggaggggtgctctacgccaggctggggagctgggacaggagggaagacgtgcaccctcacctcttggctcaatccctctccccgggacctggtgctgcccccagtccctggggtgggctggcagacagggctcatgcaacaatgagtagacaggaggtggcacggaaacgtggccttgggtgcccttggcgggggcgggaggactaaaggggccatgctgtggccacagcgggtccaaatggaagtatctgcagtgtacatacaggagggttggagagaggcatccttttccctaggctgtgccctggggacaagagagaggggaagtacagctggcactgccgtgccaggggcagggtccaggccagccgtgccacctgagcgggcacagcgagctggagctcggctactccttggcgcggccaatgatggtgaggatgtacaggaagatgttgatgatgtctgtgtacaggttcagcgcagcaaacacatactcttctgggctcagggacagctgcttgttccccagcagcagctgggtgtccactgcgaggaagcaggtgaagagcagagccgcccagtgaaggcgtacacgatctccaggatgcggttccggatgaagatgcagagaatggcgaagatgaagagcaccaccatgctcacccaggagcacgcccatgcatgaggtgaagtcgtagcgggtctgcatggagaagatgacgacggtgaagcagacggctgtggtgatgcccacggccatgatgactgcctcggtgttgtagaagctggcgatcatccccaccatgtacgacaggctggcggtcaggaccgacagtgcaacaaggttccaggggtgctttcgccggaagtccccacaacagctgaggacgatgagagagatgaagaagacagcataggagacatagtaggtccagacattctcccggacaaggcccttcacctccgcaacaaaagtgaacacagacaccgtggacagggtcaccgacagctgcaaggtcagcactaggaacaccttgcggatgaaggcctgtcggatgctcttgtcatcccagttggtggcagggaagtcctggttgtcatagtaggatgggggaccctcctcctggtagtttccatgctggggtgagtcagggtcttgtcctgggaagacctgtggctgtccataggggttgggggggaaggggctctggggatatggcccctgggggtagcccccttgggggtaggggccctgtgggtagccctcttgtgggtaggggccctgtgggt

SEQ ID NO: 47432 - DNA, 3117 bp, Homo sapiens
  misc_feature (1)...(3117): n = a,t,c or g
aggacgggggagtgcgactgcgtctcgggcagcatggccgagaagcggcacacacgggactccgaagcccagcggctccccgactccttcaaggacagccccagtaagggccttggaccttgcggatggattttggtggcgttctcattcttattcaccgttataactttcccaatctcaatatggatgtgcataaagattataaaagagtatgaaagagccatcatctttagattgggtcgcattttacaaggaggagccaaaggacctggtttgttttttattctgccatgcactgacagcttcatcaaagtggacatgagaactatttcatttgatattcctcctcaggagatcctcacaaaggattcagtgacaattagcgtggatggtgtggtctattaccgcgttcagaatgcaaccctggctgtggcaaatatcaccaacgctgactcagcaacccgtcttttggcacaaactactctgaggaatgttcttgggcaccaagaatctttctcagatcctctctgacagagaagaaattgcacacaacatgcagtctactctggatgatgccactgatgcctggggaataaaggtggagcgtgtggaaattaaggatgtgaaactacctgtgcagctccagagagctatggctgcagaagcagaagcgtcccgcgaggcccgcgccaaggttattgcagccgaaggagaaatgaatgcatccagggctctgaaagaagcctccatggtcatcactgaatctcctgcagcccttcagctccgatacctgcagacactgaccaccattgctgctgagaaaaactcaacaattgtcttccctctgcccatagatatgctgcaaggaatcataggggcaaaacacagccatctaggctagtgtagagatgaggcgctagccttccaaggcatgaagtcggggaccaaattagcctttaactcataaagagagggtagggcttttctttttccatatgtcaattgtggtgttcccagaatgtatagcagttataaaaataggtgaaagaattgttagcttgtaaatactgagagattggtgatttatataaggtaatctgttagtcttaaaatagttaaaagtttgtatttttagattattatgtagtaggttagatccctcttgttttgacttccactgactccattctggaaccccctaagcacccaggccagaggcaagaacctggggctgtaactgccacctgacaccgctgactggctaaatgctttgcagaaagtgatgaccttacaccacaaccagcttctccaggtcatatgtgccttacctccagaagnnnnnnnnnnnnnnnnnnnnnnnnnnnnnnnnnnnnnnnnnnnnnnnnnnnnnnnnnnnnnnnnnnnnnnnnnnnnnnnnnnnnnnnnnnnnnnnnnnnnnnnnnnnnnnnnnnnnnnnnnnnnnnnnnnnnnnnnnnnnnnnnnnnnnnnnnnnnnnnnnnnnnnnnnnnnnnnnnnnnnnnnnnnnnnnnnnnnnnnnnnnnnnnnnnnnnnnnnnnnnnnnnnnnnnnnnnnnnnnnnnnnnnnnnnnnnnnnnnnnnnnnnnnnnnnnnnnnnnnnnnnnnnattacaggcatgagctaccacacctggtttggagagtcttaattaaggaaatttccctaatgttcatttattttctaaatccagaccgtgtttcagaataatccttacttgagagtagccattttcttgcctgtacttgtcagaactagaggaaatagccaagactaatgaaaaagattactctaacccttaaaagacttttaaattcactactagagtggtcattttaaaaatacatccatgttttaacttatttgagccttctttatgagtaaatgattcctccttgttctgtctttcaaaccagctaaatatttgtcacaaaagtgcttttttctcactgttgcctattttcatatatcaggttttaaatagttttaattttttaataaaattttctctacgttctatatgcaattgttatatatctatttgaatagctgaaggactaaaatacttttttaagagataacttcagggaaaccattatattttactatctgcatgctgttaactgtgggtacactgtgaaatatgttgattacaaacccattcattacatagtataaggaattcacagtatattgactatatagtgtctaatgatcttgggcagatactgtcaaacttacaatatctatatagatgtaggtctttttaaatttacctagtccattcttcctatccatgtatattgatgctgaaagaggaagctggtcagctcctctggacaacaaattcttagtctataatattaggagacatcttctgttttgcaaatgtctgtgaatctgagcaacctggcattctgcttactggccagaaagctggcgggtgacatttgtaacatttcctctttgaggactctgagttcacctagagaagtctaagcataacagctttctttcccagcacgagcctttataggctctctttagctcaaccactctgtccatccagccaatggatgtccccttccccctgtaccccaatttcaagcttattttagggaagccttgaaactaccatgtatcctggctcctagctgagttttattagaggtatgggagccagtgcaacttaaaactcaagttggcacttacatttttgaattttaaaatgatggttttatctgttgtgtgaagtggttcacccttgaggaccaggagcctccatatcctgactgaaaaccttttctgagacttagagtaacagtacttttggttccttgagttctcctgtctccagataccaaatgaccttgacttttctgccttgtgaattcgtagtccaatcagctgaaattaaatcacttgggagggacgcatagaaggagctctaggaacacagtgccagtgcagaagtttctccaggtggcctccctttccaacaatgtacataataaagtgtatgcactttcactaatatttttggggtgagagtctgtttcggcctgtattgaatgtctgtggatttccgttttcagaagtagta

SEQ ID NO: 47433 - DNA, 1145 bp, Homo sapiens
tttttttttgcataataccaaagaatttattgtaaatgtagtggcaaatacattcagaataatcatcattaaaaaggaactagaaaattatacatgtttaaagtatgtgcttttttcccaccacctttaagttaatggctagtaccaacattttaagtaatgaaatacttaatgtgatgacccattttcagataatttcatgactgtatcttcatcttaatttttaaagcagttgaccatgaatttcagtttcagttattctctgtttttatcaattccgtaatgatctgcagaatcttgtcattttcaagggacatctttggattttcaagcttttttcttaaaactgaatcaatgagaactctcagctgcttgaaaatgacagctatctttacaggggcctgaaaatagatccagccatcaatagaaagaagacgttctcggtgctgaacttctatatcaccaccaaaaagtaaaactggaaaaggggttattagggtagtttctctcaaatacactctggcataccttatcttctcctggtataagagccatccatgagtttgcaaatctcgatttactgaggatgggtgtaacttgtgctttgccttgggccgtctccacaatgcaagccaatttttctgtaacatccactgactttgtatagattatcttccccacattgtcatacagtccagccaccagtacagctttaagaagggcaatttcttggaatgagagggtctgtgaggctctgtttccttcccagctggtagaagttgtggaagatgaaaatcctgctgccttaaccaactttattaactcctgctttacatcctctagggttaacagtgatgttctattaagaaagttcctccggcagtatgtgatttcagaacgataacctccttcttgtcgtgctttcttcccatcctagatatgcattgtagatcgtcaggtggtctgaatccgccatggccaaagctgattttgcaagatctgcttcatcttttcgaccaattggtgtggtaaaaggagacttctctgtcataactgcagctagtgttgccactgggtcaaggcagccaaatatggcaccaaaaataagcatcttgccaatcttgacattcacaggtaaagctgca

SEQ ID NO: 47434 - DNA, 977 bp, Homo sapiens
aggaggaatttgaaacaggatatttaagagtgtggatatttttaaaatgcaataaacatctcagtatttgaagggttttcttaaagtatgtcaaatgactacaatccatagtgaaactgtaaacagtaatggacgccaaattataggtagctgattttgctggagagtttaattaccttgtgcagtcaaagagcgcttccagaaggaatctcttaaaacataatgagaggtttggtaatgtgatattttaagcttattctttttcttaaaagagagaggtgacgaaggaaggcaggaatgaagaagcactgcgtggcctccggtggaatgcacggggcacagcccgcgactctgcaggcagcttcccccccatgccagggctctgcgccgtcatgtgagacttaaaaaaaaagttgaatgacttcgtgatactttggacttctaaattaaatttatcaggcataaattatgtagaattagaggctttgaaaataatactggtaggttgctcaaaggttttgaaagagaaatcgctaggtaggttactatctggctaatccatttcttatccttgacaatttaattcatatttgggaaacttttagggaaatgaaaaataaaagtcactgagtctgggtgacatttttaagaataatataaattcagtttcaaactcttctcacattaaaattttgctgtgaactcttactaaaatgagttttaggttctgtaagtggaaaaatgtgcttttattttatgggccatttttaccacaactaatcttgccttggattactaagcatctcctgcgatcccacagaggactgtggtggccacaggagctgaaagcagaagagtgggatttgatgccaggcagtggagtggcctcagccccagattgtacctcctgccctgtaggaggggagggggcaaagccttctgacttcacctttgtttgacctatgtatggaacttac

SEQ ID NO: 47435 - DNA, 2542 bp, Homo sapiens
  misc_feature (1)...(2542): n = a,t,c or g
ttttttttttttagcatgcaattttttattgttttctaaatctatttgtacacttaatatgctagtattaatttcacaaacagtataaagaatgtactccaatgatattacgcggcaactactcacctgaaaaagaaaacattgtctctgaaataattcctaattatacaattttgcaaataagcactataaatgttaaaatgttaagacttcagtgtataatgtcaataacatcctgcctttttaaaattgcttaaaacatttgttaaagatcatgcaaaataaacactgtattaaaatgctagattacactcaaacatcaaggcaatgaaacacaaaagagcaactatttagcacaatgactggcccagtaaataacttaatcagcatattaataaaaacccactgagtgataaacatcgaaaatgtaacactgaatctagataatagcgcatctgcgatctcaccatctaccgtcctaactgtgacttggggtaaaccaccagaattcattctacataaatgagctatgttaaaacgataacaatatttcattgcatgatgacagggtacatttctagtccacacagtacttcaatgtgaccattctcttaactcggctaataattaatggaaagtacacttttacagtcacagcacttatatagatatatatatatattttacccttgctttgttacatgtttccaaatttttttttaaaaagtatttcctttcttatgatccttccccagaactaacatgctgacttaggaacagatgaagtagataaagtctatcctagtatagagagcaatgatttagttttacctaattaaatatttccttgtcatttatcaattgtcactgacctttttgatgtaattatttcctcattcactcatctataaatatttattagtacctattattacccatgtctccctgattttccagaaaaagaattcatgtttttttttcttctcattgctaagctcacttagaaaagttgggcaccatttaaaagagttggagaacagaccagggtggcttcttgggcacagctggatggtgctggaagccaggcctgggatttggagagaagagtttccgacatataaacccacggaggtcaccagccctccccgcatctactctcctaacagctcaggacagccccgtcacactactgccagccctggtgactcactttgttggcaatttttaaagccctcttcattatgtacttcctactcttcagaacctctgtgataagcaatacccctgccatacagaacgctggatctcggtttactcagcctctccctgtagcgtcacaggctgtgcactcacctaggtgagcccctaagagcagggtttgcttctgcttcacctaacgccacgtcttccctcaaatgtgtggtcaccaaatgtttgcaaaaagggtctctagctttttttctttttggcacattaagccctttaaaatacttctgacctatctttatactcagatctcacctcgtctcaaaaagttttatggggtaatgcgccaatgaaaggtacagtagtattagtgagttctgaagcttctaattacaaagaccacagaggctggctggtgagccatgcttctcatgctcccttctgtcacactgcagatgtctcttttacctcggcctcatcatcggttagttatctgtcagcaaaatgtagaaaggtgatgggcgtggatggagtcaaaatccaggacaattctgtcataagggtacagtaacactcttctcctttgcttgtttttctcaaagaatgctttctctttcttctccaaagcctgtgctctcagaagaggctgctgcatggagctccggaggatctttggagagccttgtgtaacttgaacgttggcttcgcttatgtgtcatgctttttagattctcattctgaatagtggttgggttgggactggaactaggcctcaaaatgacttgagaagtctccctaattccctccatctcatcgaaattttgattggctctgttggctggagcactattgttgttcagagtcacggtgctgggagttcggttcaggttgtaggctttctggcatgcaggccagttttcttcagggctgctgggctatcaagctgcattcggaagggcttttcttgtcttctgaacaaatggacatccgagctataattggatcttgcaggccactcaggctatgtgggattccaccgctttccgctgtgactgtcatcttccagctctatgagatttgccttttcaagctgggagtcatccgccacttcattgtgcagagagtgattgggagaactttcactggatctcactcctgaatccgatgaatcctttttgtcaaggagcgcatccgataaatactctttggctttaatgaaggttctgatcggctcagcactgtgttctggagacttcggcactctctctacntttccttcggcttttctgtctttgtcatctttgagcagtggagtgttatctgattcttctgtgcc

SEQ ID NO: 47436 - DNA, 790 bp, Homo sapiens
tgtgtttgcacacattatcattagtgaaggaattccctagccagctttaaagaaggaaaaaatggatagtcccaaattaggtgtataaagccagtagagtccacgacacttggactggaggtatcttggagtcctgagacttagaatcagttcagctgcagaaaacccaccttttgagttcacaccattagtgaatagcaccatgctgaaacatttcacagcttccaactctgggaaataatggagagagtttaaaaatgtaaaacttcagttagtttggggctgaacttgcttacttgaaaaatctggtgctaggcacatatatctgcctctcctttgtaaataccactccaatattattctttactattcagatccaagcttcatgttctacttgttcttcatgttctttaaatcatttgaaagttgtcaactgagagaaacatttcagaggggggaggcttttggcactggtgataaacatccctccaagagaaccgtttggggttctcttctatttgtggttggtggtttttattcttttaaaaacagctttcattgttgtttactttttgtgtaatacaaacaaaatgtaggaatcatagtttattgatttcaaatggctgacaaagaatgagtaaaaccattctttatggttttacgattcagactcatttggaaaagcgaatgtaatttttacctcctctttccaccccaagttttgtttctgcttttggagagggttgtatttcccctacttttaatccctagggaatattattgccagatt

SEQ ID NO: 47437 - DNA, 369 bp, Homo sapiens
ggtcagttttgtttaaaaccctttctgacttcccagcctcttactgggcaaagttcataatttttctgagctttctagggtttccaggcaagcttatgaggggccaccgttacagcaacttgttgggaacacctggatagtggaacaagaaagctttgtcacaaagtcatgaaggggaaaactgttgacggacctggagaatcttcctgaagaactttaaagttgattgaaagaatcattaaatcctggaaacctacattaagactttgcagagatatgcggatgggtcagataaatcagagaaggtaaagagtgtaggccccagaggtggggcaatagagaaggaaaaaaattgcataacagtgcaat

SEQ ID NO: 47438 - DNA, 868 bp, Homo sapiens
gttatgcaggagtaatccgttccaatgtgatgttctgatgtctgaggagcacgtctgcctttcagaacagatcctgcactctgctagtgcatttctccagcactccacggggcttttacccaacaatgcagcttcacacacagacaccacattggtatatggcacaagctggcctaacatgcagggaaaggatggtctctacccacacagccagacagtgctttctactttattaaacatcaaagcccaaatagatgttccctgtggaggaggacttaaggacactaggggaggagaaagggacacctgggaagagaatcacaccacagagaccaatcttcacaaaaagggtccaatattgatttctagggaggagcagggcatggtcagctcaaatttggtgataacgtcaggatgaaggaccccaagcttcccgacgctttgacccctggcaaagatctctgcacatcgcccggggaagaaagcaggcccttctgatgctttgatcacatatccccccttgtcttcaccaggaggcacatcgagcaactgcataattctgtccagcagcccatgaatgatctcaaaccccaggattcttgttgtaataaacagcacagagatgtctgtagttttttgcacctacatctgtattagaatcttttattacaatgtcagagatttcaaacagtttcagtggaaggggcatcttacgatttgctgctatggtcttcaggaggccaggaagaagggtagtgcgtgccacctgaaattcagctgttttaggattacttatgtggactgcctttgttgcagagatatccacacctagtttatcagcaatatcttcttgggagcacagggcaaa

SEQ ID NO: 47439 - DNA, 1421 bp, Homo sapiens
tatttttttatcaggtgaaacaagtaaatcattggctttattctgggtcctggaagctccactgtgagtctgaaaaaaagacacaacaggggcggcagccctgggggctggtgcagaaaatagtccctggctcctctggccctgggagcctaaagggcagtgaggagaaggcttagcaagaggcctggagcaggggaagtcaggtccctcaggaacccctcctcccccagaggaaggaggaagagggctggagagtctgctggagagtctgctcagttcctcagcaactgcactgcaggagggtgcaggccatgggttactccttgcccttctcaggggcagtgggctcccagagccactttggtaagtccccaggggcttcagtcccaggggtccagccgtgacttcccctaagggcccctcgccctccaagtccagctcctcaaaagaggagccgctggcacctgactcgctgtagctgtgctcgctgcgggtgtcaccgtcatcccagccacggctgctcgccccaggtgacagtgtggcagctgaagtctcccggctgccagggctcacttccaagcttacagaactcgtgtcactcattgtgtcagctcctgtgccatccacctgggtgtcaatggcctccacaagcccccgccatttccactctgtctccttcatctcaggcacatagaagtctccctgccgtgccagtgggcacatgaaatggatctggtcttcctggtagatctccagccgaggataggcacacacgttccgctccttgatgtaggtgtccaaggcaggatggacacggcgggtagccagccagatggacagaatggtggtgtaggggaaggtggctgttcacccacaatggctgggtgcccgggaaaggagaacaccttgaaagccaaatttctggtagaggtcgatgagctcaggggaagggcgattcctcaccttcaactcaggatgctgcccacggcaacatcggcaacttatcagggggcaccatgtgggggttgtcatagtagacagcgatggaacggagcttgggagagatgctgcagctctcagtgaaaagccgcccagtctcaccatagagccccatgtggaacttgtaggccacagtgacgttgcggatggggggtgacccagcactcacttccaccccagccagtagccctgagtacccggcaaaggccagcagcgtcagcagcagtaagagagtcaggcccccaatcaggcccagtagtagcaggtccgacatggctctggatccccaacactgcacctcaaggcagctttttctttgcagccgccaatttgctctgtagggtttcttcagacattgcagggcaggaaggaatgtggggttggggccacgtcagctagattgcggcttaccactggggaac

SEQ ID NO: 47440 - DNA, 1254 bp, Homo sapiens
acgaggatccggtgttccaacccagggggaaaaatgcggcctttgactgaagaggagacccgtgtcatgtttgagaagatagcgaaatacattggggagaatcttcaactgctggtggaccggcccgatggcacctactgtttccgtctgcacaacgaccgggtgtactatgtgagtgagaagattatgaagctggccgccaatatttccggggacaagctggtgtcgctggggacctgctttggaaaattcactaaaacccacaagtttcggttgcacgtcacagctctggattaccttgcaccttatgcccaagtataaagtttggataaagcctggtgcagagcagtccttcctgtatgggaaccatgtgttgaaatctggtctgggtcgaatcactgaaaatacttctcagtaccagggcgtggtggtgtactccatggcagacatccctttgggttttggggtggcagccaaatctacacaagactgcagaaaagtagaccccatggcgattgtggtatttcatcaagcagacattggggaatatgtgcggcatgaagagacgttgacttaaaacgaagccattccaaggacagacggctgtatggaaaggccgagctttgtttcctgtgtttgtgtggactccaccatcatgttgaattttgtcaacactctggcctcttcagggacttcttatttactgtactctctatcactgacaaatgcaggctggattcttattatatacagagatggctcaaaaatggggtttcagatctttgtgacgaaatagaatactgtttcatatttgaatcagagggcttcttgttctgagaaataggttcaaaatcattggaaccaggaacaagaatagcttattgttatctgtgataacactgttttctaaacacaaggattttcttttttattaatatgcaacatagacattgccataacagaataataaaccacatgtggggttttaaaaatgaaatttggctaataggagcaattcagctatttttctatacagtaattggtgtgtggtatagaagaaaaacgggttcaaaccccacttctgccacctaccagctatatggccttgaatgagtcattcagctttaataaggttcattttcttctgtttaaaaagacacaaaacttgaaaatcagctttggccatctacctgagaattagaaagtctgatttttggaattagaaatcatgattgtaggctgggcacaggtgcg

SEQ ID NO: 47441 - DNA, 1305 bp, Homo sapiens; identical to SEQ ID NO: 2897

SEQ ID NO: 47442 - DNA, 675 bp, Homo sapiens
  misc_feature (1)...(675): n = a,t,c or g
gatgccggaggctccatgactatccacacctttggtgcctacttcgggctcgtcctttcgcgggttctgtacaggccccagctggagaagagcaagcaccgccagggctccgtctaccattcagacctcttcgccatgattgggaccatcttcctgtggatcttctggcctagcttcaatgctgcactcacagcgctgggggctgggcagcatcggacggccctcaacacatactactccctggctgccagcacccttggcacctttgccttgtcagcccttgtaggggaagatgggaggcttgacatggtccacatccaaaatgcagcgctggctggaggggttgtggtggggacctcaagtgaaatgatgctgacaccctttggggctctggcagctggcttcttggctgggactgtctccacgctggggtacaagttcttcacgcccatccttgaatcaaaattcaaagtccaagacacatgtggagtccacaacctccatgggatgccgggggtcctgggggccctcctgggggtccttgtggctggacttgccacccatgaagcttacggagatggcctgganagtgtgtttccactcatagccgagggccagcgcagtgccacgtcacaggccatgcaccaagctcttccgggctgtttgtcacactga

SEQ ID NO: 47443 - DNA, 2371 bp, Homo sapiens
ctgaaacacagaatatagcgccatcattcgtgaaggggtttcttttgcgggacagaggatcagatgttgagagtttggacaaactcatgaaaaccaaaaatatacctgaagctcaccaagatgcatttaaaactggttttgcggaaggttttctgaaagctcaagcactcacacaaaaaaccaatgattccctaaggcgaacccgtctgattctcttcgttctgctgctattcggcatttatggacttctaaaaaacccatttttatctgtccgcttccggacaacaacagggcttgattctgcagtagatcctgtccagatgaaaaatgtcacctttgaacatgttaaaggggtggaggaagctaaacaagaattacaggaagttgttgaattcttgaaaaatccacaaaaatttactattcttgggaggtaaacttccaaaaggaattcttttagttgggacccccagggactgggaaagacacttcttggcccgaggctgtggcgggagaagctgatgttcctttttattatgcttctggatccgaatttgatgagatgtttgtgggtgtgggagccagccgtatcagaaatctttttagggaagcaaaggcgaatgctccttgtgttatatttattgatgaattagattctgttggtgggaagagaattgaatctccaatgcatccatattcaaggcagaccataaatcaacttcttgctgaaatggatggttttaaacccaatgaaggagttatcataataggagccacaaacttcccagaggcattagataatgccttaatacgtcctggtcgttttgacatgcaagttacagttccaaggccagatgtaaaaggtcgaacagaaattttgaaatggtatctcaataaaataaagtttgatcaatccgttgatccagaaattatagctcgaggtactgttggcttttccggagcagagttggagaatcttgtgaaccaggctgcattaaaagcagctgttgatggaaaagaaatggttaccatgaaggagctggagttttccaaagacaaaattctaatggggcctgaaaggaagaagtgtggaaattgataacaaaaacaaaaccatcacagcatatcatgaatctggtcatgccattattgcatattacacaaaagatgcaatgcctatcaacaaagctacaatcatgccacgggggccaacacttggacatggtgtccctgttacctgagaatgacagatggaatgaaactagagcccagctgcttgcacaaatggatgttagtatgggaggaagagtggcagaggagcttatatttggaaccgaccatattacaacaggtgcttccagtgattttgataatgccactaaaatagcaaagcggatggttaccaaatttggaatgagtgaaaagcttggagttatgacctacagtgatacagggaaactaagtccagaaacccaatctgccatcgaacaagaaataagaatccttctaagggactcatatgaacgagcaaaacatatcttgaaaactcatgcaaaggagcataagaatctcgcagaagctttattgacctatgagactttggatgccaaagagattcaaattgttcttgaggggaaaaagttggaagtgagatgataactctcttgatatggatgcttgctggttttattgcaagaatataagtagcattgcagtagtctacttttacaacgctttcccctcattcttgatgtggtgtaattgaagggtgtgaaatgctttgtcaatcatttgtcacatttatccagtttgggttattctcattatgacacctattgcaaattagcatcccatggcaaatatattttgaaaaaataaagaactatcaggattgaaaacagctcttttgaggaatgtcaattagttattaagttgaaagtaattaatgattttatgtttggttactctactagatttgataaaaattgtgcctttagccttctatatacatcagtggaaacttaagatgcagtaattatgttccagattgaccatgaataaaatattttttaatctaaatgtagagaagttgggattaaaagcagtctcggaaacacagagccaggaatatagccttttggcatgggtgccatggctcacatctgtaatcccagcacttttgggaggctgaggcgggtggattgcttgaggccaggagttcgagaccagcctggcccaacgtggtgaaacactgtctctactaaaatacaaaaaaatagggctggggcgcggttgctcacgcctgtaatcccagcacttttcagaggccaaggcgggcaaatcacctgaggtcaagagtttgagaccagcctgg

SEQ ID NO: 47444 - DNA, 4510 bp, Homo sapiens
tggtattaacttccttttcattatttactgaaactagaaaaaagtattctataacaaaatgtatacaatttagtaattgtacaaaacattaatccagcaagatattaattacagtcactaaaatgaacactcaacatatttttcactgccacttccatgaaaagctcagaaaaagtcactggctaaaaagtcacaacaaaagcaatttaagctttacgtacaacagaaaaggtaaatcttccacaataacaatgcagacacaatcactaagaggctctccatgctgccatggtttcctggaatgtttttcagagtccatcttctacaagagacatcatcagctttccaagagcaacacttgaagcattagatgtaatacaaaataaggagttctttattatttatacaaaacttgtacattaaaaaaaattaagattcaataactctgctgaccccctgagaaagctaagagcgttcgtgggtccatcaaagagccctgtgtgaatgtttcagtcaccaacctcctggccacaggaactaggcacagttctagggccattcacgtggctccttcactgggctctgaaagctgactttccctttcattaggctcggcaagcaagccagggtttcctggacaacattaaagaacattatcttctctggcccaggctagagtattttatcagtacacaagttgatttttatttcttgaacacttccaataaactagcataagttttattacaacatatacagatttgatacagtttacaaaaaaaactagatttttcaactaaataaaaatgtcttttaagcaattaaagttggcttagagacatggtatttttctttcaaaactgtgtttctacaatgatttctaaggtcccagtcttgcttgtacttgacagtcaccctcatctaagcaacattaagagctctgatatctttagtaaagaatacaaaaccctgtgtttcttaaaagcctaatgctgaaagacatgttatagccaatccagacaaacatttatatttaaacatttatatttaaacaaaaggcctctctgaacaaatagcctgcggagataaatacagtgatttgttttcctgatagaactatttagcatgtttaacacattattctgtagtttgggaataagagtgtttcttcccttgaagaaaacaggtccccttctgaagaataatgctgattaccccccaaaatcaaaatagaccagcaccaaatgaagtattaatttacaaacatgaacttagaacttagctcttacttcttgaagttctacatcccagacttaataaattaactacaaaatcaggagtttcatcagctacagtataatttaaaaatccattttcaactggcaggggtgagggagaaggtcaattgcactgatcaccatgaacttcaagaatttcatcaaaacttttttcccagcttatatttgccttcagaggtgagctgtagattaccatctctgatgctttaacatacaatattcttgttgaaaaccccttcaaaagagcacagcatgtaaaagcactaaactgtgttcaagatctgaggagtctgcatggaaagaacctgagacctctctgaaagagccaaaaaccaagtggctgtctcagtgatcacatctattcatcctccacaagacaatgcattgagcttttttaattcacagattttatgttagtcctttagaacccaatgcccatgttccagttcagaactgtcgggctattcaggctgtcttcttggtgcaagctccttggaggtcttgtaaattgatcttcgacctgttgtgaatcatgtgacttttgacaagatgtcctgctgccaatgctgcgcataagtgacaattccccagccattacggtcccacacacaattcgggcaagctgccgggcattttccccaggattatctttgcatgctccttgaacacctagcatctgcaaacaggcttgctgaggtagtaggttggtcccaccacccaccgttcctatctctatagatggcatggtgcagctgatatataaatcttcatttgtgggaccacttgcttccattaaagtaatacagtttgaactaccaacattctgtgctgcatcctgtccacaggcaatgtagatggcggtgacaatgtttgctgcatgggcgttgtagcctcctatgctcccagccatggcagagcccactaaattcttgttaatgttgacctcaatcatagcctctgtggtagtctttaatacttctctgacaaccttggctggaatgacagcttcacaaacaacagattttcctcttccctctatccaatttatagcagcaggtttcttgtcagtacaatagttaccactaacggctagaatctgcatttcagggaaatactcgtgaagttttgaaagtgctttctctgtaccctttgaaatcatgttcatccccatggcatcccctgacctggactggaaacggatataaaggttgcgtccagctatacttgtatgaagtttctgtagacgtgcaaatctgctagtgctgtcaaatgcctcctttatcactgcgaacccttcagatgtttcgagccaggctttcacttctgcagagtcacaagcacgtggaagacgcacaactgggccacgagtcatcccatctgcaaggactcggctgctggcacctccaccaagacctattgctctgcagcctctattggtgctggccacaagacaaccttctgttgttgccattggaacctgaaattctttttcatctaagcaaaggggtcctgccactccaacagggatgggcatatatccaataacattctcacaacaagctccccatcaccaaagggagtaatttataacccctgtaaggtaggtactggagagaagaaggttctgaaagcttcttggaaagtaactgtcggcgaatagatacaccacgctcatgagtttccatcagagtttccaacttgtaggctgggatatgcttagcattgactaactggatgatctcagcatcactaaggaattttgcacctttctctgcattcccaagtatctgtagacattcttcattaggccgaggttccctgggaagttcaatttcaggttcctgtgtcaccagtactgatgaagtatcgagtaaggaggagttaccaaccacaaatgtagctctgtttggggtatctgtttcagccactaagggttttataacctcaacttttctttctcggtttatccctgtctcttcctctactgaatcacatttctggttatttctgaccagcataggttcacgtctacaacaattgtctgggactttcttttgtgtcactacaggagatgtgatagggttttttaatgagagtgtagattctgtctctgtttgttcaaagaagatgtacttgacagccagaaggagagctaaacttagggtaataacttgttcaatatccatgctgatcattttagagagataaaactgccagagggaaacacttggttcaattctcttggacacattttcatccagtcctaatgaaaccttagaagtatctgctgtactgttttgaggagaaggatcagctatccagcgactgtgagcatgaacaagaaccaagcctagagacataatcatcttgaccctctgagttacaggattcggcttattttcttcttcttctaaaactcgggcaaaatggctgagctgccaaattggacgaccctcgcggctttcccgagaaagctctaataccaaggacacacaagctgggaagaaagtcatgaacacgaagtagttggcaagaactgacatgcagccaaagcagcacataatttcaagctgacgtacccctgacatggtaccaactccaatcacaagacattcaacaagagcatcgagggtaaacgtaggacctaaaattgccattccacgagcaatattttcccttacttcatcctgtgagttggaactgagggcaaactttgctaatgtgcttgctctggaaaggtcaatcaaaagtaggaaaaagggcaaagcttcattcaagcctgtcaattctttgtctaagaagtgaatgacaactgtactgaatacaaaacttgagaaaattgtgaaaaggccagcaatacccaaaatatattttgatccaagttgacgtaaattctggaactggaagtaaatatacaggatggctatgcatcgtgttattgtcagaattataatgtcactgctcaaaacatcctcttcaaactttggacattcataattccaaccacagatcttattgttaccagtaaacatgttcatggacatcatgcagatggtcagtgtcactgtccccactatgacttcccagggatgggaggccacaaagaggccatgcattcgaaaaagtcttgacaacattgtagctacagaatccttggatcctccagatctcactagaggccaccgaaccccggcgccgacgctcagcctggc

SEQ ID NO: 47445 - DNA, 1436 bp, Homo sapiens
gcccttttatccccccctaagacagaaagaacaaaaaatgttttaaatttctcttatataggaaataataggaacgtcaaagctctgtatacctactaagtggaaaacaagaccatcatctaagtgatttgagaaattaacaaaagtagtgactacacagcaataattacagtaaattaaataaagattcctttaaggcagacaagggctaagatttccttagcagtaataatgacatacactgaattgaaaatctattttattacagaaagatcagtttctaacaaatgaaaatgtatcacctgttccttaactgtgtaaataataattaaatttctttgaaactggaatctgcaggtacaggtattctttaatcattattggatcatctaaagtagaagctgtcctgaggaagaggaagcttttgatcttaatactagtatctatataaaatggtgtggatgaacaatcatctaaaatcaatctattttaaataggaatttcctcctgaaaagtttcttacttgctacctactacccacaaaggactgatatggtacagtaccgggattgttcaactttagcaaagatctccaatgcattcttcttctcatcacatctgtcagaatctgctaacagtacaagaaaacagacacctatgaaatcatctaacctgctagcatgtcctttagacagcaacctgtctgagggtccttcagaagcacatttacaatttcataaaacttgtgttcgtatgccaacttgtaatacaggtaaacatcttcacaatatgtgagtaatttcttcaggttttccatgaccatgtcagtaggctgatgttgtttatattttttggaaatctcttcaaatatactggactttaataacctttgctgcttaaattcttccaagtaattaaagtctcctttaagaatcacttgctggtataaaatttcagcccaatctggaacaaaatcgtaggcctcagccacaatagaagcctggtagaaccgaggtagggccagaatacagtccatcagcttgtggcggcccaagttgatgagcattgtgttctggccagtgttcagaaagtgaatctgcagagttatcaacttggtgagccgctgacagtgctgggcctgtcgcacacaggagtccttggcataactctctgctgcatccaacatcagagtcagggccttcagcagcagttgtttcagctggtgcccatccttgaggctgtcctcccagggctgagactcaatcaatttcagttggatgcgggcagctgcctcgtggttctcgccaatctcccggcacatgctgaagcacagggcaatcatattgtgcttttcactgtctccaggacggcagcgtttgatgtagtccagcagggctgttttcagggtaccactcggatccaacttcttcctcatt

SEQ ID NO: 47446 - DNA, 855 bp, Homo sapiens
taaacatggagacagcgggccgctgcaactgggcagccggcctctgggctggaggctccggggtccacgaatgaccggcttttcctggttaaaggtggaattttccttggtaccgttgctgcagcgggaatgctagctggatttattacaacattatcattggctaaaaagaaaagccctgaatggttcaataagggaagtatggccacggctgcattaccggaaagcgggtccttcccttgccttgcgagctctgggctggggctccctgtatgcatggtgtggggttggtgtgattagcttcgcagtctggaaagctttaggaagttcacagtatgaacgactttcgaagtaaaatgcaatcaatatttccaacaattcccaagaactccgaatcggctgttgagtgggaggaaacattgaaatccaaatgagatgagcatggatgaatttcaaaatgcttgttacagaaaggggtggctctggagacaccatgacagcaaaaggactgggactgatttctcccaggaacatgggcagattgctgactgaaccagtgcactggatagcattcagcctcatcacaggagagtatgtgtgtgcgtgctgggggagggtaaagttttcccacagttaagaagactatttaaaaatagtaattacaggaataacttccttatgtggaggggaccccataggaaatgattctgtttgtaacagttgaagcaaatttcatactaaaaaagtttataataaaagtatgataagaaaatatttataaaacagaccccctaatagcaatagtactgcaatgtgtctaattaaaggagtttcaagagcctttcttgtcaatat

SEQ ID NO: 47447 - DNA, 354 bp, Homo sapiens; identical to SEQ ID NO: 2923
  misc_feature (1)...(354): n = a,t,c or g

SEQ ID NO: 47448 - DNA, 1122 bp, Homo sapiens
ttctcctccccgactcctcacctgctttggggaattcaaatgttatcttcattaatggagaattgcaccaaaccctagagaaaggagtattattttaaattacaggccttatagcctacctactttaaaaagacctcttactttatgacaaggatttgttatcccagagaaaaatcttcccatataatttttaaattttcattataaagtagcaaatggtaagaaataatgtaatttttttctttaactttgccttagaattttgttttcatttttttggctcctagaatctcaatttcctctaaataaataaaaggggaagaaaatatccaggtaaataacatcaaatatcctcttaagtcttacttgtatttaaagactactaacacctctaggaaacaaacagcaggttgaggtacacagactaaaatgcatttcttacacaaattagtatgtaaacacagagaaacagtatgataaacatccaagtacccacatttacgtagaataatacagtaacgttacatgaccacaaaatcacaaaaagtgaaggaagctttgagatcttccagttagcagatttcacacctggctggtcacgagattcccctggggattccctcacagatttcctaggcctcttcctgaacagtcggattcagcaggcatggcctaggacccaggaatttgtatttttttcccatacaattcagtagtctaaccctctcattatgcagaggaggaaactaaagctcaagaggtcaagctgttgtctaagtgtacagagcaagtgacagaaacagggctagaatgcaggtctctcgtccctactctgccactttttctgtcacagcacaccacctcccaaagcttcccctagacctgtcacccttacccttcagctaagtagcctttaatagatattctgtcgttaaaactaggtagggcagggacacatttcatattccctctgatacaatcctaggcacctagtaagtgtccgataaatacttcttggttggcagttactcagcaaaagtctaatactttatcctccactcacatctcagtctacaatcatccaagcagatgcaaaattatctggccagataattttcaagc

SEQ ID NO: 47449 - DNA, 665 bp, Homo sapiens
  misc_feature (1)...(665): n = a,t,c or g
ggcgaagaaactacaactcccagggcgtcccggagcaggccaacgggactacgggaagcagcgggcagcggccggngaagggcacctcggagatctgggtgcaaaagcccagggttaggaaccgtagcaatgctgcgccccaaggctttgacccaggtgctaagccaagccaacactggaggcgtccagagcaccctgctgctgaataacgagggatcactgctggccctactctggttatggggacactgacgcccgggtcaccgctgccatagccagtaacatctgggccgcctacgaccggaacgggaaccaagcgtttaatgaagacaatctcaaattcatcctcatggactgcatggagggccgtgtagccatcacccgagtggccaaccttctgctgtgtatgtatgccaaggagaccgtgggctttggaatgctcaaggccaaggcccaggctttggtgcagtacctggaggagcccctcacccaagtggcggcatcttaacggcattggtggaagctggggtcagaaaagagaaatgaccatttggaggggcggggcctcctagaagaaccttcttagacaatggggggaggatgggactttgttttttccaagaataaacttcaactcctgtcatgaaaaaaaaaaaaagtcgacc

SEQ ID NO: 47450 - DNA, 2026 bp, Homo sapiens
  misc_feature (1)...(2026): n = a,t,c or g
cgcaatgcagccctcctttctatgtgtcatactcgtttatctgggtgaccaacctgttcctattggtgcagagagaggagaagcagcttgaggcatcattagatgcactgctgagtcaagtggctgatctgaagaactctctggggagtttcatttgcaagttggagaacgagtatggccggctgacctggccatctgtcctggacagcatttgccttgcttttctggacagcatgaacactctgaacaaggtcttgaagcatgaaaaaacaccgctgttccgtaaccaggtcatcattcctctggtgttgtctccaagaccgagatgaagatctcatgcggcagacttgaaaggacgggtgcctgttttcagccatgaggtagtcccttgaccatctgaggaaccaagcctgaccctgaagtggaagaacaggagaagcaactgacgacagattgttgcccgcattgggtgcagatgcagcccagaagcagatccagagcttgaataaaatgtgttcaaaccttctggagaaaatcagcaaagaggagcgagaatcagagagtggaggtctccggccgaacaagcagacctttaaccctacagacactaatgccttggtggcagctgttgcctttgggaaaggactatctaattggagaccttcaggcagcagtggtccctgcccaggcaggccagccaggagctgggacgatccttgcaggaacctcaggattacagcaggtgcagatggcaggagctccaagccagcagcagccaatgctcagtggggtacaaatggctcaggcaggtcaaccagggaaaatgccaagtggaataaaaaccaacatcaagtcggcttccatgcatccctaccagcggtgagtgtggctggcaacctcgactccctggtgctctttgcagagttgggcagtgaaattaccttttgctcaaggctcacctagatgggtacaataaaaagaacatgggctttcagcagcagacaaatcccacttccaccactgactagctgtgtgaccttggacaagtgacctaatttttctgagcctgtttctcatttgtaaatggtgnnnnnnnnnnnnnnnnnnnnnnnnnnnnnnnnnnnnnatgaggaaatgaatgtaaagcacttagtacagtatatgaaataatgggtattcaataaatgatagtttctacagatccttctccccaccaccctccacagtccttgatccagaacttaccctaatctgatactgcctcacgtcaatggtgagctgatggacacaagatcaaataaggctatgcttattttgtgctgccagaaactgtagcaacctctgtgttcttagaggcacactgtttttgcaggccctcctgcctggggtttcattctggctatccctctaaggcgcaaggtgaagaagcttctgggccaggaaggaaaaaaaaatgcccacctgcagctctggtgaagcttgggcctgctctccttcccaaccctctaaggaaccaacttgccttttacctgtcaaatagtcataaagtcccctatcctttaccccaccttatacacacgaggctttctcaggaagtggctctgccaggcaggactatgtgggaaagggtttttccttagcacacgaaaaagccccttcccctggattcatgtttcttattttggagggagaagggaattgcacttcacactgccatcagggtttagttgacctcataatggtgcccactttctcgactttggccaggatttccttcaaagaaaacgactttcccttcatttccctaagcctgtggcccaaatggtggaccagaatgatggtgggagggggcaacccccagtagctttgcctgcttttataaagttgaacaaattgaatttagacattcaggctaacctgcctttcttagtactcctttgttggcatgggcaggggttgagtcagcagaagtggaccaaaggattcctctgaataaagttatttaaattgaaaaaaaaaaaaaaaa

SEQ ID NO: 47451 - DNA, 321 bp, Homo sapiens
ggttgatgctgtgaaaatgaatggtattcaaaacttgtaaaaagtgcagggtaaagaagtggtggagttttttcgaaacagagtctttgctctgttgcccaggctggagtgcagtggcttgatctcagctcactgcagcctctgcctcccaggttcaacggattctcctgcctcagcctcctgagtagctgggattacaggcaagcgccaccatgctcgactaattcttgtatttgtaatagagacagggttcaccatgttggccaggctggtctcgaactcctgatctcaggtgatctgcccacctcagcctcccaaagt

SEQ ID NO: 47452 - DNA, 7548 bp, Homo sapiens
  misc_feature (1)...(7548): n = a,t,c or g
cttagagagagcgcgctctgctccctgcctttgcctcactttacgcaactttccctaactttcgggcagcctcagggggcccccgtagccccctgcctttcctagggacttactggggtcgattcgaacctttttttgggagaaaagcagcttttaggagctttcttttcgtgccttgttggaaagaagcagccgtactgagagcccaggtcgttgttttttccagcttagaagccatggcgcacctccatttttgtgcgctctcctaatgaggttttttttctttcggacctgttttagtattaattattgctttatttttttgaccagttaacatatttgagggttattttatttatttttccgttttttaacggaggattttgcctttatttttaattatttgggatctgatatttttctactagtagataggactcttggtttggacatactacatggatcagtaaatacctgggcacaggacttcaaagcaaacacagattccccctcccccttaatatttaagaattaaaagatgatgagaaataaggacaaaagccaagaggaggacagttcgctacacagcaatgcatcgagtcactcagcctctgaagaagcttcgggttcagactcaggcagtcagtcggaaagtgagcagggaagtgatccaggaagtggacatggcagcgagtcgaacagcagctctgaatcttctgagagtcagtcggaatctgagagcgaatcagcaggttccaaatcccagccagtcctcccagaagccaaagagaagccagcctctaagaaggaacggatagctgatgtgaagaagatgtgggaagaatatcctgatgtttatggggtcaggcggtcaaaccgaagcagacaagaaccatcgcgatttaatattaaggaagaggcaagtagcgggtctgagagtgggagcccaaaaagaagagccagaggcagctgaaaaaacaagaaaaatggaaacaggaaccctcagaagatgaacaggaacaaggcaccagtgcagagagtgagccagaacaaaaaaaagtaaaagccagaagacctgtccccagaagaacagtgcccaaacctcgtgttaaaaagcagccgaagactcagcgtggaaagagaaaaaagcaagattcttctgatgaggatgatgatgatgacgaagctcccaaaaggcagactcgtcgaagagcggctaaaaacgttagttacaaagaagatgatgactttgagactgactcagatgatctcattgaaatgactggagaaggagttgatgaacagcaagataatagtgaaactattgaaaaggtcttagattcaagactgggaaagaaaggagccactggagcatctactactgtatatgcgattgaagctaatggcgaccctagtggtgactttgacactgaaaaggatgaaggtgaaatccagtacctcatcaagtggaagggttggtcttacatccacagcacatgggagagtgaagaatccttacagcaacagaaagtgaagggcctaaaaaaactagagaacttcaagaaaaaagaggacgaaatcaaacaatggttagggaaagtttctcctgaagatgtagaatatttcaattgccaacaggagctggcttcagagttgaataaacagtatcagatagtagaaagagtaatagctgtgaagacaagtaaatctacattgggtcaaacagattttccagctcatagtcggaagccggcaccctcaaatgagcccgaatatctatgtaaatggatgggactcccctattcagagtgtagctgggaagatgaagccctcattggaaagaaattccagaattgcattgacagcttccacagtaggaacaactcaaaaaccatcccaacaagagaatgcaagcccctgaagcagagaccacgatttgtagctttaaagaaacaacctgcatatttaggaggggagaatctggaacttcgagattatcagctagaaggtctaaactggctagctcattcctggtgcaaaaataatagtgtaatccttgctgatgaaatgggcctaggaaagaccatccagaccatatcattcctctcctacctgttccaccaacaccagctgtatggcccctttcttatagtcgtccctttatccaccctcacctcatggcagagagagtttgaaatctgggcaccagagattaacgtagtggtttacataggtgacctgatgagcagaaatacgatacgggaatatgaatggattcattcccaaaccaaaagattgaagttcaacgcacttataacaacatatgagatcctcttgaaagataagactgtgctgggcagtattaactgggcctttctgggagtggatgaagcccatcggttgaagaatgatgactctttattgtataaaactctgattgatttcaagtccaaccataggctcctgattacggggacccctcttcagaattccctcaaagagctctggtccttgctgcactttattatgccggagaagtttgaattttgggaagattttgaagaagaccatgggaaggggagagagaatggctaccagagtcttcataaggtgctagagcctttccttctccggagagtcaaaaaagatgtggagaaatcccttcctgctaaagtggaacagattctcagggtggagatgtcagcccttcagaaacagtattacaagtggattctgaccaggaattacaaggctcttgccaaaggaacaagaggcagcacatctggttttcttaatattgtgatggaactgaaaaaatgttgcaaccactgctatctgattaaaccccctgaagaaaatgaaagggaaaatggacaggagattcttctgtccctcataaggagcagtgggaagttgattttattagacaaactgttgacaagacttcgagaaagggggaatcgagtgcttatcttctctcagatggtgagaatgttggatatcctggctgaatacctaactattaaacactatcctttccagcgtctggatggttccatcaagggagaaatccgaaaacaggcactggaccacttcaatgcagatgggtctgaggacttctgtttcctgctctcgacaagggctggtggcctgggaatcaatttggcttcagcggacacagtcgtcatctttgactctgactggaacccccagaatgacttgcaggcacaagcccgagcgcatagaattggtcagaagaagcaggtaaatatttaccgcttagttacaaaggggactgtggaggaggagatcatagaacgggccaaaaagaagatggtattagatcatctggtgattcagcgcatggacaccactggccggacgatcctggaaaacaactcaggaaggtccaactcaaatccttttaataaagaagagctgacagctattttgaaatttggagcagaggatctcttcaaagaactggaaggggaggaatcagaacctcaggaaatggatatagatgaaattttgcggttggctgaaacgagagagaatgaagtgtcaacaagtgcaacagatgaacttctatcacagtttaaggttgccaactttgcaacaatggaagatgaagaagagctagaagagcgtcctcacaaggactgggatgagatcattccagaggaacaaaggaaaaaagtagaggaggaagagcggcagaaggagctagaagaaatttatatgctgcctcgaattcggagttccactaaaaaggctcagacaaatgacagtgactctgacactgagtctaagaggcaggcccagagatcctctgcttctgagagtgaaacggaagactctgatgatgacaagaagccaaagcgcagagggcgtccgaggagtgtgcggaaggacctcgtggagggatttactgatgcagagatccgaaggttcatcaaggcttataagaagtttggtctccctcttgaacggctggagtgcttagcacgtgatgctgagctggtagataagtcggtggcagatctgaagcgcctgggtgaactgatccacaacagctgtgtgtcagcaatgcaggaatatgaagagcagctgaaagaaaatgccagcgagggaaaaggaccagggaaaaggagaggtccaacaatcaagatatccggagttcaggttaatgtgaaatccattatccaacatgaagaggagtttgagatgctgcataaatctatccctgtggaccctgaagaaaaaaaaaaatactgcttaacctgtcgtgtcaaagctgcacattttgatgtagagtggggggtggaagatgattctcgcctgttgctggggatttatgaacatggctatggaaactgggagttaattaaaacagacccagagcttaaattaactgacaaaattctgccggtggagacagataaaaagcctcaggggaagcagctacagaccccgagcggattacttgttgaagctgctcagaaagggtctggagaagaagggggctgtgacaggtggggaagaggccaaattaaagaagcggaagcctcgggtaaagaaggaaaacaaagtgcccaggctgaaagaggagcatggaattgagctttcatctcctaggcattcagataatccatcagaagagggagaagtgaaagatgatggcttggaaaaaagtccaatgaaaaaaaaacagaagaagaaagagaacaaggagaacaaggngaaacaaatgagttctaggaaagacaaagaaggggacaaggnaagaaagangtcaaaagataagaaagagaagcctaaaagtggtgatgccaaatcttcgagtaaatcaaagcgatctcagggtcctgtccatattacagcaggaagtgaacctntccccattggagaggatgaggatgatgatctggaccaggagacattcagcatatgtaaggagaggatgaggcccgtgaaaaaggcactgaaacagctcgacaaacctgacaaggggctcaacgtgcaagaacagctggaacacacccggaactgcctgctgaaaatcggagaccggatagccgagtgccttaaagcctactcagatcaggagcacatcaaactctggaggaggaacctatggatttttgtttccaagtttacagaatttgatgctcgaaaactgcataagttatacaagatggctcataagaaaaggtctcaagaagaagaggagcaaaagaagaaagacgacgtgactgggggtaagaaaccatttcgtccagaggcctcaggctccagccgggactctctgatatctcagtcccatacctcacacaaccttcaccctcagaagcctcatttgcctgcctcccatggcccacagatgcatggacacccaagagataactacaatcaccccaacaagagacacttcagtaatgcagatcgaggagactggcagagggaaagaaagttcaactatggtggtggcaacaacaatccaccatggggaagcgacaggcaccatcagtatgagcagcactggtacaaggaccaccattatggggaccggcgacatatggatgcccaccgttccggaagctatcgacccaacaacatgtccagaaagaggccttatgaccagtacagcagtgaccgagaccaccggggacacagagattattatgacaggtatgcaaaaggctgtgagacaccaggtgccaacctttgccaggagctgtttctagggagaaagtgacgtatacatgaatgtatttatctatcaaattactgaagatctcatcatgcatgtgtcagccacagcgaatcccatgtcttggttataggttttatgttttgttttctgggtcatagggagcacatttcacctgtgcaggaaaagagttttctgccgtcttttgaggaaatctagtgaagaggtcgccataaaatattagagtcaacaaccaaaattattaagctctgtgcgaggctgtcagccacactaggtatcagggatcccgagatgggtaccagcccacagtccttacctgccacgagcccataattgaagagtcaaagtcttctgaagctgcaccctctttacttcagtacaatgccaccagtagtacgatgagccaaagctttacattgtgagagtagcaagtccagggagagctaaagaggttttatctgtatttcctaatttcaaatcttggataatttaacctcatagcagctttggttttccctgggctgatgatgtgcgtcatttgcactgtaccttgaatttacagtgggaaaatttcatataaacgtgtcaaagtcgtgctttgtttttggaagatctggtaacagcagcccgcattagcagagagctgtagctgagtagctgccacctcgttgggagactgcccctcgctcccacccttctctattgtctggacccagtgggcatcttgccctgcgttcttctagtaggtctgtatttctatttgatgtcactttccttttgcctgaaggactttttctgctggtgataaactctttcagtgtttgtatatatgcctgaaaaagtattttgccttcatttttgaaagtagtttttgctgagtgtatacatttttggctttacagtttctttcagtgctttaaagatgtacctctgctatttacttgcattgttttgtgatgaaaaatctgtcatccttatctttgttcctctttacataatgttccttttaaaaaaaatcactgattatgatgtgccttggtgtatttttccttggtttcttgtgcttggaaatttttgaacttcttggatctgtgggtttattgtttccataaaatttggaaatttttacaatcttcttcaaatattttttctgatcccccactctctcttcttctttggagattctcattacacctatattagcttgcttgaagttgtctcacagctcacttgtattctgttgacttttaaaaaattatgctttctgtttcactgtggatagtttctattgctacctcttcaagttcactaatactttccttttcaatgtcaagactgctgtgaggcccatccagtgtactttgcattttatacattgtagttctaaaagttcggaaagttgtttttgggtctttttatatatgttctgtgtctaaccttttaaaacctggaacacagatataacaatggttttgatgtccttgtctgcgaatcttatcacttgggtcagtttcagttgatacctcctcactgtgggtcttgctcccctggtgctttctgtgcctagtaatttttgtcagatgccagatgtaacatttaccttgttgggtgctggatatttctgtattcctgtaagtattctggagctttgttatgagttgcaggttatttggaagcagtttcctttttcaggtcttgctgttaagattcgttaggtagaaccagagcagtgctcagtcaagggctaatgattgcccacccccaaggtaaagagcctcattgcactctacccaattgcgttagtctgttttgca

SEQ ID NO: 47453 - DNA, 433 bp, Homo sapiens; identical to SEQ ID NO: 2933

SEQ ID NO: 47454 - DNA, 436 bp, Homo sapiens
  misc_feature (1)...(436): n = a,t,c or g
anaccgnttgacatgattacgaatttaatacgactcactatagggaatttggccctcgaggccaagaattcggcacgaggttcagagaggccttttgtttaaatataaatgtttaaatataaatgtttgtctggattggctataacatgtctttcagcattaggcttttaagaaacacagggttttgtattctttactaaagatatcagagctcttaatgttgcttagatgagggtgactgtcaagcacaagcaagactgggaccttagaaatcattgcagactcacagctttgaaagaataataccatgtctctaagccaactttaattgcttaaaagacatttttatttacttgaaaaatctagtttgttcctgtaaactgctcaaatctgntatggtgtnntacacttatgctanantattggaancnctccc

SEQ ID NO: 47455 - DNA, 1461 bp, Homo sapiens
  misc_feature (1)...(1461): n = a,t,c or g
ttttttgaattatcaaactttattggcttgttaaaaatgattgaattcagcaagtacatttatgatctatctacattgttaaaacagcactaaaaataaaattttttaaaatgattatccattatttacagaaaatgtggaaaagatggcttttaaacccagaacattataggaaaaaaaaaaaaaaaacagggcatgagaatgattcacaggctgcctctggattacagcaaatggttgaacatgaagtgcgtgaaactcaaggatttgcgtttcttaggaatctcttgttactttgtatgtgtttatactcaattcataaatggactgtcttacaataaaggtgataaaaaatctctgttcctttctttttgcttttcacactttttttccccataaaaacccactgcagtcatagtcagtagttaggggtgggggttggttcaacacattctgggtgctcactcatgaacatgccaaagctatactgcaacactagcctgaattcaacttagagttacctcaccatcaaaatcaggtggctgggacgttcttttgtctctgaagaccaaaacttgaaaatggactgactttagtgggaaatttccttctgcgacagtcattgtcatggaactttcctgggctgggagttctgtcagccaaattcagtctggcagcacctggcagcaaattcaattcatggtctgtccaaaagagtccttaatcttcccctatgtctttagatgaacctggcatggtttgcaggtactacaggcatgtgaacatagcagaacacacttaatagagtggttacttctgtactaatttccttggagtcaagtcagctaagctgcgcaactccaagggctctggggacatagactagatgtgactggccctgcccatgtggctggatgcaccaaccctgagagaccctatgctagatggaattgcttgtcctcagtccagctgtccctctgtatctggagtctagacaaaacaagatgaaataaacttctagtgtagtgtgaaggaatcagattcaaaccaagagagaagttctagacagctagcaccaaaacaggcggaggtgtaaatcatgcaaaggaagaaagcacaggtcttgtgtagtatcttgattccattttgcaatggaggaataaaaagtcgtgtgtgttctaattctgtgaaacaaccaatgaaacaaaaataaattctcagttggtcatggggtcagtttagaatactagagagagagagaaaaaaaagtcaagtgctctaaagaaataaagagaaaagaagaggagagagaaagcgggcttccctccattatgctctctctcgcacctggcgtgaaactggttttctgtcttcagctcttcgagctatttactccacacacccctgaagaggtgtcgcctctgctctgtctgaggagatgctccaagcctnctcgattct

SEQ ID NO: 47456 - DNA, 1105 bp, Homo sapiens
tttttttttttttttttacaatttcaacatgttttttatttgctcacttaacattccaaacaaaatgacattttacactattgcttttacttaagaagtcaactgccttatccaaagtagacaaaaatcccaattcctttaagtgtccaagtggtactttttcccccagagaaagctacttgaatactttaacagaaacataggaatcgtcctataatagtaaggtagtagttgggtctaacctgtactacatttaaaacttttctcattaaaaaatgaatacagaaaaaaaccccaaacacctccagtcatcattcctctcagatttttaacaattccactaaccttcattaaaaattgcttttgtagagaggtgtataaatatgaaaatggaaagtaagcctccccacacctgttcatagagaagtggggtagagcatttatcctgagaaaactgctgctggtccctgttatttcaaaaaggataataaacattatggcccaccaagtcaaacctcctatcttctgtgccatgatcatgtgtaaccttttctgttctggctacgagcatctacttttcacactcatgcgattcttctcctttgagcaaatctttgatgaagttgtatttcactgaatgttctcaaaggggagaaagagtgcatgagcaattatagtactggaacaaaagtgaagagtacatatattttcacgtagaaaaaatacatacaaatccaagtagctcctaaaaatagaaatcagatgggcatttttaagaaaaagattgttttctaaactgtaaatggtgccagtaagacactgatttttatatctagctacatcaccatatttatgtacaaagagaggttggtataggttcactgatacccccaatttctcccatttctttaaagattgtctttcagatcctattaaaaccataactgttaattttttagactacttcctgtcactggcacactctcttcaacctggcacatacaaaaattcatttcaacatctatttacttttttgatgctaaaactaacaatttttcggctacttcaatgccacaatattctataataacttttgctttttagg

SEQ ID NO: 47457 - DNA, 527 bp, Homo sapiens
acccctttgacatgattacgaatttaatacgactcactatagggaatttggccctcgaggccaagaattcggcacgagcgcttgaacacgacaggtggaggttgcagtgtggcgagattgcaccattgcactccagtctgggcgacaagagggaaactccatctgaaaaaaaagagaaattcttttattttctacttctcttcagatttgtcttatgcattttccaactatgtatgcatcacagctattctttttctgagttatagctacagttttcttactgttgtcttcatgccatttcatttcacatggtactttgtagattttgatgaggaagttggtatttttagtgcacacaaaaattggttttaactgtagagtttgcttatcagaacagttaaaaggcagccaggtgtggctcacgcctgtaatcccagcactgagataggtcaaggagggtggatcacttgaggtcaggagtttgagaccagcctgaccaacatggtgaaaccctgtgctactaaaaa

SEQ ID NO: 47458 - DNA, 2157 bp, Homo sapiens
  misc_feature (1)...(2157): n = a,t,c or g
ttttttttttttttcagctttgaaacaactttattagaaggctgctttaaatgacaacttctaacgtccaattctttcttaatttgctttttgacgactccagttatatgttcatatataacaatttttgcattgatctttgcatcctattgaagatttcctcatcaggtcattctggtggaatggaagtgcaaccgtgaggtcgccagtttggccgggcattgttaagcaagggcagcagaaggctggggaggggacggagccagccccccacccctctcctccaagcccccggccaccacaaattcacagtgagggggcacctcactgccttgacattcagaaaagagtgaaataaagaaaccctcgcagcgcaggaaataactggattccaccttcaaggttattgaggttcctccctctctctccacgcccccagtcaaaccctgaaatcctaaggctgggggcaagcccttccccaacctgccaaaggaaaggagccagggctgctgccttctggccgcttttctgcctccagtcccaaaaggaatttctctggacagatgtgactgcagcggcccaaggccccccttctcctcctcctcccatcccactgggcgggcttgggaaggtacaatcaaccatgaacataaatatgaataaaaaatgaacttgaaaatgacaagctattaattaaacaaatctataaaaatagttaggacataactctgttcaaataaatacaaaataaataggttccaagcagtgacacaagtggaatgtggggctggtcccgctgcgcccctgctggggttggacaggaacccccagggcgtcagaacagactctgagcagtcagccaagctcctgctccctcgtcttcctctggaagcacagaagtcgctcatttgtccggcttgtccttctggacaaaacccttttcccaacagtccataattaaggcctccaacaccttttccttccctccccagaacacacaaacgctctgcccttcgccctcaaacatggtgctccactgccctcatgccacagtggggacagtgagtttggttctgaggtggggcccatcctgacagggtccaggccagctcagagcaccatgagccccagcacttgccttctgtgcagccaggccaggcagcccgagccccctgcactcccaagcatgcccgagagccccagccatcagcagggctcagatgccagtgaccacaaggccagatcctttcctcttccttcacagccaagttggcgtcaatgctgtaggttgggaagtcaggcctgggaggccacgtgacctcacctttcatcatggattatgggattggacgagggggtgggatgtgggctgtagccctcctcccaccttacctcagcagacaggcaggcagcaagagggcacagggagatgcacggcagaccagagggcaggggccgtggccaacagctggctgcaagggtgaaatggaagaactaagccggcctccaggctccaagctcactattggcaggcactgcagaaaatgtcctgtccttacacatgtgagcccggagcctgctgaccctggaccctaaggaatgcctgtggtcttcgctggaaccaacaggagggtctgctggggtcagcaggacaagccctgggcctgccagctctccccaccctccctgcgggtgcgtctagggttttcacagcttggctcgagacagcttagtgttggcacattcacagaatgagatggctgcacaccccaggctgcggcccaggatcagcgagtccactgccgggcggccctccccccgtcaccgcgactgcacgcccagggtgatcttcaggttctcgtagaccacgtagctgatgctcacagctgggatgaccttcatgaagttgggggccagccccctgtacagcccgaaggccccctcggtccgcaggatatgtttgaagaggctgctcatggtcacctntggagcgccctcaatagaggcttgcgcctgcatccgggtcctgactagggccagggggtagctggccagctggccacaggtactggacatggtccacaggccaggagcacaaacacgccggggtccgcgctgttcactgcatagtgctgcagccaggcctgtgccgaaatc

SEQ ID NO: 47459 - DNA, 979 bp, Homo sapiens
ttttttttttttttttgctgagagggaaatctttattgttttctgtataaaaatgtccatcagatgaaggtcaaaggggttgggggcagatgcttatgcgggaatagcgaggtggcagccccagcagcctttcagccctctctcgtgcaggccttgctcggagtcccaggagatccacaggtccggcatgaacagtgagaggtcagaggtggaaggctcagcaggagaggagaggaggatcagcagaggtcatgagaaggccagaatccagggtcaggctgtcctggtcgaagttgagtttcttagctggaggagtttctcctagcccttcaatatccaccacgtcactgttggcatcggagtcgttcagagcactgagtgtcacatcagccttctgtttctttatggggggaccccggcctcagggacactggagctgctgggaggaggggcagctggaggaggtgacaagacaccagatgccaccttcttgggccctttcttgggtgactcagctggaagggggatgccagaatcttcatataccttgcgtttcacagtggcctttatctgggccactgtccgttccttgatgacacagctgatgtgatttaagatcggtcccccaaaatcgcttcacagcagccctcagcatctctatttccgtctccgtccacttcgcacaacacagcctgcagccgtctgggggaattccatgaactggggtggttgggagtggcggtggtttgtggtcgacccgttcgcagcagggagaacccgcaggagaagagtcggccacgggatgcagctgcatcgtcagctccccgagcttcgtgaaggcggcgccggccgccgagaagatctctccgacctttgtggacgctgacgtcatggccccgcgcgcctcctcacggagacgccgccgccgccgctacacgcgagccgggaccacggagagcagggagactgagcggctcgc

SEQ ID NO: 47460 - DNA, 543 bp, Homo sapiens
gcctcatcttgcatctcttgcaacctgcccttcctcagtgtctggtgaagtaagtgcagatggggtaaatatgctacctttgtccactcctgttgtcacaagtggcctcacctacataaaaattcagcttgtaaaagccgaagtagcttctgctgtctgccttagactacatcgtccacgggatgccagcacattaggcctttcacaaattaaattattggggctcactgcttttggtaccacctcttctgcaacagttaataatccattccttccatctgaagatcaggtatccaaaacaagtattggatggttacgggtattacatcattgccttactcacataagtgatctagaaggaatgatggcaagtgcagctgcacctactgctaatctgctgcagacttgtgcggccttattgatgtcaccttactgtggaatgcattcacccaacatcgaggttgtgcttgtaaagataggactgcagtctactagaattggcctgaagctcatagacattctcctgagaaattgtgcagcatc

SEQ ID NO: 47461 - DNA, 2903 bp, Homo sapiens
tttgtaagtttgtctggtttatttgcaggctgtagagatgatatcccagttccacgcacactcccatgcacacgcacacacatacttcatccacctgaatttgcccgacaaaccctcctctgagtcatagggacaaagccatacttggcagtcctcacgttactggttacattagatttggtctttcagaaagaagatggttgaagtcccaagaagctgagcccttagccagagaagtaagagtcctagaaccaagagccacaacctgaaatagatgcagactgcccccgccctccttccagggacaactctttgagaccctctcctcccaggagtttgagtctcaagaaatgaagggactgatgggggtttcccagggacacacgagcccccacccccattcaatgagaaaacctctcttatgggcatttccagaagctggggccacacctgcttgctctcctgccttaaggggaattcccgcagtcttgtagaactgtgggacttactgaaataacgcctgctcgttctgccttcctctctgagtgaggaacagggacactgaatatgatgggtagtcaaggaaggctttatcttcctcaaaggtcccagcctgtcccagagaggagaggcagtgaggaggggtgaggacatctaatgatcttggggaaaaaaaaaaaaacaaaaaacagggccagggtgggggtagaaagtaggattttcccatttaacagggaggaatgttttgcttggggtttaaacttcaacttaggcctgtgtgcattttgaagcagatccttgagttcaagatcaagccagtcatggccaaataacctcattcctgaactggttgaaaccagtgggttaacccaacctggccatttcctcatgccttacctgttttcctccctcaatctgctatcagaggtgactaaggagccgcagggaacccacggttggctccaaccaccaagacctcccagtcctgtccacttaaggtgttgcaaagcctctgccaagactctcaccccagtcttgggcccatctaggcccccaggactgcagggaaggtcaccccatacctcccccttcctaacatttatctcattgtcattgtctgggtctcactttcctattggactctaagttccatgaatctgtccatttcattattggattcttaactgttggcctacagcaagtgcttaataaatatgttcagtgaataactgtctcagtcctgagcaggtagggtaagagacttcagaacacaggtggggttaaggctgaacaccctgatcagccaagatggggctgactttgacatcttcctgcatgaattacaagaggcagcttcagaggcctggtctttgccctaagcctgatgctgacttgaaggcatgggagagggcgaatcctggaccaggggtcttcagagcaagtgaaaccctctccaagtgttgaccttggaggctgtctcttcccagcccttccctgttctcataactaactaaggcagcccacactggaaatgaggtgtaggcagggtccctgaacatctgggccccagtccagggcacctccctctggagataagcctgaccttgggcaaggcacttaatccctgtggggcaccagtctcctcacctgtgaaatgagaagtctggcccagctaccctccagggtgcattagggttctaaaatcctgcgagtccataagaaaggacacaggtgaccccagttcaattcccaagctcaaggttctgagagatctggggagagatgagttagaccgtgtatactgcacatgccaggacaacatgggaggatgtaaagcttataatagcaggtcaataaatatctggtgaatgagtgagtcaatgagtgaattatgtgagtagggtaggaagacaaatgagagaagcagagtcaggtttcaagcagattggggtcagacaagcaaccttgtatttctcagtcttggcttaccagtgctgctgactttgccgtgagcattttactcctcattctcccatcctggtcccctcagtatcctccctaaaaggtggaacagcactgagctgacctttccccccaaaccccaggcctcacttctgcctccgaagccctctgctgccccagtaagggacagtagggctgcacgctgcctctcagctgcctgcacaggtgtggccagagagcaggactggagggttccttctggtaccttcttgaagggctcccaatgccaagctcctttccttcccaccttcacatcactgaggatgagaagaggtgtggaatgagtggggatcagctggggcagcggggccccgagtggctgtgtcctgggtgacaccagagcactgggaaccttgcactgtccaaggaaacccgaaagaggccctgcagccttgtccctacttccaagggtcttctcagagtggcctggggtcctcgtcagagccaggtcagtgagcctgaacttggcttggagactttctgaaaggatggagagtgctggttcctccaagtgaggggaacacaggctggaagcctccctgccctggccctgccccctctagtttttggtttgatatcagcccttctgcacagggagcggggaaggagggaagaagagagggaggggacccaaggctcaggattccccgacccagagcccctttaaggcagataatttgtgctttacaaagacattgatgaaaacacaaacaaaccctcaatgaccaaacaaatgagagagagagagatcacagtgtgtcaagaagggcagcaagatcgggagggaggtatggggtgggaaggctggggagtccaggcggggtcctcagggcaggctagcaatgtctctctctggagggggccaactggcttggggctgc

SEQ ID NO: 47462 - DNA, 1899 bp, Homo sapiens
cccggctcctcgcctcccagcccagtgcagccaggccccgggttcggcttgctcaggtctctgtccgggactgggaagccacggagggccgggaaagtggcacactcctggagctcaagcttcctactctctcatcgctgaaataactacggggcaaggactgggtggaacagacagcatatttaggtccattgatgggcctgcctgggtggatggagctggaaagtgatgggcactgctttctggggctgcccccaggttccttccgagggctcgcttttcccctgggcagagcgggaaagaggaggggcaggccggtcgcgaaacgcaaatagtcgagaatagcgatccggggagaagcaggtgtctgtggggcccaagagaagtaccatctcgttaaaaattcagattgaactatcttacaaatggctcccagaagatccactccctgtgggaacacagcagttgtggaagtgaagacaggactggacccagaataagggttcaaatatgtggggaaatctgacctctaaattcttataagtcagagagtgactgaacaacagcagtgagacatcgaagagttttaatatctgctgtaaaccttggcacagatcatttacttctctaagactgaatccaaaaagcacaatggaatactataataagctgagacagcatggtgaattccagcacaagcctgagcattccctatagccagagaaggaggcccaacacctaacatagccttggatgcagaactgatagaacttggggaaagtgatgaagtagttgacctcacctgtgaatctctagcacctgtagtgattgacctaactcaccgtgactctgtagtgattattgaacaaaggaggaggccaagagcaaacacaaggccactccaagaccacactggcagttgtgtggtgaacaatgatgaggagggagtgaaaagggacagagatgtatgtataaccaacagtgcccaccataattccctgcaaaaaaattttttttgtcatatactacctggttatattcagtgtcaagtttgcatggatggatgctcagagattgaacttagtatacaacacatctactctatagaatgtggccacatctgtagtcagtgcttctgcacttcctttacacatactaacactgcccagtttgtttgaaaaaaatcagcctccatcagtatcactgcagttatatatgatgtatgccttattgctcaagacagatcctgtggctggatttttccatgtctttgtgcaggaactatgggttgttggcatccaatgctctgagcttaaaaatactgatttttaaaattgctatctgcagtatataagaaactctttgatttctcatatgctctgagactgctttttgtttcctttggttttatgcttcagctctggacttcagttgccagagtgtgccagatactggggtcgtccttaaagcaactttccctttcttatagtcatcaatttttagttggccacatgtagacattctggaccacataaataaagacaacaccctagagatggtgaagtaagttgtaaactaaaatcctaagccccctaattgactgaatggaacccctcttgaccaaagtgaccccagaaaaaccttaaaactgagttcctggccatgacgggatgggaggtcagacacgcttcattatatctccgtctcttttatggtttagacacagcaactgaccagcattaatgtcaaaataaagatcataaggctgacagaatagaccctttgtggcaataacaaattattcgtaagatctaaggtcatgccaggcaagtgttatgtcatgcactcctacacttaaagaataaactatgttctaactgccacaaaaaaactcgtgcc

SEQ ID NO: 47463 - DNA, 1328 bp, Homo sapiens
  misc_feature (1)...(1328): n = a,t,c or g
gtagaaaataaactcttgtattgtagcacatttcatcacagcctgactaggaccagtgctcgactttctggtggcagggcccagagctcacggacaccactgacagtatggggggtgttctgcttggcaccatgtctggctttttggccagaagtcctttagcagagtggaatatccccttgccagcccgccagctctggctggggaggacttgctcttgggtctgcagcctgcatcaggaagcctccactttccccagtgctggattatgcatcctgctctccagggtccaccttgttgctacagctgcatggcttcctgctccactgactggttcgagggtgccaggtacttctcctggatgcccagtgtggaagagaaatggaagtcggctcccattgcggcagacatcatggcttccaagcttcgctgctcttgggctccgaaacagtatccattggctttatccacagcctgaaggactcgctggatgctctccttgtcctggatgttgagagggataaaggagacaaggctatagtcttcgatgagcttgcactagcttcctcaattgaagctgggcgggtagtggcggaagaaagggtcagaagcccaggtggtcaaagcaggtaggagaggtccagaacctctgtgtagtagtcccaggttgaaggccagcttcccataatgctcaatgaggtccatcttggaaaggaggttgatgtggggcagttccacgtgcagcatggtggccagggaggtacacagtactgaaatgaacttggcagggtctgtgcagtagtgagaatccacgaggtggacggcagtcagcctgaggtcccactgcgccatttgggagaagatgctgcgcaaggcgcgatgatgcgtgcagagctccacctggcctgggcagtcgaagaggaagtagtggccgcggagggggtcgagcttggcacgcagccagtccaggttggcttccaggtactccatgcagtagagcaggccgccgttgggccccaggcgcagcgcgtgccatcacgtcgcccagccccaccagctcgcccacgtccacggcacactcgtacggcagcccctcgttggccgggtccaggttcaccagcgccacgcgccggcccagcgcgcgcagggaactcactcatgcccaggcagtacgtggtcttcccttganccgcgggccgatcaccgcctcccgaaggccgtggtcggagcgcccctncattcggcgcccgcggcccggagcaggtcaactcacagggaaaacggggcaggtagccgcgccggagacgagactgagggcgagggtccca

SEQ ID NO: 47464 - DNA, 351 bp, Homo sapiens; identical to SEQ ID NO: 20472

SEQ ID NO: 47465 - DNA, 1103 bp, Homo sapiens; identical to SEQ ID NO: 2955

SEQ ID NO: 47466 - DNA, 1091 bp, Homo sapiens
gtcttggctccggatcgtgcgtgaggcggcttcggtgagagccggaaccgggcgggcagaggggcgctcgtagggttgggggacgcctgtggcttggctgcagcggccggcaagaccctggaagagaccgtggctatggaaacggccaaggctgtcttggaatgtcctgagcagccctccgagtcgagcctctgcccccgagtttctgagtgacctgggttgatatagattgaccttgtgggcagcgagagtcacagacaagacagcaagcaggatggagcactaccggaaagctggctctgtagagcttcccagcgccttccccaatgccccagctacctcctgatacccttgagatgcgggtccgagatggcagcaaaattcgcaacctgctggggttggctctgggtcggttggagggcggcagtgctcggcatgtagtgttctcaggttctggcagggctgcaggaaaggctgtcagctgcgctgatgatttgtcaagcggcgggtcccaggcctgcaccagctcaccaagctacgtttccttcagactgaggacagcttgggtcccagcctcacctgacacagggctagaccccctcacagtgcgccgccatgtgcctgcagtgtgggtgctgctcagccgggaccccctggaccccaatgagtgtggttaccaacccccaggagcaaccccctggcctgggttccatgcccagctccagctgtggccctcgttcccgaagaagggctcgagacacccgatcgtgaagacctgctgagccagcctgttctccgggcctgaatgtctggggtgcttgtgccttttctgagaagcgttgtgactgctcaacatccccatcaaggtttgagtccacaaaagtggacctccctatcatgcttccccttccctctagcatgtgggaagggactgctgtgaagaatgacagatgtggggcctctgccaagttctgcattgctaaataagggcttcctctgccttctacctacagtgcatttgaactgccttctgaaagaggtccagggagggatttaggaaataaagtttctacctatttgatgagcctcta

SEQ ID NO: 47467 - DNA, 1436 bp, Homo sapiens
  misc_feature (1)...(1436): n = a,t,c or g
gcagtgctactcatcaccatcatgaaaaactcatgagcgtcagacgcgccacagggattcctgatcaggtaatatctgctattattatgacaagctccatagaaaaatgtagacagcagggcagaaagacattattctttataaataaaaggttcatctgtgcaatattgacattagaaaaatatacattgcttgccatagaccttctctggataaaatcagacgaatctaggatctgactccacttcactgtgagggctctggctccacggtgacgaccgactccacagcttctagaggaactccttctagcgggcccatccgcaggcacgcccctctgcatcagtcactgtgacaatgtcctcctcctgagacactattgtaccagcggccaaagcatgcaagggcctgggcttctcccggcctctgctgttggcagcaagagattcagtggtatcgttggacagggcttctcttctgggccttttcactgaggccagtccctcctccgcagcctcacgttccctcttcgtcgctgctagctccctctagctgctccccatccatgtctcggctgaggtgcttgggtccaaggttgtctgggtgtatttctttcttccgtaggaattctgtgattcctaatgactcagcanccttcatcagaagaaactcatacacggtcacaacttagccagctgagcagagccaattccaccagatcctcccggtcacactgctggaggaactccttgagcctggctttgcttggcgacgccctctgctcccctgccgcagcagggccaccaggtagctgagcagctcttctctgctggaggacagctgtgcgggactctgcaagggtctctgagcatgcgcgtcttctaggtccttggtatctctctgatcgcaaaagagctccattttctggttcagatgggcatgtctcttcaacgtctacagactgaccattctgcaggccaccgcgtgctgactctctcaccaagcaggagcgggcccctccctcacgcggagccgctggcacggacagccccgggaaggtcaggctgagcgtcctttcctctgtgcacccacggagggtgctcccattggctttctcagatagcaccatctcagggtccagctggccatggcctggattaagtttaaaatgctgggccagtccccacttccctatatatgactttttacaagtctgacacttgaagcttttgggcctcagggagcagcttgataagtcaaagagcgcctgcctctccctctgatcttcatcttcttccacactgacttctgaatcatcatcagaatctggcagatgaccgtcggccaaatcatccctttttatgaactcagctttagctttatacttggcaggtcgagatacctgtctcaacgtgtcttcacttttaacgatggtc

SEQ ID NO: 47468 - DNA, 1466 bp, Homo sapiens
atcaatctgtactaccaataaggatttcgtaattcccctaactgcaaatgtcctcttcatttgttctttatgagaaaacccgggtagtgccagcacctggatacagtatttacaccctgcagaccctaaagatttcagattcagttagcaaaccttgatgaagcacctgctggacactgagggacccaaagctcaatcagccataatccctgctttcagagtttatattgtacctgcctaatccacccggcgtgactcatttcaacactaagtactaggggtgttgtcaggagacaaatctgaagtcaggagaggaaaatgcaaaggagccctgccgtgtgatggatgtgcattctcacttgggtcttgaagttctcattcctacatctcaagctagccagggcagtctcctctctattcagaaggaaagcactgggtaattgggctagactgggctatgtttgaaggtaacatggaactcttaaggatcttgaacccaggggcgacttggttttgcttaaggtggcatcaccaatgttccaaatcctttggggagatgagggcatccccacagaaaaagaggaataatagaccaatggattttctcctttcaccagtatgtttggaaccctctgatccaatgtcttttgatactgatctcttgtccaaatgagaatgtcgctttagctgaaattcaaatggctgtgacaatttaccgaaatgatgaagtaaccaccattcccacctttcactgcctaggctccaagtctggaatacatttttgaaataggaactcccttttgcaaaaaagaaacctgggtgtcagggaggtgaagtgacttgccctaggagcagacagcatgccaagaatggaattaggctcaggatccagcctgggctcaccctgtctggctcattcccacccaggaaactgaagataaaagatttgggaaaacacaccaagaaaaaggggcagttttctttgcccaagcatttggtgctagttagaggctgttcactctctcctgctcctcttcggagtagaaataaaggctgtgacacaaggaagccagtggggtgggagggaggcaccataatccctccctaaaacccacagaagactaacctgatactcttttgacccaactgcatcaacactaaacagctgcagaccccctgaatctttcacacatgccaagtgaacattcttgatgatttctctttgtgaccgcaaccacctgcaaaccagaacgactctagaatttccttccccgcccccctttttgtttagtttctaatctcttgtttatgaggtgtggggtttataagggactgaatcaaatgaatgtaacaaaaaagaaaaaaaaaaacaaaaaaaatgccttttctcagggccagtgagttgcaaataatttttaaagaaaagcctataattacatcatctcaataaattttttataaaaaaa

SEQ ID NO: 47469 - DNA, 1684 bp, Homo sapiens
ggacaaagctagaagacctttagaagatttgtctgaaaacagatttcaagagtgagcttttatacactgctcactaatttgcttgattactaccaactcttcttaaagttaacacgtttaaataaggtatttctggacttcctagcctttcagcaagcttagaggaactagccattagctagtgatgtaaaaatattttggggactgatgcccttaaaggttatgcccttgaaagttcttaccttttctctagtgatattaaggaacgagtgggtagtgttctcagggtgaccagctgccctaaagtgcctgggattgagggtttccctggatgcgggactttccctggatacaaaacttttaagcagagttttgtatatatgtggatttttctgataagtagcacatcagaggccttaaccactgcccaaaagcgattctccattgagagtacatatcttgaacttaagaaattcatttgctctgatttttaatcttgtaaagtttttgctaaactcaaaacaagtcccaggcacaccagaaggagctgaccaccttaggtgttcttgtgatttatccttacttccctatgttgtcatagttgcttctaaactcagctgcactatggctgtcaacatttctgatacttattgggatatgtgccatccagtcatttagtactttgaatggaacatgagatttataacacaggtaatagctgaaggtaccagtatggtggtgagactcacacttagtgatccagctaaggtaactgatgttataatggaacagagaagaggccaactagatagctaagttcttctgaacctatgtgtatatgtaagtacaaatcatgcgtccttatggggttaaacttaatctgaaatttacatttttcatagtaaaaggaaaccaattgttgcagatttcttttcttgtgaggaaatacatggcctttgatgctctggcgtctactgcatttcccagtctgttctgctcgagaagccagaatgtgttgttaacatttttccgtgaatgttgtgttaaaatgattaaatgcatcagccaatggcaagtgaaggaattgggtgtcctgatgcagactgagcagtttctctcaattgtagcctcatactcataaggtgcttaccagctagaacattgagcacgtgaggtgagattttttttctctgatggcattaactttgtaatgcaatatgatggatgcagaccctgttcttgtttccctctggaagtccttagtggctgcatccttggtgcactgtgatggagatattaaatgtgttctttgtgagctttcgttctatgattgtcaaaagtacgatgtggttccttttttatttttattaaacaatgagctgaggctttattacagctggttttcaagttaaaattgttgaatactgatgtctttctcccacctacaccaaatattttagtctatttaaagtacaaaaaaagttctgcttaagaaaacattgcttacatgtcctgtgatttctggtcaatttttatatatatttgtgtgcatcatctgtatgtgctttcactttttaccttgtttgctcttacctgtgttaacagccctgtcaccgttgaaaggtggacagttttcctagcattaaaagaaagccatttgagttgtttaccatgttaaaaaaaa

SEQ ID NO: 47470 - DNA, 2340 bp, Homo sapiens
tttttttttgaaaagttcaaattttaattaaaatctttattgaataaaaatgtttcagactaggtaagactaagaaagcagaatgttttacatctctaaaaaatattaaagctaaatctctataaatgcagtacaaagaaaagcctacagcttaagacacctctccctcccatccatacaatttggaatatcaactgtgtacaacaaatgtactcaagtttataatgtccccaaaccttaagactagaaaatcatcccaagaaaaaggcctatagttggtttaatttcaccctgagaatactgtgataaaaatccaatatatttcagagctagtaagtatttaaaaattagtgtctcaaaaaggggacatcataagggaaatacagggtttagaggtctgagctcaagtggtgtaagacagttctttcttcttcctcctttaaactcttcactttgctctaacacggaagatgggggacagtgatcccgaaggtattactaaaatattgcagctttcagtaattatgagaagcacagatatcaccagaaaagaaagcaatcatttggagttacagtaaattccactggccagatacaaaagcttatttgggagaccagcagatctctcctaagcaacgaagagtgtaggttggtttttcaattgccctcaaaaagtgcctctgttgtattatacctcaggacgtcgagttcaggatgtagtttagagagcaggacataaagtagtaaattcctcatatatatcacagcaagaaaattaacctaaaaaatttaaagactaaataatctcttaacaggtaaatactaaaaaattaaattggtattcatttaaaaatatacaaactgtgccctttatactaaagtgcattcagtcgtaatgtttaagcccctaaattccttctgtatgttctctaattccaaaatagtgtgtaacaatatactactaatcatctatctaccttaatattgccttttgggaatacagtagaatctgggctattatcaggtggaatatttccccagttacaagccttacagcacttatgcatatcatcactgctaaaatgaagaatttaagtaaagttatctctagtatttagaatgtgttttttgtgtttttttgttttgtttttgattttaagaaggaattcttttccaaagttacttccaagtaaattacatttcatgctgggatacctgcttatgtgcatcacattttgacaaagggcagtggctcgctaacactaacatgaatttaaggcccagcatcattgcaatttgtcactcttcatcctcatcctcatcataataccgatttctctttatctgttcttccacagagagctctttgaccacttctccctcccagagttccacatcctgggatttctgattctgagtagtgaattcttcagcaaaggtgttgtctacaaaactcgaccaattcagagacttgggttcttggtggaagattgttgtttgaggaagctgttatcatcttcatcggagtctgcaccattttctacaagattctcattctccatctccaaactatgaccttccttacttctcttccctgtctctcctttagattctttgttttgccaggttgtttttcccacattcccattcttcttagaagccttggcattttccacttgtttcctttctgcaactcttccacccacagactcttcactctgctctgacatgctccagcctttcctgataggtggggacacagtttttgggctcttgacagaggtgctttgaaatgaagctgctacagtgaatgggcggcttctttccttcagtgaagaagatcgtcttagcttcttcagatctagatcgacatcctcaggaacttcgggcttgctgatttcgtcttcaggaggccatttgggctttgacattttgatcccttcctccaaggcacttcctgaacttccaagttcagtggggggtggccaggcgatcctcagcttcttggtttcagctggcttgtcttccttctcctgctgagaggaggccttggcttccatacttgcagccaggacacccaccttagcaataggggcatcttctacccctgggctgtgaggggtctcccttgcatttgcaagctgggctggtctctccaaaatctcttcgttttcatttttgcttgcccaataagatccttgtgtggtctgtgcccaaagccttcatcatagtttgcccttaagatttaaagagttgattgaagtgaggcttacaatagattcttccatgtaaagatgcatatgttcctagactgagttttgttgttgcaataggaagcaa

SEQ ID NO: 47471 - DNA, 924 bp, Homo sapiens
cgctaccaagatggcggcgcccattttgcggtccttttcctggggccggtggtctggtaccctaaatctctcagtattgttgcccttggggctgcgtaaggcccactcgggcgctcaggggttactggcagcgcagaaggctcgaggtctgttcaaggacttcttcccggagacggggacgaaaatagagctcccagagctcttcgaccgtggcacggcgagttttccccaaaccatttactgtggcttcgaccccacggcagactcgcttcatgtgggtcatctacttgcgctgctgggcctgtttcatttgcagcgagcgggccacaacgtgatcgcgctggtgggaggcgccacggcgcgcctgggagacccgagcggccgtaccaaggaacgcgaggcgctggagacagagcgcgtgcgagccaacgcgcgagctctgcgcctagggcttgaggccctggcggctaatcaccagcagcttttcactgatgggcgctcctggggcagcttcactgtgctggacaactcggcctggtaccagaagcagcacctggtggacttcctggcggcagtggggggtcacttccgcatggggacgctgctgagccggcagagcgtgcagctgcggctcaagagccccgagggcatgagcttggccgagttcttttaccaggtgctccaggcctatgacttctattacctcttccagcgttatggatgcagggtccagctgggcggatctgatcaactaggcaacatcatgtccggatatgagttcatcaacaagttgactggagaagatgtatttggaatcaccgttactctaattacaagtacaactggagcaaagctgggaaagtctgctggcaacgctgtttggctaaacagagataagacatctccatttgaattgtatcaatt

SEQ ID NO: 47472 - DNA, 1440 bp, Homo sapiens
ttttttttttaagtgtcaacatgccatttattttttgtcatcttgaactaaaagtacagctgcaagcaagcttgctataggacaagcttcagcttgggaaacatcaactatctgcactcaggacttacctatttccagaggaatatcgatggaaggtcaggttaatacttaatttcaggttgtttgctacttttaaatcaatgcagtgtctagttataataaagagtcaaacaatgctttacattgtatatatgttcatagatttcatccaatataaaataaagacagtccttttaaacaaaagatagggaagaggtaaatgtgacactttttccgcttacaaaaagtaatgccttataataaattttaattcaaccatttaggggggtcagctgcagtgaaccttttatttcttcaaaatgctgcttctgccaacagaatttcatgttctcttctttacagatagataggaactccttcaattgtaattctgtttgccctagagtaggcacaaaattcagtgcaaccatggcatagtgttcttctggccagttcccacatctccatttcatgatgatcttcttatttgttaactcctttacagtgaagatgctatacagctgctctacagttgtgtcaaacagttccatcatgtgaagagccacagtgggaatccttacacccagtgccactggagatgaggcctgaacctgcagggtattcccactcagttttcttttgacagtcaattcctgggttgccatagctttcgttggtaaaatcattcccgttgtaaattctcagtgtcatctacttcattttcctcagaaagattgggtatttcaatcaatcccttgtgcttcactccagattctttaacgatgcctttccagcccagtttgatgttccactcatagaagaaaatcagctttcctttgcggctgctgcacgaagcctccccttccacctgcttcaactcgttgatctcgccgcggccagcgtcattctccacaacgatgcccaccaggagctcctggaacttccctttggacaagctggtggcatcccgctctgtcctgccagggaccagaaagtcgtgaatggaagccccagctgggatccacctgcctgggtgccagggtcacgtccaagcccagcccagatcggcccaagtcctctcaagcagcctcgaaacctgccaacctccaatgtgctcctcaaacctgctttctatcaaattcttttcatcctgctcagttctttaagatattattgtccactatgcaagtagtattctgtcttaaaaacactggcttatttaagggaggaggatctagctagctcgcccactggaaataggcaaagcctaggccacagggaaagtagcagtagtgaaataatcagaatcatgacaataccaggctattcaaagtgtcttcg

SEQ ID NO: 47473 - DNA, 440 bp, Homo sapiens
  misc_feature (1)...(440): n = a,t,c or g
ttgaanncccttnnntnnnnnnnnnnnnnnaactgaananccctatgacatggattacgaatttaatacgactcactatagggaatttggccctcgaggccaagaattcggcacgagggaagaactaattaaatgaaaagcagaaagacaagaacaattagtcaagagcagtagccctgtcagagcctcggagcaatacctttctgtacccgtggtgagacaagacccagagctactggaaaacaagcactttggaagatttgttttgttttcatggaataataatatgtcagggtataatttaacgtgagtttcttatgtgcccttaaagactgttagacaagaaaagcattcactggctaataatccataggtcgacctatgtcctaagttaggtgtaaggtccgatgccttggcccacactcgagctctctttacat

SEQ ID NO: 47474 - DNA, 394 bp, Homo sapiens
gtcgacttttttttttttttttctcagttatgttaactttattaataggctgcagtctcaaaaatctttcttttcatcatcagatgtttgcggaagttttggccttctagtgtgaacctggacctttactccatctataatatgattttcctgttgtagtgcattccgaagtccttcttctgaagaaaactgaacccaacccaaacctctgtgaaagccagtctccttgtcaaaaggtaaaatgcaccttctgacatggccgaactgtgcaaagtgttctttcagctgactcgacgccgcagtccaaggaattcttctcacaaaagcaaccggctgattgatacttctacgcagcgccgcagcacctcgcgctgctgaggccgccatcttcagc

SEQ ID NO: 47475 - DNA, 1555 bp, Homo sapiens
tcttgatatcaacaagacagaaggtgaagaagatgcacaacgaagttctacagaacaaagtgtggaagcccagggagaagcagcaaaatctgaaagctaacaccccactttgaccctcgaccacacctgaaaatgtctcaaatctccaggagtatctggaatgcatttgtttccatgagtgaaaagaggaaaaagaaaatgggctgtgctgcattgcagggaacctgctcattatcatgttaaaaatgaggggcagaggctgtggctgcaggcagacttttccctacctctgtcattagcaatggttgaaatcatgtggcttgtgtttgggcgtcatttttgtatggatcctttcacttgatcatatgacgaaatgcttatagagagtagctccgacctaggatgatgattcttcctgtagcatctggcccctcacaatgtcagagggtttaattgtgtctaattgcgaagggttgattgaaccccagagtttaaatatctctgggctcaagtgttcacccagtaaaaggaaagatccacgaaagcactgtttttaggcattacgtattctgtgtgttactgctgtgttattttacactgttttgtattgtacaatatatatggctcagcactggcccccttctctgattgcttatgaaaaacaaaatgatgtacattactgtgaatttttataccactcatttttaaaagggctgtcttttcattttagttttccatactgtggtgggtgtacacaggatagaacacccttttttaaaacacagtctttccccttgctcattgtatgttgatgagttgattaagtctaacagattcatcaagactccattgctttattatagagacatttgaaaatatccattaatggtgaatatcacctgaattcagtctgtttggtgtctgcacagactggaattcaatctgtcaaatttgttttattctcaagtggagaacttctcccacataatatatatatatatatatattttaatttatgagaattttggacaattggaaaggtagaaaagaaaagccaagatcatactaaggactggaaatattttgttctatggaatcaaatttctcacaatgctgtatgatactatttaaatttggaggacaacttatcttcactaagctgaatcaggtggagaaagtaatctccttgcaatcatgtggacaccaatcacaaaagtaaagccctggtgttgtgttttcatgtcttttttcagccctctcagatccaaatgttattatgcactttttaatgtttgtaaacttttactaataattagtgtgaattgcattctgatacaataatgattatcattagaagctaacaaaattctcattaatactgtgtttgatggcctctgctgtgttttaacatcgtgcttcttatatggaaagtttttgtgagctgtgtaatccctctggtcagtattatgaaatcatttgtcagtggtaataaataaggaaccagtaatatgccaatggttcatgaattactggacaaatagcaaaaaaaaaaaaa

SEQ ID NO: 47476 - DNA, 505 bp, Homo sapiens; identical to SEQ ID NO: 2979
  misc_feature (1)...(505): n = a,t,c or g

SEQ ID NO: 47477 - DNA, 1286 bp, Homo sapiens
  misc_feature (1)...(1286): n = a,t,c or g
ggaccatcctggcaaccccngtgtttngctgggttctagcgtancgtctgtgtggccggtgggggacctgcngtcggagttggagggccagtctgcacccaagaggtggaagaggacgggctttaggctggaagcgccttagaggagccatttttccaggtggggccccaggagaggctccgacagggagcctggccatagtcgcgcanccgggaggtggagcgcgtcccagacccgagcccccgacctcagccaaacccattccttctgtccttggaggccagaggggactctgagcatcggaaaggatgcctggtttgcttttatgtgaaccgacagagctttacaacatcctgaatcaggccacaaaactctccagattaacagaccccaactatctctgtttattggatgtcccgttccaaatgggagtatgacgaaagccatgtgatcactgcccttcgagtgaagaagaaaaataatgaatatcttctcccggagtctgtggacctggagtgtgtgaagtactgcgtggtgtatgataacaacagcagcaccctggagatactcttaaaagatgatgatgatgattcagactctgatggtgatggcaaagatcttgtgcctcaagcagccattgagtatggcaggatcctgacccgcctcacccaccaccccgtctacatcctgaaagggggctatgagcgcttctcaggcacgtaccactttctccggacccagaagatcatctggatgcctcaggaactgggatgcatttcagccataccccattgaaattgtgccagggaaggtcttcgttggcaatttcagtcaagcctgtgaccccaagattcagaaggacttgaaaatcaaagcccatgtcaatgtctccatggatacagggcccttttttgcaggcgatgctgacaagcttctgcacatccggatagaagattccccggaagcccagattcttcccttcttacgccacatgtgtcacttcattgaggtcctgggcctatgtcaagaagtgcaaaaacaacatgtgtccaaatcggggattggtgagccagctgctggaatgggagaagactatccttggagattccatcacaaacatcatggatccgctctactgatcttctccgaggcccaccgaagggtactgaagagcctcacctgggggcattttgtgggtggagggccagagtgtgtatacccaggcttgtctggaaggagaaggcctttgctgcctgaaagtctcaaaaaaaaaaaaaaaaaaagat

SEQ ID NO: 47478 - DNA, 523 bp, Homo sapiens
agctctgacatgattacgaatttaatacgactcactatagggaatttggccctcgaggccaagaattcggcacgagtcttacagctttattagtatgtaagactttttataatcctgtttctactaacctctctagattcttctcaagccattcatttctccatggatacctttatgttatagctttctttatgcaatacttgcagctctgagaaaaaatcatggtgacctgtacatctgtattaacagtgttgagtttgcacttttctatgtactttacatatgttattttttttatacagcctggcgacagagtgagactctatctcaaaataataataataataataataataataacagtatatttggtgtcaggagagggctcaattctcatttctgcctttcctgtgctggctcatggtagctgggcatgacttgccttcctacataggttgtcttcatacatatgcactgggaatcaataaaagcccatggtgagaatgaaaaaaaaaaaaaaaaa

SEQ ID NO: 47479 - DNA, 1928 bp, Homo sapiens
gggcagtcttaaaaaaaaaaaaaaacagaaaaagaaaaaaaagaacgttgcaaatttgttaaaatgccaaaaaggacagtttaattttgtacagattatgcttacctcaggtttctttagtgtgcttgaatgcccttctttccatataacacttatcttcttcttaattcggcaatggaatatcttttaagttttaaaaaaactggaataattatatctatcttttttgccgtttatatttaggggtttttgttgataaaatcaagtcttggttgtggcttgctgaattaaatatttatgagtggtgcatttttaagtatagtgaacaagacaccatattaagtacagtgataaagcatctatattctgtaaaaaaaaaaaaaatctgcctatgcatgttttttaagaaaaaaaaaatggctgtatcggcctgtatgggactgtaatgcgcttagtggtctgacatatactggaaatgtatgtatactggcgtactttatattctctaaaatgcttaatgcctttgaaattttgtaatcaaaaaaaagctttgaaaaaatctaaaggggagagtattctttaaagtttttaacataagcttgtcaatgcacatgtagatggttagcatgtttagcaaaccttgtgaaattataataagtttgtagttacatgtgaaactctaaatgcatggcaactgttaatgtcataacagtttagttattttgttctgttctgtcatgtgccacaaaatatgtacttttttcacttttttccctttgtatatcagttacgggttacaactggttcattctgaaaacaacaacaacaaaagtccattcatattttttaacaattgtataagtgcccaagtaattcactacagcctaaagccttgcctttgtaatttgacttctgacatgttggcaatcaaagcatgcacttgtaacaatgaaaaagaaaaagcattttatattactactcaataaaatgtgcatgaacttacagaattctcatccttccactcgagtccgctgaagggatttatgtgcacaaccaccatgtgtcttctaggtgctggcccaccaccacacatcacaggctgatttccacaggcttcttcctaggggcctcgtgatctgaggggtggtgcctacttccactgtaagaaagaatcttggtggatttgtgtctcaaatcagataagagaagcctgtttaaagagcagatgccatcttctgggcttcctcaaggaggccagttaaaaaaccagagcattccttttttatttgaaaaataaaatttaattttgttatccagggttgttttcagttgtatttgggatgccctatctatctgctaaagcaaaagtactaggggctacttaaggtggcattttcatcacagaaaggagttgcatttgtattaacaagaaatttgtatacccacgcttcagctactatctaatcatcacccgaagatttaagatacaccaaatttcagtttgtttgtaacattgttcatctttagtgcactttgttttatataataaagtatgcctgttatattaaataataagaatatggcaattagcgatatagcatacccaaacaaagatgttctcgatacagtctggcaaagactatcccaaggttattttaatgaattcagacattttttcctgtggatatttctccatcctaaaaaaagtggcaaccaaggaaaatatttagatgcaacttactagagtgatgatgtgaaagaaatggtgattctggtatcatggtgtttattttctttcttataactgcagagaaaatatcctgactaaaaaaaattcatttttttggattcctttcttttacaaattgtgctgaggcaactatggcatagaaataaacatttgacattaaaataaaaaaacacaaaaa

SEQ ID NO: 47480 - DNA, 1586 bp, Homo sapiens
ttttgttgtttaactttctctcttttttttttttttcaaattactagaattttattagccaagggatagcagctggaggagaaataacaaaaaaatacatcttaagaatccttaagtacagtgcatatttacaatttaagtgtcatattttagaaggccactgtccatcagctcagtaaatgtaccagcttctaaagccatgatgccataggtccatttgttgatgaaattcctacccactgtcctcggggcatctgactctgggtctctgcactgggcatcaagagaacgctgctcgggtgggtttaaggctaacaccttacagggtaacactggtaacacctggccctgggagccagggtgcttttctccatgaaaactttccaccttgggtagctcagccgacatagacaacacacaaagcgcagtgctgcacttctgtccttatcttcacacagtgacatccacaccaggtggccaaacagaagagaaggcagaggcccaccaagagctgatgctgcgcagtccttgggggatcaatcctccggtctcactggggacgaaccccaggttctggagcctctccccctgacagacagcttgtcaccggcactttatgggtcctctgggatttcagacaataccccaacttctgtaggttcagaaagtgctttcaaagcaggcagtggcacccacacccggtgggacacacctcctgggtccgaaaccactccatcatgtggctggtgtggccaccgtgcccacaggtcaggcagaaattggacgatccccgcacagcccacgtgacagatggcacactggaacgtgaagcctttgcagatggcaaactgcgtgccacggacctcactccggcagtggctgcagtacacgccgaactcgatccctttgtgagggtcaggaggacaggagacaaacttcaacacttcagctcgcttctctctcagaccccaacggtagaggatttccccatagcatttcttaaagtcatcaaattgctgggtattggcggggtccaggagccttttatttttatcatgctggtcgcgttctcgctcacggggatcactgtaggtcagactcccaaagcggagctcttctggtgaggattctcccccaaggggaggacaagtgctctgcctctcttcccgctatgttccagccgccagtgttgagccctgggtctgacatactggagcaggaaccagaagaggtaaagctaggatatcgactatgggacaccacaagattagaagaacggttaggaaaaggcccaaagggtttggtagcccctgaggccgagactgggcttcaaacacgctacagagcatcgccagtgtctgaacatcccggagccggcaatagtgagccaacagggactccagcagctgccgcccaaatggatgtcgagcccagggtgtttccaaatctgggtcagatttcggaccaaggcaaagatctgtagctaccgtagccagcgaccaaacctggacaagatcctttcttccaacgagcaaggcagaggcggcattcttctgacatgtttcctgaatatcattcacattcaa

SEQ ID NO: 47481 - DNA, 1084 bp, Homo sapiens
tttaatacgactcactatagggaatttggccctcgaggccaagaattcggcacgagagaattcagaaggcctgtcaggtgaagtcttcagcctcccacagcgcagggtcccagcatctccacgcgcgcccgtgggaggtgggtccggccggagaggcctcgccgcggacgccgtctctccagaactccgcttccaagagggagcctttggctgctttctctccttaaacttagatcaaattttttggtttttaatcagttatcttgggaacttaacctggcccctcacctcttctgcaccccccgcccccgaaactgtctcgtaatgaatttctgctgtcctcctgggagtggacggccgggtcccgtcccccgggaggcatcgctcgggttcagcaccttggctcccagtgggggccccgtggagggcgcccgtagtgataagcacaccggcacgaacgtcaggtccattcctcgaagtcggagccctcactctgccctgtcctggggctggctgagggcgaacgccccaccttcactttctagagccctgtctgtcctagctcctatctgaccttgtgtgtaaatacgtacatctgtttttaaagtggatgggcccctgagaactcagtgaaatgcagagttctccatgcacctaaagctcctttgtcgctctcatggctgtcagatcctggtccctccacactgggtgctggggagggaggaccctcggggctaccgcgcgcccccccatcccacagatcaggagccaaggagggagaacagggcagcctgtgggactctaggatgcttcagaagaagcgacggcaccgtcaaccctctgttttttaaaggtggttggagactgttaacactgagctcattgacttctagagattttatttttactggttgatctcttggtggttttcaacttcctgctggaaactagaggtggggcaccccccaccccccagcctcgcactgtgtccttggggaaaggccccgccccaatcctggcccggtgtcactgtggcccggccacccctgagcgcccagctccctacctcctggacgtctctgag

SEQ ID NO: 47482 - DNA, 331 bp, Homo sapiens; identical to SEQ ID NO: 20537
  misc_feature (1)...(331): n = a,t,c or g

SEQ ID NO: 47483 - DNA, 1573 bp, Homo sapiens
acagtggtgctctttaaacctgaactcagaaaaacaggaactggaaaagggccccgggtgaagatggcggccaacaccttcggagaaggcattgagtcagaagcctacaggtgccccctgggggatcaggacagggaggtaccagtgttcacagacggcaggaaaacaattgggaacaataaattaggacttcatgttgctatcatttggcataacacaatcaggcttttttttttttctttttccttttaaatataaggcaacttgccaacacataacttaaaactggtcttcagtcacattgcttcagatcactagagaatttctggctaacgaacagtagtggatagtgaacaaaatgcaaaaccttaaataagaaccatcagctgacattccccagagacaagaggaaaggtaagggcttatttcatctgtaaaaaataaaaaagcccaattctgcatctttaacagaatggtgcaaaaatttgtaacaaaacagtctaagtttaaaattacagaaaagtgtttctagccaactaattgtcgcttgggatgagacgtgctgagcatggagtggatgaaggtatgctctaagaatggacagagggcaggaggggcttgtttccaatgtaggcccagctccaggtgttagaaccatgctcatttggtaaaggaagtactcaaagagcttaaggctttgtgtttgtttttttttccttcattaaactgaggggctgcactagagggtgaatgtacctgtggggccactcacacacaatgctactcaaacccacactacattcatacagaaacgtaacgtttaaaacttacagtgtagagcaatattcttagccagtgtagagagaaccaaatgcattttttttttttttggtgtttttaatcccaaactccaatgtgatcattccttacctacctaattcctcaagtaaggtagattttgtttttgttgagggggaaaggataggggctgtggggaggtgagttaggggacaggcaacagtgagaaagggatcttgggtatgctcaaaggtcactgtatttttctaggtttggaaaggggagtctggaaccaagatgccaatacaaagactttttccccccatatctcaagaaatggtcaaatacttccaagatgcccttgagatcaagtgtggcaagggcaagtgcagtggctgtgggatcaatatagacacaaaacaaagccttgaggaatggaaaggaacttgaaggatatgaagactgggtcagctttgatttgagatccttcgatgagtaagtaattagctttcagagcacctgggaaatcttgcttcttagtcctggagggaggggaaggggggtagcaacaggtagaggtctggattaggggcctgagcacctatactacctcaactagggcattccgtcagcccacacctcagtcgtcctaagggaaacaggaagagattcaagaaaagatgggtgggagctggctggaaatggccaaggtggagagactagctgacaggcagtcagtggagagaaaagcctgggcttagggttaggttctaac

SEQ ID NO: 47484 - DNA, 388 bp, Homo sapiens
aatccacctaaccctcaacaaaccatgatgtaatgaagcacgaatcacaccattttgtctctttcctaattcaaataggtccctggcattagttcatgccgagactagaaaactgaaccctagtactgttttttaaaacagttttaacagaaaattaaactgtatgtttgaaatcataagtaaaagtttgttgcttgcataagagtagcctcttgattctcatagtggtaattttgtgtcatatcatttagatgttgaaccatttcatttgtgcatgtgtatatgtgcccaaattcatcctctttgtttagaatctgcttacaaataaaactaatagaatctgaatacatttatcatatattcttccagggtatgagctcatggtgcc

SEQ ID NO: 47485 - DNA, 369 bp, Homo sapiens
caggtgtggaggcccccagcagagcagggctgagaggcctggctgagcccctcccgctcaagacagaactgaggtgtggacacttagccctgtgggacacatgcaggacatcactgtcagcttctttctggaagctcacatcccactgactacccctcttttccttcctgccccataccccttctacttattcccctctgcttgtgagtcttgccccaccacacctgcatccccatctgcaccccatcccctctccacctgcccttctcttccctctccatccaccatctccagccctgtgaagggaatgtactttcggtcttatacccccattacccattacccaaaagttacctttttttttttttt

SEQ ID NO: 47486 - DNA, 607 bp, Homo sapiens
ggagcttttgtgggagcccacaccagtcaagttggatttgaacccagctgctctgtactgcacttagaatgatgtaatattccaggatgctgctgcaggtggcgtatcatcgtacacactcagtgacatttctatcacaatcattttatggaagatgtgtgataatctgtttttactggtattaataaacacatacaatgaagaaaacagataacaaattttaagaccaaggtaagataactaatcaaggccatttaatccgtcacattcatctcataatagaaacacgttcatattccagtggtcaatgtagatttcaagttgaaaggcagtccctttagttgggggctgtccagagctgcagcagggctttgcacggaaggggtggccctgttagagttgcttctcctctagtttgtaacttactggacttttgtggaaaatatcagcgtcgctaccctcagaaacaaactaacagcacacgttaggaggagtcctcatcagctgttctcattgccagtgagatatattcagtattgtagatactacactaatttccaacataagaggcaggaaggagtttttggattctatccctctttttact

SEQ ID NO: 47487 - DNA, 777 bp, Homo sapiens
  misc_feature (1)...(777): n = a,t,c or g
ggcccaaggcagcctgtggtctgtggaaggaggcaataagctggtttgttccggtttgctgaagctcaccaaggccaatgtgatccatgccacagtgacctctgtgaccctgcacagcacagaggggaaagccctgtaccaggtggcgtatgagaatgaggtaggcaacagctctgacttctatgacatcgtggtcatcgccacccccctgcacctggacaacagcagcagcaacttaacctttgcaggcttccacccgcccattgatgacgtgcagggctctttccagcccaccgtcgtctccttggtccacggctacctcaactcgtcctacttcggtttcccagaccctaagcttttcccctttgccaacatccttaccacagatttccccagcttcttctgcactctggacaacatctgccctgtcaacatctctgccagcttccggcgaaacagccccaggaggcagctgtttggcgagtccagtcccccaagcccctctttcggacccagctaaagaccctgttccgttcctattactcagtgcagacagctgagtggcaggcccatcccctctatggctcccgccccacgctcccgaggtttgcactccatgaccagctcttctacctcaatgccctggagtgggcggccagctccgtggaggtgatggccgtggctgccaagaatgtggcctttgcttggctttacaacccggcttggttaccaagggaccttagacaangatttgattcaaaaaagattttgaatggc

SEQ ID NO: 47488 - DNA, 352 bp, Homo sapiens
ataaggagcaatgagaaacaaaactaatttttggagcagatggtctctggaattgcatatcctgctagtgattttctcatctttccttttctaacctaatgagaatgtcccagattcaattacctggatgtcaaagtcctagagccagaaatatattctctcatccctcttagcattctcttgctccctcattcactagggcaaatgtctaaatgaagaaaagtctctctcaacacctcgttcatgcaatcagcattagaatttgtaaggaaggaaggggggtggcatgaaaatttccattcttggggtatatgactgtcctgtttcccccaggccactttttttttttttt

SEQ ID NO: 47489 - DNA, 535 bp, Homo sapiens
  misc_feature (1)...(535): n = a,t,c or g
ggaaatggcaattatcagtgttggatttagttccaactacttgatttacaaaaatgtacatttagagaaggttaaaagaaacagtgagaaatgtaaacattcaaaatgataattgaatctctcagttgtgggaataattatcagagacatgcaactgaaaatgtctcacctttcatctttttttcttaattcataaagttatcttgtagaatttgatgagaccctcctagtcattctcaactggggcggtgctgtcaccgaatggtgtttgagagtgttggggctagggcacatttttggttgtcacagcaactggggtggcatttgctgcccagtgccaggaatagtaacattatgaatgccagggacagtgtgctcagtaaagtcttccatccaaaagggggcaaggcacggtggctcacgccctgtatcccaacactttgggaaggcaangtgggcggatcacctgatgtcangggttcgagacaacctgggcaacatggtgaaaccctgttgctactaaaaatacaaaaat

SEQ ID NO: 47490 - DNA, 458 bp, Homo sapiens
  misc_feature (1)...(458): n = a,t,c or g
catgattacgaatttaatacgactcactatagggaatttggccctcgaggccaagaattcggcacgaggttgctgaaacagcacaaacaataaagaaatccgtagaagaaggaaaaatagatggcatcattgacaagacaattataggagattttcagaaggaacagaaaaaatttgttgaagagcaacatacaaagaagtcagaagcagctgtgcccccatgggttgacactaacgatgaagaaacaattcaacaacaaattttggccttatcagctgacaagaggaatttccttcgtgaccctccggctggcgtgcaatttaatttcgactttgatcagatgtaccccgtggccctggtcatgctccaggaggatgagctgctaaagcaagatgagatttgcctcgttcctaaacttgngaaggaanaantgntctggaggaactacttttacccg

SEQ ID NO: 47491 - DNA, 1331 bp, Homo sapiens
  misc_feature (1)...(1331): n = a,t,c or g
taaactttttttttttttttttggtgtgtgtgttaatttaatcatacaaatattcatttatacaataaggaaaaacctcctcatctttatctcctcctaggcaccatgaggccccaccacaaacatccagctggctttctacacacaccactgtccaggtgggaagggcagccactgctgctcctgcattcacccaaggaaacaaaggaaaggtgcggcgaggcagggtggggtgagtaatcagcttgcacttctgagccctggcaaccctaccatcctctcctgctgggctcagattgaatttggggaggtatttattctcatgcccatttcccaccatggccaccctcaggccacaccagctgtttggtgaggttctctccaggctggaagtaactttgatgggcttaaggttacagccagtccttatgggggagagaaggctgactgcttcttgtagaaaaatgccccaaattcaactgtcctcacggcaaaaagaaaaaaagcatgcacacgtgcacatccatccacacacacacacctcactccatgcacactgacagattcttcccaagtctgaacccctctgtctccccaactgggttcagaccctatcacctaaccatggtgtctgcctcacctcctgggtgccagacgcaggtggtcctgcccagaggtggcctgccacttggtgaagattctaagaggagcagggactattggggctgagaggtagccactaccaccccactaggcaggggagcagagaggggccctaggcattgctctgaacccataccagtgaggggagagagaatgaatgatactgataccctccctgggctggggaagccatggacccctctgcctgcactccatgacttgcacttactctggccctctgcaaggagctcatctcgcctccaaggatgtgcacagaaatggtttgttcttgggaagggagacaaggtgcttgggacatttaacttgccaagtgtggttgcctagaagcaagaggaagagcaagacagacttctggcaggcccagacccactgacggtggcccatgaagcccctgctgggaaactgggaaggggcacccagtgttgggcagaagaggaagtcaggaaagcaggggttgtgaagcctcccacaatcctgccagggacagtggagatgtgctgcttcaaggctactaagcagtaagaacagctgggcatgcatgggctccagggaggcagtgtctcaggagactggtaccagcagcagcagtcctgcctaatgaggccctcagacaaaaagccatcctgatgnctgtggcgtgggtacct

SEQ ID NO: 47492 - DNA, 1265 bp, Homo sapiens; identical to SEQ ID NO: 3032
  misc_feature (1)...(1265): n = a,t,c or g

SEQ ID NO: 47493 - DNA, 1290 bp, Homo sapiens
  misc_feature (1)...(1290): n = a,t,c or g
tttagtttataatgttttactatgatttagggcttttttttcaaagaacaaaaattataagcataaaaactcaggtatcagaaagactcaaaaggctgtttttcactttgttcagattttgtttccaggcattaagtgtgtcatacagttgttgccactgctgttttccaaatgtccgatgtgtgctatgactgacaactacttttctcctgggtctgatcaattttgcagtagaccattttagttcttacgggcgtcaataacaaatgcttcaacatcatcagctcccaatctgaagttcttggctgcattgtgtcaaaagaaatttccttattttctactgccattcccataaaagtaagtagtctcatttttgccatattctgttcatgtaacaggccaagtgaatcaatgaagtctttattattctgataaaacttgacatatgatgccaatttagcactcacaaaaatggttaaaagatcatgaataagctcgccttccaaaaacttgactggttttaaagtaagaaggtggtcaaaaagaaatgcatttggatctttcaatgctcgtacaatacacctgtgggcatcaactcgagcctgggaagcattgtcctctgtgtaacttccgagcaattccaccatgacttttgaagcagcatcactcttcttacaatccacaagtgcctcataaagtagtcttaaaagggtgtgctttttttcagtggtgagattccagtcagaaatccattttctaacttgatccagctcagttgggatgtactggatggccccacaagatgctgccactttaataaggctgcaatacactgtgtatcttacaggagtattcttatccatcccgtggaaaaggttgcttaaaaaactgcaagtctcagagacgggcgttcaccttcgcgaaaatttgacccagcttttcaacataggctttcaaatcaaaagcttccttgcttgtctggctcccaggatccaagagtagggatacccacactgttcatcacactttcaacgatctttatcatcctccttcagacacacatcacaggcttcaataatttgagctaaatcaacatgaagtccaccttccgagttctcttctgaaatctcagctcctttagatttcagataagcacgaagctcagcagcctgatcttcttcacatgatgtcgatgaaggccgggacgctcatggtgcagggcccgggcacagcggacactccactcgcaagaccacgccgaccgnaaaagggaactgggccgcgcgacgc

SEQ ID NO: 47494 - DNA, 1184 bp, Homo sapiens
  misc_feature (1)...(1184): n = a,t,c or g
tttttttttgatgaagtaggatatttgtatatttgctttttttcaatcattcagttttatgaacatggggtcaaagcgtatttcaaaataaagaccatttataaaactggaccactttaatgtttacaatttaataaatctcttcattgcagacatgtatggctgtttggtagtattcagaaacatcacagtaatggcagtttcttcaattggtgtgtagtcctcaataattatatatgaaattgctgtcaaaccagtaagactgcatttatacatccatcattttcaggattgttggtaacctgggcatattttccccaaataactttgcctccttgtgtcacaaggcccaattcgctcacatttacttcaatgacagtacctttggtaataacacccaaagttgtatacagtggggatgagggattcttctttacaccaagtattggtaggcaaaaggtggctttcagttcaggatgtgttacatgggctttcttgaaacgcaagcccattggcctgatgaatctttcatatttaggtggttttcttgtaaagccatctccaacaaagcacactttagtaaccattctcttccatgccttcttctttctctttcctgttcgaataacttttaatacttctgtttctccctgggcacgtactttaggcagagggacttcccattttcccgccttctcttttcttttctgtttaatcatattggaaagtactttagctcgagattgtccctctctgtccagcagataggcaggtactgctccctgtggtgtcttttcatcattcttttgtttggtgtttctcttttcatgcatcttgatagtctttttcatttgtattttctcagcatgacgctgtttatggtaaagcttagccttcagaccaatcattttctttgccttctttgaacgttcatgagcctctcgactttccttctttctctttttctcatggtaatccaaacggtatccatagcgtttacggtgtaattcaatatattcattctgtggcatggtgacggccgcagagccgccaggagcagccgctggagtgcgaaaacgctctcaattttcgggtctcaaactcgtgccgaattcttggcctcgagggccaaattccctatagtgagtcgtattaaattcgtaatcagtcaancngttnncaaa

SEQ ID NO: 47495 - DNA, 678 bp, Homo sapiens
gggtggtggtttattttcttctttattctctaggattttctatttggatatactctaggagttaaatgataaacttttgaatagggaagaaggtggggtggtgaaatttgaaggccaaacatgtgctttcaaacaaaagaattcactccatttccttttccacttttctacattttccagaagaactgatgaccaccccaattttacagcccactgaggccctgtccccagaagatggagccagcacagcactcattgcaggtaatagactctgagccaactccaagggaccttctggatcaagggcatctctctccagagggaagcctgaccaaatccattaatgggctcactctggcttgtaagttatattacacacacacacacacacacacacacacacacacacacacacacagccataaaagactcggaggcttctgtcagaggcactaccagtaaatgacaggttgggaggtggccgcaaatagatatgcatacggacgttacacttgagtacgtgggtagggacgaggatatatgtggttggttgagtgggtgaggaagagggggaggatcagataaaccacttcctgttaggataagccatttcctgttccctccttcccgtttctttaagaatcaggaactggtttgggaggcagttcagttttgtcc

SEQ ID NO: 47496 - DNA, 1316 bp, Homo sapiens; identical to SEQ ID NO: 3051
  misc_feature (1)...(1316): n = a,t,c or g

SEQ ID NO: 47497 - DNA, 1700 bp, Homo sapiens
tttttttttttttttttttgaggaagcaatttctttaattttatcggaatccaggacacaacaagaaaaacacccaaaaaccacatggagacagaagacgagacacaactcctcccccactgcctccctgctctagagtggggacaaagtgggggtgagacagctggggggagacctgaacctcagtccagccctacaggctccaggcctgcagggaaggagggtaacggggaggcagggcccagccccccagtgtggggaaacagctgagggaaggcccccctcaaaaggctccacctcctcaccagcactcctgcccagggacagggagcccacagcagcaaggggaccccggggccatggccacattcatgactgagaagcagctgagtggaggcaggagacacgattatctgggcagaatcagttggggcaggggcctgggagggccccatgggccaaaccctgaggtcacaggagggggcccaaagcggggctagtgagtgaggtcctgagtgagtgggtcagcggctgggccccttttccagcagctgtagcccttccatactgctgccaggggggcccgcctccagggaaatggataagaaagcagcctgcccctgctgcagacagagccaggtggctaaggccaggaaggaaggcccggccaggccttgccacctgcccccagaggcctgtgggaaaaggacaggtcaggaagggtggggacaggggctcgaccggctcagatccaagatggtgccacgcttgcttgctgagtcccccatgagctggggtactgcactggggccagcgactagttagacaggaggcagcagcttctcaagaaattccttcacagctgccatctcctgaggacaggagctgtgcatgacacccgggtatgtcttgaactggaccctggcaggtgtgacaacagaccggagcttctggagccgtcagggccccaaaccgtacgggcaccatgggtccagctccccatggcactggagtatggccaggtccttgcactgccattagctgccctgggggaaggcccggtgcagaggcagccagcagctcaacgccacgatgccagccagagggtgggggcaggtgagggccgtgtagagggacagggccccgcccctgtgaaaagcctcccaggacgattcgattggcagggatcccgttcttcatttcatgctcaatcaaggccttgatgttctctgctgccttcttgatgccagcctcgtcctctggggcatctggactcagccccatcaggtcaaaccaggagggcatcaccatcttcatgttgagggtcacagggatcctaggcgcatggggacagatgtacttgacgtgagggagccggatggtggagagggcgtcagcccagctgtgccctgtgtctccaagtccatgtaaaaaaataaccgcggccgtttcccgctcagctccagacacggtggcagcatcggtgagcaggggcacagacatggtgttaccacacatacaccacacggctccacggcgggggcctgcatacatcggggcggcggtcaagagcaaaaccaggcacaggacacactcctggcccaagaggccaccaggccatcagccccacacagcacccaggttctgtcctccactccctgggacttccgaggccgcttgggcgattctcctctttctcc

SEQ ID NO: 47498 - DNA, 950 bp, Homo sapiens
tttcgagagcgcgcagagtccagactggcggcagggcccgaggggccgacccgcagcgtccctggtctctccagccctcactcggaaccgcacacagtgacaataccctcccctcccttgggctggacccctctctacagctaggagccaatggcagaagacaaaaccaaaccgagtgagttggaccaagggaagtatgatgctgatgacaacgtgaagatcatctgcctgggagacagcgcagtgggcaaatccaaactcatggagagatttctcatggatgggctttcagccacagcagctgtccacgtacgccctgaccctgtacaagcacacagccacggtagatggcaagaccatccttgtggacttttgggacacggcaggccaggagcggttccagagcatgcatgcctcctactaccacaaggccaacgccttgcatcatggtgtttgatgtacagaggaaagtcacctataggaacctgagcacctggtatacagagcttcgggagttcaggccagagatcccatgcatcgtggtggccaataaaattgatggtggggccatccctgcacctgggtgttagcaattcaactggggacctgccctcatacatttcctcctccattccccgggcaggcaaccttcagtgattggtcctccctcccacgataagatacaacccttggttggttgcttgcattcttcccaccttataaagaagccagctaagccgacctgccctctttccaagacacagatccctattaactgagctctttctaggacctgtttcccaatcatccctgcctatcccactttctggaatgaaggcctccagtggcccccccctccaaaccttcttcccttcccttgacagacagaccaatgtcctaccttctctctacagcagacataaacgtgacccaaaaaagcttcaattttg

SEQ ID NO: 47499 - DNA, 555 bp, Homo sapiens
gattacaggcatgcaacaccacacccagcctgaaacccagatttttaatatgaaatcaaagtcttcagaccttgtaggtgtcataaaaagcacgctgaggaccactagtttgcaactgccaatctaaaatatcatagacattatatcacttcaaccacgaaaaaaaaagtatgtgaggcagaaaatggaagcaaccatgcctaatttattgttgaatactttttccgtataccaagagcttcctttgcactagcatctgaaactatatccagaatgacactggttttcataaaagtgttgatcctcacacctctttatagtcttgcacctagcccagtggagtgaaacactttaaatagcacttgttccttgagtatatatggaaaaaagtgaagtattgataagtgctcagctaatatgagcagcatctcaggagtctccaattcttgaattaccagggagtatttttaccattttcccccagtgaaaggcctattttaagagacttatcctccaaaatgaatgtattaagtcatgttcctttttttttttttt

SEQ ID NO: 47500 - DNA, 405 bp, Homo sapiens; identical to SEQ ID NO: 20641

SEQ ID NO: 47501 - DNA, 1142 bp, Homo sapiens
aggagcgcaggtaaggcggcaccccactcccggcggcctccgggcctccttccgcacgcaccccgagctgcctccgcacagttggaggagcgtaggagggacccccacccagggatgacactccaggaaggggactgcggaggaagccagactgtgtccctgacaatgggaacagccgacagtgatgagatggccccggaggccccacagcacacccacatcggatgtgcacatccaccaggagtctgccctggccaagctcctgctcacctgctgctctgcgctgcggccccgggccacccaggccaggggcagcagccggctgctggttggcctcgtgggtgatgcagatcgtgctggggatcttgagtgcagtcctaggaggatttttctacatccgcgactacaccctcctcgtcacctcgggagctgccatctgggacaggggctgtggctgtgctggctggagctgctgccttcatttacgagaaacggggtggtacatactggggccctgctgaggactctgctagcgctgggcagctttctccacagccatcgctggccctcaaactttggaatgaagatttccgatatggctactcttattacaacagtgcctgccgcatctccagctcgagtgactggaacactccagcccccactcagagtccagaagaagtcagaaggctacacctatgtacctccttcatggacatgctgaaggccttgttcagaacccttcaggccatgctcttgggtgtctggattctgctgcttctggcatctctggcccctctgtggctgtactgctggagaatgttcccaaccaaagggaaaagagaccagaaggaaatgttggaagtgagtggaatctagccatgcctctcctgattattagtgcctggtgcttctgcaccgggcgtccctgcatctgactgctggaagaagaaccagactgaggaaaagaggctcttcaacagccccagttatcctggccccatgaccgtggccacagccctgctccagcagcacttgcccattccttacaccccttccccatcctgctccgcttcatgtcccctcctgagtagtcatgtgataataaactctcatgttattgttcccaaaaaaaaaaaaaa

SEQ ID NO: 47502 - DNA, 1468 bp, Homo sapiens
tccatgaggtactttggctccatccccctcaaaaacaaaacaaaaaatccatttaaagtgtcctcctagaaaagcctcagaactgccttcaactacatctgtcacctttatagaatattttgaaattctggaagaggatgggaaacaaaattctaatttagctagagctgtgatccccaaataagtgctgacaaaattgtctaccacagaaaggccgtccttgtcatcttgtaggcatcactgctgctaaatcacatcagtacatgccttctgtggggagatggcagggggcaggggcaggaccaggggatgggattagataaagtgtgataatgtcctttagataaaagaaatcctacgctatagaacaaggttctgtactcttgagttggtgtctgagatcacctgcacagtgttacagagattttccactccataaatcactctaaaagagtttgcataagactcggtagacctgtgctattcaatgtggcagtcaacagccatatgtggcgatgactactcaaagtttggcttgttcaaatcgagactgtgttgtacacatacaatacacaccagattttgaaggcttggtaccaaaaaggaatttaaaatatttcaccaatatttcatattgataacatgctgaaatgacactattttggatgtactaagtaaaatattaacaatttaatatatttatataattgaaattaaaattcttttcacccatttttatttttttaaaaatgtggcccctaaggaacttcaaattagacatgtggataacgttatacttctattggacagccccactctagacttacatggtgtggggtaggcagtgaaatccgtaaataggaaacgcaattctgcaaagtatctaaatagacagaaacaacacaaatatttttgctggagtcaggagcactgtgaggcacagaacatctcccagaaagcagattttttttttctgccgaaaaaccaatatatatatgtatgatcccaattaaaagacaaaagcaaatgagccccaaactgcctgtcttcagctttgcctgggagctgctacctttgctcttctagcatcttctaggtaccaaggatattagccacttgagggtgttgggcatatttgtttcattgtaggcaaaatcctcttgtggtttcccctccccaggtattgttgagtctgttcaaagctgggtgtgttgaaacactgcacaaatcctgccactcttgatgtgccgcttgtctcagccttggcagaggctgagtctgttcctgtgcccacctgtccagcaggttttgatgttggctcctgaaagagtttgtatttattttattttgcactagtcacagttgttgttaaactgtatcaaatgttttgggagattatttgcctgagatggaaagagagatggatgatttattgcttcaattgttttaaattaaaagctattctcac

SEQ ID NO: 47503 - DNA, 484 bp, Homo sapiens
tttaagttcgtggattaatatcactacttgaatactgacagttgttgattagacaccgaaaggttactgattgttgaatgtatctgtgttagagctgtgcactggcacgcttgcatcaggggctggggccacacggccgccacacagattcccccgtgatgcctggagctgcttccagagccgggtgtctccaagaggcacctgtaggacttcccatttagaaatctcttgagtgggtttgtatgttaccttctccaaggtttatttaggacagagatattgctggaaggtcatgggtcagattccctcacaacccacctcgtctgcgggtgcagccccactccaaggctccccgttattggggtatgtgaggagcagtaaatataaaaccagttcaactgtcctcatggaatcaccctttctgtttttgcagtattcataaagctagtgtaaggtctggttttagtctattaaatcttagaga

SEQ ID NO: 47504 - DNA, 642 bp, Homo sapiens; identical to SEQ ID NO: 3073

SEQ ID NO: 47505 - DNA, 669 bp, Homo sapiens
tctcctcttctttgacttaagaggcagtagactcacaagcagatactgttgattcctgaatggcaacctaactggggtacaataatctctttaagaccgctggaatcaaaatttaggaagtctgagaattcctgaagccagtgtctcatcactggcaaaggcacagatgcaagcaaagaaatgaatgcatctctgggctgtctcatccttggaggcatttgacttgtgcgatttcagagtctgacaggagcagaagaagcggcgctcaggcaagcttttgccactgactttctgcacaaaagatgtatgcaaataccccaaactgtgcttctggcttgccttgcatttcaccaccaagatgtttttagtaattctctgcaccagaggacctgtgggttccgtggccaactgccagatggtctgtttggtttccggggaggcctgcattgcattcaggaccgagctcttcagggtcagaggggtggcctctgcctgggcagtttcaccgccagcttgatgtgctggcactggttttccacaacgccttgagtggcagctttcaggcatgaggggacataacaccgtccagagctcagctgagtgatgatcgtcccatccactgtctggattgttgtctctggaaaccccgaggttccacaaagcatcggt

SEQ ID NO: 47506 - DNA, 1010 bp, Homo sapiens
gcgccggcggagcagtctgagcccgacgatgaggccggggacgggagctgagcgtggaggcctcatggtgagtgaaatggagagccatcctccctcgcagggtcctggggacggggagcggagattgtccggctcaagcctctgctccggctcttgggtctctgctgacggcttcctgaggagacggccctcgatggggcaccctggcatgcattatgccccaatgggaatgcaccctatgggtcagagagcgaatatgcctcctgtacctcatggaatgatgccgcagatgatgccccctatgggagggccaccaatgggacaaatgcctggaatgatgtcgtcagtaatgcctggaatgatgatgtctcatatgtctcaggcttccatgcagcctgccttaccgccaggagtaaatagtatggatgtagcagcaggtacagcatctggtgcaaaatcaatgtggactgaacataaatcacctgatggaaggacttactactacaacactgaaaccaaacagtctacctgggagaaaccagatgatcttaaaacacctgctgagcaactcttatctaaatgcccctggaaggaatacaaatcagattctggaaagccttactattataattctcaaacaaaagaatctcgctgggccaaacctaaagaacttgaggaacaagcacaacttactagtacccctgctattcaggatcaaagtgtggaagtatccagtaatactggagaagaaacatctaagcaagaaactgtagctgattttactcccaaaaaagaagaggaggagagccaaccagcaaagaaaacatacacttggaatacaaaggaagaggcaaagcaagcttttaaagaattattgaaagaaaagcgggtaccatcgaatgcttcatgggagcaggctatgaaaatgattattaatgatccacgatacagtgctttggcaaagttaagtgaaaaaaagcaagcctttaatgcctataaagtccagacag

SEQ ID NO: 47507 - DNA, 1458 bp, Homo sapiens
gcggcacgagggcggaacaggctaccaagtccgtgctgtttgtgtgtctgggtaacatttgtcgatcacccattgcagaagcagttttcaggaaacttgtaaccgatcaaaacatctcagagaattggagggtagacagcgcggcaacttccgggtatgagatagggaacccccctgactaccgagggcagagctgcatgaagaggcacggcattcccatgagccacgttgcccggcagattaccaaagaagattttgccacatttgattatatactatgtatggatgaaagcaatctgagagatttgaatagaaaaagtaatcgagttaaaacctgcaaagctaaaattgaactacttgggagctatgatccacaaaaacaacttattattgaagatccctattatgggaatgactctgactttgagacggtgtaccagcagtgtgtcaggtgctgcagagcgttcttggagaaggcccactgaggcaggttcgtgccctgctgcggccagcctgactagaccccaccctgaggtcctgcatttctcagtcggtgtgtaatcacgttccagggcccaaagcccagctctttgttcagttgacttactgtttcttaccttaaaaagtaattgtagatggaaatcagttgtgtttggcaggagaatcaataaaaatctttgattcagacagcttatggggtattttaagcattcttagactagttgaacatctcactttgccccagttacaaaaatagtagaacaagcaacataaaacaatgaaggaaacctcacttgaaggcccaggtcaacatctaagcctgttgagacttagataatcgagtctacctcttcagtaggtttgtgtggatggcctggaggcaggtgccctctgctccccagtgctacctctctcttccctagggccttttgtggattgacagtagtcccctccgtaggagctcacagtctagattagaagtgttttaatttctacacacccatagtgcacacttgtatattgaaaagatagggaagagagaaacatttatggaatcagtcgttggcaccttcaatacttcatgatttttgtcgagtttacttcatgaggaggtcagcccattggctcccatctgaaccactttgcctctgaaacttaattacatccagaaaggaggacacttgtatgctagtctatggtcagttgaggaatatgactgtttttatatgcacatgtaacccaaatgtccaatataaattggcttattttttaaaataattttaaaagttgggaaaagtgttattatttggcatgcttaaatattgaataagtattcttcatcagcatttaataaatgtataggcagatgtaaggtaatttctgtgtattttgagataatgtcaaaatcatgaatatttcaaaataaactggggagttataaaaatacaactagagata

SEQ ID NO: 47508 - DNA, 405 bp, Homo sapiens
gcacatttccaaagtaaatgctcatttttagcacagaatcttttaaagaccttacaatcaaatttatatcacattagtccatttcaacgccatattttctatttatctttacttctgtgtcctataaaggaaatgatatcattcaacattcaaaagcatcttttaaaaaaattatttttttagtctttctatttgctctttggagtcatataaatttctttattttttcattcttctctttcatgtaaagttgctgattttataatactaagatttcataaaagaaaaagaccttcctctaaaacaaatgttctatgtgaggaaaaaaatacacctgtttgcaaggtgacatttctttgaggggtcactcatggcacagcctggggatacacagaccacgggcca

SEQ ID NO: 47509 - DNA, 1530 bp, Homo sapiens
agacctcatcacactgtccattctggctttggttagcagcttcttctacagacacaaagatagtcggtatctgacgccgctggtctgcctcagctttgcggctctgaccccagtgtgggtcctcattgccaagcagagcccacccatcgtgaagatcctgaagtttggctggttcccaatcatcctggccatggtcatcagcagtttcggaggactcatcttgagcaaaaccgtttctaaacagcagtacaaaggcatggcgatatttacccccgtcatatgtggtgttggtggcaatctggtggccattcagaccagccgaatctcaacctacctgcacatgtggagtgcacctggcgtcctgcccctccagatgaagaaattctggcccaacccgtgttctactttctgcacgtcagaaatcaattccatgtcagctcgagtcctgctcttgctggtggtcccaggccatctgattttcttctacatcatctacctgggtggagggtcagtcagtcataaacagccagacctttgtgggtgctctacctgctgggcagggcctgatccagggtgacaatcctgctgtacctggcagaagtgatggttcggctgacttggcaccaggccctgggatcctgacaaccactgcatcccctaccttacagggctgggggacctgctcggtactgggcctcctggggactctgctttttcactgactggctactgaagagcaaggcagagctgggtggcatctcagaactggcatctggacctccctaactggggccccgctggtcccatttgctcattagaatttcctctcacatcagtgggatacagaattcagtttctcccttgccaggtccttgggatggttgacccctgcctctgcagtagccttttgtgagtctgctaaggtagctctcacacacctcggctctggggttgatacctgagcctgcaatagagccctgaaatcaagagcatagcttgagtgtgtgaatatgatgtgtgcacatgcttaatgagcgtgcaagtgtgcacacgtttgtggagaggagggtgttctggcctgagaaggtaaagaagaggcatgtccagtatgctttgcagggtgtgtttgctcttttccatgcccatgcaacccagattggggtggagcaggaaggagctcttttctgttcccaagcctcagaactcttgagctgtggcttacttgctgtcttcaccaggttcaagctccgtgggccacactgctgctgtgccaagaaggtgtacagcctccccaggatggggcctcatacaacccttcatctgcactcaacatttaatcgtgtccttgctgtctttttattttcctttttgtttgttagcaaaaacctctatttagatttcaataatcagagaagtgtaaaataaaacagattatattgtacttgaccctttatgtctttaaagatagttaatgcaaccctgaggcttggggtctataaataacaaaagcatctggaaaaaaaaaaaaaa

SEQ ID NO: 47510 - DNA, 1372 bp, Homo sapiens
agagaaaaccaacagatcaccgtctaagtgcgtcgcttgggcgccccaccccgtctgcgtcctgcatccatctccctgttacagtggcccgcatcatgattaaagaatgtggatccctctgtctggggtgggatgccttactttgcacttaatttaataagggcattctcggaggagtagacgtttaatacgaagtggcggcatagccctgccgagatgtcggtgatggcctggatgctgtaaccacaacctgtggctaaaaattttattttctatcctttacccgtcattatcattagttgctatgattctttctgcattttcggttaactatcatttccaaagacttgtcattcagtaatattagcagatagctgcttcgataaaggaatttggagtttaaaaatcaacttgtgaaaacaaggttgtttttgtctttatcgtttgttagagttatagatttatgatttcataggcttgattctatgtgaaatatctttttacttttatgcattttaataagatttaaaaatatttagattaaagccccctttaatgagtacaagaaaaactcttggcttgttagaagaaagtatattctttctagaatttggtgcaggaatatgtgttcatatccaggcaaacgggtgtgtttttatcttcagacaatgaaaccttctcctctggggctttgttgccaggaagattagaactaaatttatttttttcatttctgtcatgaaatcattccagatacctcttttcttctttccaaatggttttcacatgtgtttgaaatatttgtacttcgaattgtcggattttccatgtcctcctttctcctttgtggcccagcctgagtcaggcaccaatcccgcattcagaacctccccagtgaaagggcagccttcattttgagaaggtggaaggtgttagggtttgggagacagctcatccaatctcccaagtctcatggtggatttgtgactgtgagagtttccggtttaaaatctgaaaagccagatatgcctgtttccttttcccagcaccatgcctgtggaggggacagtcagacccagaggtcctttacgtgtggatggagttcacaggcgaatagaggagaggaccaggggacgtggcttgtcccttttgtccaacaaagcattatatttttaagaatggcagtcctgtttgctgaagtgttcataagataacaataggcttgaatctccaattcaaatgaatgtcaaagcacatatctttaatatgctgaatgaatatttatttttgtatccattaaaacagtatattgatctcttttattctttattaaaataaaatgctcttttttaaaaaaaaaaaaaaaaaaaaa

SEQ ID NO: 47511 - DNA, 818 bp, Homo sapiens
tgggactctttgactggccttttaaaaggaacacacacagcagtcagcagtaatgatcgggcaagtctcattaacaatgcatttcagctcgtcagcattgggaagctgtccattgaaaaggccttggatttatccctgtacttgaaacatgaaactgaaattatgcccgtgtttcaaggtttgaatgagctgattcctatgtataagttaatggagaaaagagatatgaatgaagtggaaactcaattcaaggccttcctcatcaggctgctaagggacctcattgataagcagacatggacagacgagggctcagtctcagagcaaatgctgcggagtgaactactactcctcgcctgtgtgcacaactatcagccgtgcgtacagagggcagaaggctatttcagaaagtggaaggaatccaatggaaacttgagcctgcctgtcgacgtgaccttggcagtgtttgctgtgggggcccagagcacagaaggctgggattttctttatagtaaatatcagttttctttgtccagtactgagaaaagccaaattgaatttgccctctgcagaacccaaaataaggaaaagcttcaatggctactagatgaaagctttaagggagataaaataaaaactcaggagtttccacaaattcttacactcattggcaggaacccagtaggatacccactggcctggcaatttctgaggaaaaactggaacaaacttgtacaaaagtttgaacttggctcatcttccatagcccacatggtaatgggtacaacaaatcaattcttcacaagaacacgggttgg

SEQ ID NO: 47512 - DNA, 1156 bp, Homo sapiens
ggaagagaatcaagaacattatcatatagttcaaaagtttcttatcctgggagacattgatggtttgatggatgagtttagcaaatggctttccaaaagcagaaacaatctacctggacacctgcttcgctttatgactcaccttattttgtttttccgtactctgggactacagaccaaggaggaagtttctattgaagttttaaagacatacatacagcttttaataagagagaaacatacaaatcttatagcattttatacctgtcatttgcctcaagacctagctgttgcccagtatgcattatttttggaaagtgttacagaatttgaacagcgccaccattgcctggagttggctaaagaagcagatttggatgttgcaacaataacaaaaactgtagttgagaatattcgaaagaaagataatggtgaatttagtcatcatgacctgggccccagccctagatactggcactactgaggaggatcgtttaaaaattgatgtaattgactggttggtatttgacccagcgcagagggcagaagcactgaaacaaggcaatgcaattatgagaaaattcttggcatcaaaaaagcacgaagctgcaaaagaagtatttgtgaaaattcctcaggattctatagcagaaatctataatcagtgcgaggaacaaggaatggaaagtccacttcctgctgaagatgataatgctatccgagaacatttgtgcatcagagcttatttggaagcccatgaaacctttaatgagtggtttaagcatatgaattcagttccacaaaaacctgctttgatacctcaaccaacttttactgagaaagtggctcatgaacacaaagaaaagaaatatgaaatggattttggtatttggaaagggcatttggatgccctaactgctgatgtgaaggagaaaatgtataacgtcttgttgtttgttgatggagggtggatggtggatgttagagaggatgccaaagaagaccatgaaagaacacatcaaatggtcttactgagaaagctttgtctgccaatgttgtgttttctgcttcatacgatattgcacagtactggtcagtattcaggaatgcctacagttagccagatatggtatcctctgagcgccacaaactgtac

SEQ ID NO: 47513 - DNA, 501 bp, Homo sapiens; identical to SEQ ID NO: 3095

SEQ ID NO: 47514 - DNA, 951 bp, Homo sapiens
cggctagatatggcgtcctctttgcttgcgggcgagcgattggtgcgtgctttgggccccggcggagctggagccagagcggctaccccgaaagctgcgggccgagcttgaggccgcgctggggaagaagcacaagggcggtgatagctccagtggcccccaacgcttggtttctttccgtctcatccgggatctgcaccagcatctgagagaaagggattccaaactatacctccatgagctcctagaaggcagtgaaatctatctcccagaggttgtgaagcctccacggaacccagaactagttgcccggctggagaagattaagatacagctgggccaatgaggaatataaacggattcacccgcaacgtcacttgttcaggattacaagacatggtggggattttcaggcgacctggggaaagcaagtgagatcattgaaggctctggtcatcaccatcttcaatttcattgtcacggtggttgctgccttcgtctgcacttaccttggaagccaatatatcttcacagaaatggcctcgcgggtgctagctgcattgatcgtcgcctctgtggtgggtctggccgagctgtatgtcatggtgcgggcaatggaaggcgagctgggagaactgtaactggtgcttcatcatcaagtctagagaagactttgggggcttcaggctccaattggcagtcaccgactcagtcaacccatcagactttttgtattcagctccagttagtcagaagaccagcccaggccagctgctgtttctgtggggagccctaatcttctgtgaatttccaaagggagcattggaggagattgagataacacatctttaaaacagaaagaactggtcttggtctatcagtacctcttcctgaatctggtacccatctgccttctccagttcattctaaacactgctgggactagggttt

SEQ ID NO: 47515 - DNA, 3390 bp, Homo sapiens
ccagttttggtctcaggtgtggactcggcaagaatcagcgcaagagggaagcggagttatagttaccccggccgcggagccgctcgactgcactacccccgcccccttctttcctccagacgccgaagtcgcgggcgctcatggcgggcctggaggtactgttcgcatcggcagcgccggccatcacctgcaggcaggacgcgctcgtctgcttcttgcattgggaagtggtgacacacggttactgcggcttgggtgtcggtgaccagccgggtcccaatgataagaagtcagaactgctgccagctgggtgggaacaacaataaagacctgttatgttcctccggtattgagtattaaggatggggtccagaaagctccttgttgaaagccattcaccgtgggagagcagcatgatccttcaatgtggttggaattttgggttcacagcaaagttggcagatttgaccctgaacttggatgattattttcgatggcagaacacctgggtgacttccacaggacctacaagaacagtgaggagcttcggtctcgtattgtgtctggaatcatcacacctatccatgagcagtgggaaaaggctaatgtaagcagtccccaccgggagttcccccctgctaccgccagagaggtggacccactccggattcctccacaccacccacacaccagtcggcagcctccctggtgtgatcccctgggcccgtttgttgtcgggggagaagacttagacccttttgggcctcggagaggtggcatgattgtggatcccctgagatctggcttcccaagagcacttattgacccttcctcaggcctcccgaaccgacttcctccaggcgctgtgcccccaggagctcgctttgacccctttggacccattgggaccagcccacccggacctaacccagaccatctccccccgccgggctacgatgacatgtacctgtgaaggcctcaagaatgtaacatcccaggcttccctccattctcctggagctgccaccgctgtccccatcagcaaccatgttcttgcaggctgggggcaagggattctgctcatgtgtttgcagaccggctgggatagcctccccaccccttatcagagccaagacacctgctgcagctctccacctagctgcagatagctcccaaagagaaatcagtgtgtctctttcaccatcagctcctcccctttcaccaccagctcctctccacttcccaagggagactccggcaaccttcagcaacatatatcctcgaccagatgcagtgctataagaacagaacgcattttggatgttattattaagaaccaaatgtcaatacagaattcatgttgccggtttcccacttttctttttacattaatgcatagctgcttccatttatgagactttagagtttgagtttctgtagggctgaatgactctttttcctgcccagggcccattcttgcttctcaggcaccttccgtttattaattgccattgctcctgacatcactaagatgggtccccttctggctgcatgaatggaaatgagtgactggaaatcccataggccacaagaatgactttcacaagggcaggaacattgtggaaagactgcatcattctgatgaggcaaaatcctccagctattcctgtctgggccagttttgtaggtccatctgtgcatgggcagcagtagtcaaaaagccaaggaaaaaacagagcagacctgaaggctaatcttatttttgccactaacttagtgaatgaccctaagcaagttccttctcctcttagggccttgtgccaagcctatgaaattggaggtggctttcctgctctaaagcattttgatgtctcattctgtgtttggtaacccctataaactggggcagaggaaaagaatgatggttcaaggccatacttcccttgaaccttgtgtggttcttgcctaactctgtggtttttggaccccatggggcccagacagagcacaggagcatgggctgcctctgagtgtggtgttgaacttcgggaggagcagggagccctgcaccttgtgtcctggcccacctgacctttggtgttctccggatccttttcagcccgaggcctgacagacgcgggcagtgatgagccctgttctggagtggaaagagcacgatagagcaccaggctaagaggcacgagatcaaggcggtagtcacttccgctctgcagctagcatttcaaccatatgtggatcctttcatttctcagctccctggattccttcccctaaattaggacctattatttacctgtaggtaagcaagctactgtagctcttctgaggtatctcccaggctgttttctgtagcctcagattgcctatctgcttagccctgagaacaggtagatgaaaactaaactgatgcctaggcccagggtcagtctcagatggaagctggggcctgggtggggaggctagcatgcgtgggctccctggggtatttctgtcagtccccatgggcaagcagttgatttagtaaaacaccccagagtcagggaagccaaccaccttgaaacctttaggaacattttctgctttggagaaagacccagagatcaggcagaggtgcagattcaatcattactcataacctttgagagctggcaaatgggaggagtgttagtctttgttttggaattggaccattcttgcaaccaaaaggacttagagcagtttgctcataaagacatcctttattataaaaggaagtatttaaaggatgatagagaccatcagatagaagcagggaaggtagataacttttaggaccttgatgtgaggaaaagataaaatttaaacaataaatttgcccacttagattttctagcagcaaagtccgaaaagatagttatatacaaaattctgttttctgaaaacaaaattgtgattcaccttcagaattggccatttttttttgtgagtttccttgcatcaaggacactgagaaacacagtcattgtcttaggtgttctatgggaggaagtgaatagagcctttaggaacttcctggtcaagcttatggtgcttattttgatctgggccacttccctccttccagtcatgagtaatcatcaaggagcaagttggagtgtttcaggtgtatattttgtagaacccaaaagattggagccttaacaataaacatcagcactaagtgacctgttcctccttttttaaatagcagctttattgagatataatttacatacccataatttacatacctgtttaaagtatacaattcagtggatttagtatgttcacagtgttgcacatccaccaccatttctaatttcctggacatttttcaccacctcaaaaagg

SEQ ID NO: 47516 - DNA, 3595 bp, Homo sapiens
cgagtgacctcgcgatctggcccggctcccgctcgtcgcaacagcgtgactacagggtatggcggggtccgggcactgtgcgggctggacccccagttcttggggccacgccgccggaaaccgcttactgctgcagcttttggggtcgcccggccgccgctattacagtcttcccccgcatcagaaggttccattgccttctctttcccccacaatgcaggcaggcaccatagcccgttgggaaaaaaaagagggggacaaaatcaatgaaggtgacctaattgcagaggttgaaactgataaagccactgttggatttgagagcctggaggagtgttatatggcaaagatacttgttgctgaaggtaccagggatgttcccatcggagcgatcatctgtatcacagttggcaagcctgaggatattgaggcctttaaaaattatacactggattcctcagcagcacctaccccacaagcggccccagcaccaacccctgctgccactgcttcgccacctacaccttctgctcaggctcctggtagctcatatccccctcacatgcaggtacttcttcctgccctctctcccaccatgaccatgggcacagttcagagatgggaaaaaaaagtgggtgagaagctaagtgaaggagacttactggcagagatagaaactgacaaagccactataggttttgaagtacaggaagaaggttatctggcaaaaatcctggtccctgaaggcacaagagatgtccctctaggaaccccactctgtatcattgtagaaaaagaggcagatatatcagcatttgctgactataggccaaccgaagtaacagatttaaaaccacaagtgccaccacctaccccacccccggtggccgctgttcctccaactccccagcctttagctcctacaccttcagcaccctgcccagctactcctgctggaccaaagggaagggtgtttgttagccctcttgcaaagaagttggcagtagagaaagggattgatcttacacaagtaaaagggacaggaccagatggtagaatcaccaagaaggatatcgactcttttgtgcctagtaaagttgctcctgctccggcagctgttgtgcctcccacaggtcctggaatggcaccagttcctacaggtgtcttcacagatatcccaatcagcaacattcgtcgggttattgcacagcgattaatgcaatcaaagcaaaccatacctcattattacctttctatcgatgtaaatatgggagaagttttgttggtacggaaagaacttaataagatattagaagggagaagcaaaatttctgtcaatgacttcatcataaaagcttcagctttggcatgtttaaaagttcccgaagcaaattcttcttggatggacacagttataagacaaaatcatgttgttgatgtcagtgttgcggtcagtactcctgcaggactcatcacacctattgtgtttaatgcacatataaaaggagtggaaaccattgctaatgatgttgtttctttagcaaccaaagcaagagagggtaaactacagccacatgaattccagggtggcacttttacgatctccaatttaggaatgtttggaattaagaatttctctgctattattaacccacctcaagcatgtattttggcaattggtgcttcagaggataaactggtccctgcagataatgaaaaagggtttgatgtggctagcatgatgtctgttacactcagttgtgatcaccgggtggtggatggagcagttggagcccagtggcttgctgagtttagaaagtaccttgaaaaacctatcactatgttgttgtaactaactcaagaatttctaaactctcccaggtcacactgattcattcttaacaagatatttatatgttattaaacaggtggttctttttattttaaccagttatttttattattgagtctgtccagataagttatttataatgggcattactgaatttttaaaatgccgattacacccaaatattgtgcacatttaataatcagacaccagatttttagctctgtactcctaattaagggacatgtatgtggccttgcctagccctttggtgataagtacttcctctaggaaatgtacgataggtagaattgtggttccctaaagacaagtacataaaggtgaccctgatgaaaccttgaagttctgaaatttaactgcctaaaatgttctccttagatgtgagagaaagagaaatcagaaaaattaattctcttgggggaagggcttgaattgaagctttactttagaatttagccctggtttgaaattttccattacatgatcttggtttatcatcgatgggaagggtagaaaacttcaaggaaaataagtgaaattttaaaagtcagcattttcttagacctcttcagctgattgtttatttttctatgaattcctacacatggttattcccccctacttgagataatctaaatataaaccagctacttgatgtaactgagaatttgtgtggatatttatttaaacaaatgtgtaattttgagtacagaattcaacagttacctccaaaaaagaaacattgttaatataatttaacagaagttgtgaaactaaaattttctaagattaactggtagttcattgtaaatgaacataatgaacagaatttatgactccactgtggaaaatgctatcaaataactaaggaatatatatggaataagtgtacatatgtaaaatattgttactagagttagatatgtgccaaagtccatttatcccaaatcctgtctgaaaaggaggggtacattggtaaacattttggagtgcttaaaaatgccaaaaacaaaatggtaatttctactttgataaagtaaaaaagttaaatgtgtgtaaaaaagtgttctgtgtccttctactccagcatcgtctcatgtaaaataagaaagccctaaaatactattggagagaaaaaattaactaggttgctactttatttgcctaaatacttttttctattttgttagattttgcctttcttttggaaggaaggaggcgatattctggattataaaaatgaattgggaacattatcacaattccagactttctattaatatttatgtgttttaataaacgtttgaaattatttatgactacttaaaatgaatctgacccagtgcttcctggtatatgtaatatgtggagttagcccctgaaatttgctttaagtgtttcagtgttgaatctgtttctaaatattcattattacatggtacacaagtgacactccatatattccacacagacttttaccttgctgtattattatgaaaacaatacattaatttgatttttcagtaattagtaattttaggttgaagattatccaaaagaaacaagcttatcacaagggaccatcatcaatatgatccaaatctggttcaaacattcaaaacttcaaagataattcatctttcgctaatgcttgtggttctgttgttcccttgaaaaaaaataaaaacagttgccttctaataaacattgttgagttaaaaatta

SEQ ID NO: 47517 - DNA, 1615 bp, Homo sapiens
tttttttttttaatttgaattcactttaatattttttaaggtagcatatggcactttggggacaggaagaaaaagtcacaaagtccacaaacccatgaaggtgtcagctcacaaggctggaaatgactgcattatcgattctgctgtcacagtaaatgttccataacaaaggcatgttgaatttggtctcattcattagagtataggacttttgtttggtcacatctttatcatttaagaaacatttaaaaatggtattcatttttatttcaacatgtcaactgtgcatttcccaaaacagcaggcttttcaaaggaataaatcagaactgtaaacacaagatacagtacaagtttttgacttcctacagtcagtttcacaaatccacatactgtacattcataggtgaggttaagcctgtcacccatttctttatttctataattacacaagcataataaatacatctgattttaaaggtcacttaaaatgagtcataatttacagtacagtacgtttcagttcaagtgcaaaaaataactatttgctgaattctatttctttcagttattttatttttaagctgtgttttattgtgaagcgagacatccaagtgtagaatttcttatcccaaatgcagtattgggcagaactatggtgtcatggagaagccctcactttacaattgatcctgtctaatcagggtcagagggtaaggtgagttgctcatttcgactgttcttttctttcctctctctcctgtgctcatccacagctattataaattatataattcacctttattcagctaaaacagttttcccttttccacactcccccccaggtttcctgttaacctctgctttgatttttagtggcaaggctttagcgtgcgatccacccagccattgttctggctgcagttgtaacgtttggcagttgcatacattacattgtccagtgtctgactgtgtcttcatgagaacgaatatactgagattttctttctttagtcattggaaagtatagttgctacttattgccatccttcccattcatggtttcctatttaccaccttttcctcaccaaaaacaaaacaaaactgacccaatatgtaatttctaaaaattgtatccttcccccaggcacttaaatcttatactgtgatttgtaactagtactgcttatttaaggaactcttaggaattcagtgatttttgtgtgtttcattccctcagctaattagagcctgaattactataagatagtaaaatagccgagagaggcctatttaccagtatccaatatatttaagtaaactcttgtcctatcaaaacacaggatactgagttggttggttgatttgaaataatcgcttgtttcctgttttttttcctcaaagccccatttaaaacaaaaggcatttttaagctcggcttagcttgcagtagttaataatagcttctgttgctcaaagaattatttccattatatgccatacacatataaaaatatatttgctaaagatatgtaaagtttctgatgaaacttttaacttcattttttaactttaacttttaactttatttttaacaaaagcacatgtgctacttt

SEQ ID NO: 47518 - DNA, 534 bp, Homo sapiens; identical to SEQ ID NO: 20707
  misc_feature (1)...(534): n = a,t,c or g

SEQ ID NO: 47519 - DNA, 1897 bp, Homo sapiens
tttttttttttttttttgagcccactctgctttatttacaacacgcaggctgtctgtacaaacagcggccgatattattaaaaacaaaagaggtgagtgagaatcgtcacctttctgctttccttcctcacttggccaggctctagtactccacctttgagctgccatgcccaataggggaagtccaaaattaaaaatacaaccggtgtagaagaaaataaatggggagtgaaatagaagaaaagatgagggaggggagtgctaatatttacactagagttttatagacaactgtcccattccatcccaattccaatcctgacccagaaagtgatggtggcaggtccaagagacagagattatgtgtcgggacacagacagcctcccatccccaaccgtaatggattcaatttcaagtccacagagtggggaggaaggatagggtgggaaagtgagacactcattttcaaacaagtctcccttgagaattcctgccttgaagtgcagacagtatccaagctccaggggataggctgaggaccctgaggctcagttcccaaatcatgttgtcatttggaagttccaggctaaagttggtgccatcagggctctccagatttgggaggcccccctaaccgccgggcctctgctgcagttccttgcatttctggcaataaaagaagtcggggacgttggtcttcttaatcttagcacaggagaggtggatccacgtcccacacaggctgcactcaatcatgggccgccctgcaaagggctttcgacagtaacatgtgatcagatcccatgagtcatcacctgattctaccatgatgtcctcgtccatgacccgcatctcgccttcactggagctggcatctccatcttggcttgtttcagtgctgcccacctccttgctttcactgtcagcaggagggactccttcagggtgcactgtggcagggggcctaggagcctcagggggtgttggcagcacagggactggggcttcaccccctaccactgttgccatctcttcttcttcttcctcttcctcctcttcctcctcctcttcagagtctgtatcactggggggtgccctggggaggcccaggaggtgggagtctatccccccgttctgccttttttaacttccgcttcttgctcttcttgattcgagatctcttttccccatccccaggagttggccgaggcctccgaagcaccccaaagccagccccagctcctggccccaactttcggttctttcggtccttctttcgaggaggatgggagaggtccccctgggaaaggggcacgggggtaagagcagcagggggccgggaggtatgtgtcagggatgtgggggacaaaggagatgccactttgggcccatccagatcaaagagagagtccttgagcttcatcttctcaagcaaggtagcactgtcgggggcctgcagacgagagaaagtggaccttgggggtcctggctgggtgggacctgcttgagctgcccttctcttggatgactttgctttcttaacaaaagtctggatggttcgaagatctgagggggccgagtcccagccatcactgtcggccgcactctctcctcgcaatggagagctggagccagaggctggccagtcactttcctctttgctagggggaatgtaaccagcatatgccaaaacaaaactgcagaatttgttgaaatcctcaattgttctccgccgtttctctggtggctgagtctctggcttaagggtcggaggtggatcttcgggactgggctccgccatggcttccagcatcggccccctcccctcctcccggtccggcgcccccctccccggagccggggatcccggtgtcgcctctagtgctcgatgctccc

SEQ ID NO: 47520 - DNA, 874 bp, Homo sapiens
gtctgtgagtttagtctcctcacagtgaatcagttgagaaggatggccgagggcccagtggaagagaaatgccttgtgattagaaaagagcgcatcgtggatatgttcatggcatagacatgagttgttttcctttgtatctgaacaatgggaaatgttggcgcaagtctttctttgcagagtctttctatgacagccaagagtctgtttgccattcaagaccaaaatgaggccatgtgcctgctacctgccaaggcttctgacgtggcagtgccagggagcagagtggcatcccaccacagaggactctgaccaaagcaaaagcttcgccgggaggggaggttactttccacccagcactgggagacagagccaggtattagaagagagaagactgagagcctctaggtttgcaggaatgcacttggctgttcttaggtttttgtgtatctttaactgttactctaatttattgatgcttaacttggggcctgtgtacttcttgtagtttggaggcccatgaatagtctttatcgaccctgggaaattgtacagaaaattgtgggtgagtcattcttgggagggaaccccagctcctcacaaaggttcctctctcaccctgccaaggataaggaccattgctctaaattacatattattctgaatgtaatgagagcattgatactagttgaactatttcatcttgtagaacaatttacagttgtctagctcatgtgctgccctgtactgcgacatattcacttctgttggaggcctgcaggtgaccatggcttgcctcttgatgaccatgctcatgtgaaagcttggtgcccaaaagaaaaataaaaagcatctctaaagaatgagaattgtc

SEQ ID NO: 47521 - DNA, 443 bp, Homo sapiens; identical to SEQ ID NO: 20709
  misc_feature (1)...(443): n = a,t,c or g

SEQ ID NO: 47522 - DNA, 1023 bp, Homo sapiens
  misc_feature (1)...(1023): n = a,t,c or g
gaaaaaaaaatttttcatttgaggtattcttccagtagaaggttagtaagtttttaatgaaaccattaaaaataacacttcccagaaaatagatgacatcagtgccccttgctactttctcagtcctcactattgctttgagggcccaggtactgaaactggttgtcttgagttttgtgtcagctttttctccagtccattatccccctcccttgcttctgaagcagtctaggttaaactagccaggcaggtagttgtggactggtgattttcaaaagccccactttagagatcaggccacagctttttatatcgcacaggacacatcagcctgagctgctgcctcatgcctgtttccccaggaacctcactcctttggtagaaccttgggattttagaaattgtggcttttccataactcatttactccaacagttgaagttacacacattgctcccaaatttggaaatagaccacagtaccttacctttcattccccatctggcctttaccttctttgcttcagtggttgaaaacagttgccatattcaaagtatagtagatttcaacctcacacaaatgacaagtcccattttacaatcctaggaaggcccaccaatttcatttcacgcgccagggcggctgcagttggaggccgagggcagccctctgctcactgaatgtcttgcatgtgctgactgctgcccgcagtgctgaacatgccccaccgcccaggcccagcactgcttgttgggtcagcatctagtgctgctgtcacatctttgtctgcacagccagtaggattgcctcagccagggggtttatcagaaggtgtgcaaggcctttgggggaactgagcccctatagtgggcagtctcctttaccttcccacctccctgaaaagcacagaagacagtgccttggtttgtgtttttgaagcaaacaagtcagcttttctgggntttgccccaaaactgtgatggancataataaaactgggagatacggtttttancattgcaa

SEQ ID NO: 47523 - DNA, 594 bp, Homo sapiens
ttttccttaccaatcggctgccatccgaggagctgaggaagcctagagctctcagaagcagtcctttgagctggtgtagggcggtgtttctccaactgggctcgtggcacttttctggacaccactccaaacaaaattagactctgagcactcagaatggtccagcgtttgacataccgacgtaggctttcctacaatacagcctctaacaaaactaggctgtcccgaacccctggtaatagaattgtttacctttataccaagaaggttgggaaagcaccaaaatctgcatgtggtgtgtgcccaggcagacttcgaggggttcgtgctgtaagacctaaagttcttatgagattgtccaaaacaaagaaacatgtcagcagggcctatggtggttccatgtgtgctaaatgtgttcgtgacaggatcaagcgtgctttccttatcgaggagcagaaaatcgttgtgaaagtgttgaaggcacaagcacagagtcagaaagctaaataaaaaaatgaaacttttttgagtaataaaaatgaaaagacgctgtaaaaaaagtcgaccggccgcgaatttagtagtagtagagta

SEQ ID NO: 47524 - DNA, 3455 bp, Homo sapiens
  misc_feature (1)...(3455): n = a,t,c or g
cttacttgatctgcttttcctaaacctcagtggcttttcccttaggcagggttgggggtgggagggcaacttactggagatgactgttttcagatactttaaaacaaacctttttgtagaaatgcttaatttttaagcggttaggcactgagagtagcagaaatcctgcaaagctttatagttccttagactcaccttgtcgattctctgagtaaagtcttgatttcaataattgtgcttctcatgccctgaatctgctggagaggagtgttgttattttcaggtaacaacattcgttagcacaaatatttcagaccaatattagtgctctccaccccaccttttgttatcattttcatttcaatttctctcattcttttttattttggaaaatcatattgctatagtgtgtactttaatctgccagcagataccatctacactaacatttgtcccacagcatcctcaagagaaaaagttgttgcaccttatatatatctcaagcaaaccaaaatatgatgctcttctgctttgttttattctaaattgttgtatcatatctttctgaaaccattctgaatttagttgaaattatcaatatttatgcttttaaccttaatttctggattcaagcctgtatataaatcttttgaaaaaaattgtcctagcccttctctgcgatgctggaagtagaagattgcgtctcagatggagacgcagtactgttccagttttctttagccttttatttatttagttattctgggtatttcctatgtaattttgaagtgtgtagagtatattatagtaactgaagctgcagctgtaagaagctgagtgaaagaaaaaatactgtaagacatccttaaagtttttatttgtttgggtactgtatatgagatcaggaaaaagaaaaatgtcccacagccacattggaaatacaggttcttgtccccaaattaggttagttcccagattttagatcaaaactgttaattcattaaaaccccttttaaaaggtaaattctactgttgtaattccgatagtctttttcccacaaatatcagaaatatatttatttaattctgtcagatgagctttctaccgatgccatgtcccaaagccatgttaaaataattcccacgttatcattgtgattctacttcctgccactaaaattgctggagaaacaaaataatgatggaacactatgaacaaaaaggagcatctgaactggtctggttatttagaatccaatgtgttcaaatccttttgttttcttattaagtcagatgctactgtaagtcagataaaattttgtttgcactctgcagtctttggctcaatgtatggaaatgtttgcacctatgtaaagtcacaagctaattacaaattgctacagaacaggagtaagctgaaaactgaatgccatgttttgtttataaggtggggaggggagggaaaataccaaaaaactctgttccaagtttggcatttgacattaatgtgaagcagtgggaccatgctgcctgctaaactactgtatgaatcgtaaatgttctgaagacgagcagctggaggctggaggatggcattccatacagcaaaggagaagcacccaccacttcatctgggaaaaggaaggaaattgcaggaggcctggagccatcatttgtaaaggggatgttgcggggtgtgatgctgttgaggagattcaccttcaattgcactgctccacagagccctcatataaggccaatcctaatgggctacctcggctttaaaagttaatttcagtaagtcctgtttcaaaagtttgtctttttttgcttctaccttcagtgccactattttccactgcagtgttttgacttcacaaactgcctcctccagagaggaacaatgtattgctgaaaatgggcagtagaaggcaaatgctgttgttacatttgacctataaagtattcagagtgactgctaggtagaaattaaaacttagctttcccaaatagctccttattttgcaccttataaaaagtatactaattgttaattagatgttgcttttgtttatacaagcattcccaaagaactagatttggattttgttttgagtttttggatttttaaaaattatcttatttagattgactaacagcataccttacaattttaaaagaagctgttgttcagttcatcttaccagatgtgtctggcgaagtattcagggtttgatggactgctttactttcgtttggaagtgatagctaagtttattatactctatattaaacaactttgttcatttcactgaggaccttatcttccttatatttcagaacaaagaagcaacaagcgtgaataaaaagacaaatgtatttgactccctcataatccccatctgtatgtgctacccttccttcaaatatataaatgtgcatctttttttttaaaaaaaaaaaaaaanaaggttcctcttctggccaaatttnatctatggtggtatgattcatactgttaaattgagagaggaaaccttgtggttaaaaattatatggctgctgttttctttttgcagtcagtggtcaaaactgatcatgtgcttaaatcgatttttatgcacagaactagttattgtgaacattactgctccctccaaagatttcctgataacttgggccagaggtggttactgagtaacaaggatctaattcaatgcctcaaaactcttccacccacaatgcaaatcttacctcacaagctctaacctaaatcacagagacatgcatgtttcatgcattaacactgatttcgctctgtggcccaccagaggggtgggctcatgtcccctgactcctcacatgagtgcctcagctctaagagccgtggaacggggggtagggaaggtttgcgatctggagctcagcaactggctcagcaacgttttctccatttcattagcactaaacaagtctcttgctctcaggaatttgtcagaaaaaagaataaaatcacctgagactccacataccagattataaactcttctcgtaggtttgaattgcttactcacatgtcataaattaaccacagcttcatttgaccaccaggtctaaagtctgttgacagtttcagcatgactgaatcgctcatttttttttttgctttcagaaattggcttggttctctttagagttggtgtaaacatgccatgtaataaatgatttccacttaatggtacaacagaattattgctttcttagatgtatgtgtagtaaaagtcaatatacacatttatataatttctttcttcaaaatcttatacctaatttgatatttctaaaaattgcacatgtaagtcatgtgtataacatgctaaagtactttaactgtgatcttaaaactgaataaaaatatttaataaaactttgaaatattttaaaaaaaaaaaaaa

SEQ ID NO: 47525 - DNA, 418 bp, Homo sapiens
  misc_feature (1)...(418): n = a,t,c or g
tttgaanacctttactttnagatccctaatttaatacgactcactatagggaatttggccctcgaggccaagaattcggcacgagccaggcctcaagtctttaccccacccctttcttgttcttccaagaagcagatgcccagttgctcagcagcagcggtagagacttgaatctgcccaccagtcacaaggcgggtcacagattcctcttcctctcttctcctcgttcctctgaaccctccaccaatgtgcctcagcctgtgtgctgtgtggcaacagcattctggttcccactgccaagatctcccaccactctgctgggatctgcagtggcagggagtgggggttgtgtaaaggggaagtcatcttttgagatccagatagacatggtttgtgcacttacgttcagatgggaagc

SEQ ID NO: 47526 - DNA, 2034 bp, Homo sapiens
ttttttttttgagcaaaatgtttacatttatattgaaatatacactaaaacagaatgagttctactagtcaatgaaactttgccaaagcaaaatcacaaacttccaatggggaggtccagtcagctagcagcagtgatccccaagcaggaacaccaagaaacctgggggacccctctccaaaaagcctcctttcaagaggccctaactcacttctcccacatgcacccacacggatttaggagcttggacatgctcctcatttccatatatttttagtttcttcttcactgcaataaatataaagttggcaatgctcatacaccacagcacagacaatatttcaggctttagcatacaattgtaaacagtgactaggttaaaaaaataaaataaagtaagttggactttttttttttttttttttttaaacagacaaaattcctaagagccgggcatgagctactcaagatttgttttgttgggttaaggtttctgacaaaagattctggtttaggcagatgcccctgacagttcaagtagcctcacggtggtagccagagcgctgtctacggcgaccgagaacacatggactggaagacagcctgccctagatcaccccgtggcagtacatcttcaagctgccacattcaacatatgaccacagacatctttatagttccatcactggctgccatctagtatagcaggaatgcgtgggcgaaggaatacaaatttgctgggagaggaagagaatagtatctcctgctagctgcctggaaagttggccccttaatcacaatgacaactaggacatttcacttggacagtgcattaaatttatagattttttaaaaagtacaaagactaagcagtaagttctgtcactgacgcaaactaggatgtcaaagaaaaatagattaactatttttacctaaagtagtgcaaagaaatctggcaaaaaatgaaagtgaactcaatatctgcacatcagtaatggggcagaattttatttaaaaggctagtggttcaaatactattgcttgaatagctctggtagatataaaatgtagtaacatctgaggtttgtacacatgagcaaaggagctgagggccagctcacaaagggatatttgatcctcagtcaagagagaagctaaaagcgcatgctgcaggagtaacctaatggatttatttggaccatactcccaccttctgacaaacagaaaaagacgtggatagaaaactgtctttccacacacaaaaatctggcttaattcttcttgctatacaactatacctcagctaagaaaaaaatctcttgtgaaaaactcaacctgggctactaaaaataaaaaggaaatttttaatgtcgtaaacaagtttagtaaacaccatgtggattttctgttgttaatgaagacatgatacattcaaaaaagtatgtattttttaaaaagaacaaaaccaaaaaattttctagaaagagacttcacaagaaaaaaatgagcccaaggttcatccctcaatcagaaatcggtcttagcacgcatcagtaagccctcctccaacataacaaaagcactgaaatttgcctttcaagtacgttactgaatttaaacattaagcggaatcactgcagagcatattttgatgggttacttcaatacccacctggtccagttcaaaatatctatagatccagtttgtacatattccacaggtatactgataaaatcatctattatcccattttttttaatggcagttcttatatagctcgaacattaagatcaacaaattctcagatgaagtacattaataagacacctcagaagtgaaacaaacctagtttttactaaaatgatgggataaaggtagtgtctatgctgaagagcagcttcacttgtttccccacagaaaaaggcccaaaatttttggaggataatttaaaaactaagccaataaggccccggccatggtggctcatgccctgtaatccccagcactctgggaggccaaggcgggcagatcac

SEQ ID NO: 47527 - DNA, 413 bp, Homo sapiens
gcagcgcggagcccggctcggccacaccgatcgcccgccgccatgggctcctcgcaaagcgtcgagatcccgggcgggggcaccgagggctaccacgttctgcgggtacaagaaaattccccaggacacagagctggtttggagcctttctttgattttattgtttctattaatggttcaagattaaataaagacaatgacactcttaaggatctgctgaaagcaaacgttgaaaagcctgtaaagatgcttatctatagcagcaaaacattggaactgcgagagacctcagtcacaccaagtaacctgtggggcggccagggcttattgggagtgagcattcgtttctgcagctttgatggggcaaatgaaaatgtttggcatgtgctggaggtggaatcaaattctcctgg

SEQ ID NO: 47528 - DNA, 3815 bp, Homo sapiens
ggggggggggggggggggagaggcttccctggctggtgcctgagcccggcgtccctcgccccccgccctccccgcatccctctcctccctcgcgcctggccctgtggctcttcctccctccctccttccccccccccccacccctcgcccgctgcctccctcggcccagccagctgtgccggcgtttgttggctgccctgcgcccggccctccagccagccttctgccggccccgccgcgatggaggtgccccagccggagcccgcgccaggctcggctctcagtccagcaggcgtgtgcggtggcgcccagcgtccgggccacctcccgggcctcctgctgggatctcatggcctcctggggtccccggtgcgggcggccgcttcctcgccggtcaccaccctcacccagaccatgcacgacctcgccgggctcggcagccgcagccgcctgacgcacctatccctgtctcgacgggcatccgaatcctccctgtcgtctgaatcctccgaatcttctgatgcaggtctctgcatgggattcccccagccctatggacccccacatgggcggagcagacgtttgaacaggccatccaggcagccagccggatcattcgaaacgagcagtttgccatcagacgcttccagtctatgccggtgaggctgctgggccacagccccgtgcttcggaacatcaccaactcccaggcgcccgacggccggaggaagagcgaggcgggcagtgggagctgccagcagctctggggaagacaaggagaatgatggatttgtcttcaagatgccatggaagcccacacatcccagctccacccatgctctggcagagtgggccagccgcagggaagcctttgcccagagacccagctcggcccccgacctgatgtgtctcagtcctgaccggaagatggaagtggaggagctcagccccctggccctaggtcgcttctctctgacccctgcagagggggatactgaggaagatgatggatttgtggacatcctagagagtgacttaaaggatgatgatgcagttcccccaggcatggagagtctcattagtgccccactggtcaagaccttggaaaaggaagaggaaaaggacctcgtcatgtacagcaagtgccagcggctcttccgctctccgtccatgccctgcagcgtgatccggcccatcctcaagaggctggagcggccccaggacagggacacgcccgtgcagaataagcggaggcggagcgtgacccctcctgaggagcagcaggaggctgaggaacctaaagcccgcgtcctccgctcaaaatcactgtgtcacgatgagatcgagaacctcctggacagtgaccaccgagagctgattggagattactctaaggccttcctcctacagacagtagacggaaagcaccaagacctcaagtacatctcaccagaaacgatggtggccctattgacgggcaagttcagcaacatcgtggataagtttgtgattgtagactgcagatacccctatgaatatgaaggcgggcacatcaagactgcggtgaacttgcccctggaacgcgacgccgagagcttcctactgaagagccccatcgcgccctgtagcctggacaagagagtcatcctcattttccactgtgaattctcatctgagcgtgggccccgcatgtgccgtttcatcagggaacgagaccgtgctgtcaacgactaccccagcctctactaccctgagatgtatatcctgaaaggcggctacaaggagttcttccctcagcacccgaacttctgtgaaccccagggactaccggcccatgaaccacgaggccttcaaggatgagctaaagaccttccgcctcaagactcgcagctgggctggggagcggagccggcgggagctctgtagccggctgcaggaccagtgaggggcctgcgccagtcctgctacctcccttgcctttcgaggcctgaagccagctgccctatgggcctgccgggctgagggcctgctggaggcctcaggtgctgtccatgggaaagatggtgtgggtgtcctgcctgtctgccccagcccagattcccctgtgtcatcccatcattttccatatcctggtgccccccacccctggaagagcccagtctgttgagttagttaagttgggttaataccagcttaaaggcagtattttgtgtcctccaggagcttcttgtttccttgttagggttaacccttcatcttcctgtgtcctgaaacgctcctttgtgtgtgtgtcagctgaggctgggggagagccgtggtccctgaggatgggtcagagctaaactccttcctggcctgagagtcagctctctgccctgtgtacttcccgggccagggctgcccctaatctctgtaggaaccgtggtatgtctgccatgttgcccctttctcttttcccctttcctgtcccaccatacgagcacctccagcctgaacagaagctcttactctttcctatttcagtgttacctgtgtgcttggtctgtttgactttacgcccatctcaggacacttccgtagactgtttaggttcccctgtcaaatatcagttacccactcggtcccagttttgttgccccagaaagggatgttattatccttgggggctcccagggcaagggttaaggcctgaatcatgagcctgctggaagcccagcccctactgctgtgaaccctggggcctgactgctcagaacttgctgctgtcttgttgcggatggatggaaggttggatggatgggtggatggccgtggatggccgtggatgcgcagtgccttgcatacccaaaccagggcctagtctggggcctgaatctctgtcctgtatcagggccccagttctctttgggctgtccctggctgccatcactgcccattccagtcagccaggatggatgggggtatgagattttgggggttggccagctggtgccagacttttggtgctaaggcctgcaaggggcctgggggcagtgcgtattctcttccctctgacctgtgctcagggctggctctttagcaatgcgctcagcccaatttgagaaccgccttctgattcaagaggctgaattcagaggtcacctcttcatcccatcagctcccagactgatgccagcaccaggactggagggagaagcgcctcaccccttcccttccttctttccaggcccttagtcttgccaaaccccagctggtggcctttcagtgccattgacactgcccaagaatgtccaggggcaaaggagggatgatacagagttcagcccgttctgcctccatagctgtggcaccccagtgcctaccttagaaaggggcttcaggaagggatgtgctgtttcccttctacgtgcccagtcctagcctcgctctaggacccagggctggcttctaagtttccgtccagtcttcaggcaagttctgtgttaagtcatgcacacacataccctatgaaaccttggagtttacaaagaattgccccagctctgggcaccctggccaccctggtccttggatccccttcgtcccacctggtccaccccagatgctgaggatgggggagctcaggcggggcctctgctttggggatgggaatgtgtttttctcccaaacttgtttttatagctctgcttgaagggctgggagatgaggtgggtctggatcttttctcagagcgtctccatgctatggttgcatttctcagagcgtctccatgctatggttgcatttccgttttctatgaatgaatttgcattcaa

SEQ ID NO: 47529 - DNA, 347 bp, Homo sapiens; identical to SEQ ID NO: 20729

SEQ ID NO: 47530 - DNA, 458 bp, Homo sapiens; identical to SEQ ID NO: 20732
  misc_feature (1)...(458): n = a,t,c or g

SEQ ID NO: 47531 - DNA, 2886 bp, Homo sapiens
  misc_feature (1)...(2886): n = a,t,c or g
tctgcacctcgcgccccagcaggtaaactaacattatggatttttccaagctacccaaaatactcgatgaagataaagaaagcacatttggttatgtgcatggggtctcaggacctgtggttacagcctgtgacatggcgggtgcagccatgtatgagctggtgagagtgggccacagcgaattggttggagagattattcgattggagggtgacatggctactattcaggtgtatgaagaaacttctggtgtgtctgttggagatcctgtacttcgcactggtaaacccctctctgtagagcttggtcctggcattatgggagccatttttgatggtattcaaagacctttgtcggatatcagcagtcagacccaaagcatctacatccccagaggagtaaacgtgtctgctcttagcagagatatcaaatgggactttacaccttgcaaaaacctacgggttggtagtcatatcactggcggagacatttatggaattgtcagtgagaactcgcttatcaaacacaaaatcatgttacccccacgaaacagaggaactgtaacttacattgctccacctgggaattatgatacctctgatgttgtcttggagcttgaatttgaaggtgtaaaggagaagttcaccatggtgcaagtatggcctgcacgtcaagttcgacctgtcactgagaagctgccagccaatcatcctctgttgactggccagagagtccttgatgccctttttccgtgtgtccagggaggaactactgctatccctggagcctttggctgtggaaagacagtgatatcacagtctctatccaagtattctaacagtgatgtaatcatctatgtaggatgtggtgaaagaggaaatgagatgtctgaagtcctccgggacttcccagagctcacaatggaggttgatggtaaggtagagtcaattatgaagaggacagctttggtagccaatacctccaatatgcctgttgctgctagagaagcctctatttatactggaatcacactgtcagagtacttccgtgacatgggctatcatgtcagtatgatggctgactctacctctagatgggctgaggcccttagagaaatctctggtcgtttagctgaaatgcctgcagatagtggatatccagcctatcttggtgcccgtctggcctcgttttatgaacgagcaggcagggtgaaatgtcttggaaatcctgaaagagaagggagtgtcagcattgtaggagcagtttctccacctggtggtgatttttctgatccagttacatctgccactcttggtatcgttcaggtgttctggggcttagataagaaactagctcaacgtaagcatttcccctctgtcaattggctcatcagctacagcaagtatatgcgtgccttggatgaatactatgacaaacacttcacagagttcgttcctctgaggacgaaagctaaggaaattctgcaggaagaagaagacctggcagaaattgtacagcttgtgggaaaggcttctttggcagaaacagataaaatcactctggaggtagcaaaacttatcaaagatgatttcctacaacaaaatggatatactccttatgacaggttctgcccattctacaagacagtagggatgctgtccaacatgattgcattttatgatatggctcgtagagctgttgaaaccactgcccagagtgacaataaaatcacatggtccattattcgtgagcacatgggagacatcctctataaactttcctccatgaaattcaaggatccactgaaagatggtgaggcaaagatcaaaagcgactatgcacaacttcttgaagacatgcagaatgcattccgtagccttgaagattagaagccttgaagattacaactgtgatttccttttcctcagcaagctcctatgtgtatattttcctgaatttctcatctcaaaccctttgcttctttattgtgcagctttgagactagtgcctatgtgtgttatttgtttccctgtttttttggtaggtcttatataaaacaaacattcctttgttctagtgttgtgaagggcctccctcttcctttatctgaagtggtgaatatagtaaatatacattctggttacactactgtaaacttgtatgtagggtgatgaccctctttgtcctaggtgtaccctttcctcatctctattaaattgtaaacaggactactgcatgtactctctttgcagtgaatttggaatggaaggccaggtttctataacttttgaacaggtactttgtgaaatgactcaatttctattgtggtaagctcattggcagcttagcattttgcaaaggaattgctttgcaggaaatatttaattttcaaaaacataatgattaatgttccaattatgcatcacttcccccagtataaatcaggaatgtttgtgagaaaccattgggaactatactctttttatttttattttttattttttttattattttttttttggggacggagtgccctccttgttgcccaggctggagtgcaatggccgtgatcttggctcactgcaagccttcgcctcccgggttcaaagtgattctccctgcctcagccctcnnnnnnnnnnnnnnnnnnnnnnnnnnntcccacnnnnnnnnnnnnnnnnnnnnnnnnnnnnnnnnnnnnnnnnnnnnnnnnnnnnnnnnnnnnnnnnnnnnnnnnnnnnnnnnnnnnnnnnnnnnnnnnnnnnnnnnnnnnnnnnnnnnnnnnnnnnnnnnnnnnnnnnnnnnnnnnnnnnggactatactctttttaaaatagacatttgtggggctcacacaatatatgaaatagtaccctctaaaaaaaaa

SEQ ID NO: 47532 - DNA, 1121 bp, Homo sapiens
ggagacctctagatatgaaatatatgaactaatacatgttcatccctatgcagttaaacagagctttgacctagaggagtacagcctctcacagtctaccctggagcaggtgggtcatttttagggattcgtatcatccatggtatatgtgtataaaacattccctgggagctgcagaggcagcacggcattgttctcctctctttatttccttcctccctttcaggttttcctggagctctccaaggagcaggagctgggtgattttgaggaggattttgatccctcagtgaagtggaagctcctcccccaggaagagccttaaaaccccaaattctgtgttcctgtttaaacccgtggttttttttaaatacatttatttttatagcagcaatgttctatttttagaaactatattataagtacagaaatggttctccgtgtggtgggaggaggaggttcgggtgctgggtaagtgccatgtcagtgtggacagaggcatttgactaagccaacctcctctcacagcctctgtatctctgcaggccatactggttccattgttctgtataatactgaataaataaatttacttttacatgatcgtataagtttctagataagataaacaaattttgtttaaatttttttaataaaaatcttaaaacactttttttctaacctagactgagaaattcatgtttacttttctaggtgtatgatactttgtaaagttgatactttcctaagaatttaacatgtcatatttttgaaatagatttaagtgtgcttcttattgctaaaaatactaaatgtcatgggtcatagtatctgatatcaatatcgttgataacatatccacaggtaacaccatgatgtaggcataaatggaaaacaaaaaccctactatttcaaatatattgtacttttttatttctgtaagccaactgtgtgccattttcactggacttttaaatctagactttagtgatgtctacattgtaaatgatcttttgtggatatttgtcacttggtttcagaaagttcacaaatgtagcaacagctcacatgactgagtaggtagaaaatgtgaaataaatctcatatatatagttttgaaa

SEQ ID NO: 47533 - DNA, 436 bp, Homo sapiens
gtgcaattgtgtcatttcaggagaaatgacctgttaccaaagtgtcatgaaacccacattaatgagctgggctgtagtggaggtttactttgatttctgaccttaattattagtggtttggattctttacgtttatgatggattttctgattaccaattatgattcactgtaagccatttttaaaaatatgacatgaagctctgacccacttttaacaacacagtggcaaatgccaaacaattggcaatttccccttctaatatcagctgtttgaatcatcacatctactgtggtggctggggaccactttatcttcattctctggcttcagtattcttttctggtattgtcattactgacctaggtgcatatctgtactaggctgggacctcagctctatgccagtgagaaaatgaggttcaactgggaaaacgg

SEQ ID NO: 47534 - DNA, 1522 bp, Homo sapiens
  misc_feature (1)...(1522): n = a,t,c or g
ttttttactcaagacaggtcagacatttataaaacaagtgaatattcacaaacaaattgtgggagaaacacaccttcccagcaatagaaaatctctataaagtgcattttgcctgcaaccatctcttccccatgctggcccttgggtcaggatttgaggcactgttccgagggagccctcagggccacctgagctgggagaagggaggcatgaagccaccatggagctccaggctactggacataccctctctaccctgcccttccctcttggctccaggagtgcactgcctgactccactggcaggttgatctgggaacgggctgacatgctagggatggtggagaagtaggcggaggtggtcctgccaacctgtaccttagggaagagagccagcagcagacaggcaggaaaaggaatcatcctgctacccgaaggcgctgctagtgaatactaaatctggggcctcgggctttggccccttccccaactcctcagatttgccccttccaggtttgcttgactctctttctggcagtggccccgattctctttccctctcgactggggctgagggaaacagggaagccccccaacccaatgctctgaatgcacaccatcccctgtgccctgctcccctcccacgatgatgggacatttctagtgaaggtgacatacgtacaacagttggactctaaaggccagctctctggctgagaaaacctgaggatatctcaggaagaagcctgtcagtgtgatggacagctacaggagatgggtctgacccccagggttctggtccaaggacagaggacagtgagggacagggctggggccaaaagaattaacagatctgaggctaggaaactttttagatctgtctatggcctcatgctcagtcccagaagcccaaggaagggcctgggactgagcccagtagcagagaattttaaaataagaaacagaggccaggtggctacgtctggacagcatccatccactccggcctgctcagcctccaggtccttcctcatgctcagtcccagaagcccaaggacagatctaaaaagtttccaccaccctacagaagtacacacagatacctgactggtgtggggtatgcctggtactgtaataggagcctaagacagcacacctaccttttcaggatttagaacctaaaattagaaagagaatcccagctgtcattgttccttccccagaagctaagagccagcctcagagcctacccaggagctgtgaaggggcaagggtcaaactgactcactctaccaggaggagaccaggttgcagtggcgtaaggccccctggtttctctggccacactccaagggcaccacagtgcttgccagtgaggacagctgacacccagccagggaaaccattctagtctttattctgttggcttccagggctgtcctggacttgtcagcatccagaatgccatgttaagctatcccagtagctgagttccaaggactcaggcaganggactcaggaa

SEQ ID NO: 47535 - DNA, 684 bp, Homo sapiens
  misc_feature (1)...(684): n = a,t,c or g
ttttttttttgaaatggagcaacatttattgaaacttatattagtcaagcaacttaatgctaggctaagttgcagtgagtaataatccctaaccccagtgacagtgcagaaaaagaagggtttcatatgtggagtgtgatgcatgtcaatgggagtttcctccacctggtgactcaggtatccaggcacattcatctctgcaggtctgccatcttgacacgaggtcattgcagaaggagagagggtgtagagtcatgccagttcttaggtgctcctgacaaggagatctgcagcactctgctcacattcctgttttccagaactcagccagtacccagtgcaactgccaaagagtctgggaagcatagagagtacacggatagctggagatccttcatcactactgtcatatgttcatttatgcaatacatatcaatgggttcaccccagtcaggctgactccaagaggctaagatgacttcaccttgggtggtttgcagcttgcaggacggagtcttggccgcagactgagcctgtacctcacccgtctcccaccaactcttggtactggacgcagtcatgctgggcagctctatggaggcntggcgggctagcttgggggtctggccagcagtcctttcacagctggggagtggagtctgggcctgaggtctcccgtgcgcc

SEQ ID NO: 47536 - DNA, 1619 bp, Homo sapiens
  misc_feature (1)...(1619): n = a,t,c or g
tttttttttttccagttaatttagtcctttatttttttcattctccatagaatattggttttgtaacaacgaatacaatccaatatataacattaaaacaatccgatacataccattctgctttatgaaagatcagcaaaaatacataaacaaggatataactagtacatttataaaatacatcataacaatgaaaccaaaggatcccacacaataatcttcacatttgacatgctggttacagctgaggagagccagtgtctttggcaagtgattcatatacataagcgatgacactgactaatcctaacacttctgaaatgttcattctttaccagttaaacctaaaataaatcagcaagagtactgaaatataacaagaatgaaatccaaaatttgtcgaaaggggcaatgtttaatactaggaagaacactgaatttggggactaattcttgtccccaagtacatttggattcttgtcttcgttcctggatgatcttaggcaagtaatctgtgctatgaatccttcacttttaaaatgagagagttggttggctggttctctaaggtctttctagattttaactttccatgattttaaaatctttgacacaggcttatttttgtgttgtaaaatgaaatctctaacaatactaacttggcagttgggtggaatccagtgccacccacacacatctgctcaaatagttctttaccttctgagccccaagacagcccagtcctcaaattaacaatgatggcaggcttcaggaggctgatggctagttctccgccagacacaaatgcaagatagatagttttaaagctcctgaagtcatggttatcagaagaaaagctataaaggaagaactacagggaaaacctacaacactctctttggaaaaatgacaaaataacacatttactgatgcactaacggaagaaggtaggtgcatatattaactataacacataattaattttaactgttattggtgaatatgcacaaaatatacatacaaattagaacttgatcaataaatataaattcaaggtctagatgcaaatgggaagctctctgatgctggtaatttgaacaagaagtttattgtactttcacatgtttctaattctatgggaagaagttgggattccttttactaatgttggcttctgctccattatctgtaaagtccacctctttcacataatcgcagaaattaaagatgtccaaggcccctgtagggcatttcatccatgtcatactcttatcagatgactgtctttttgttctgaaagactgaatgagtgggttttcatcatctctccatttgaaagtcaagtaagctttatctcttcggattcaaggtctaaatttgtccttgtttcttcctaatattttaatgtaattcctatgtcaattgtatttacacaatttttaatatttaactctgatttgcattatagaaattagtccacttcaataaacatgaatgtgcaaaaacaaaattactctggaaaagtcaggttttttaaataaacattatccttttattaaattactaaaatgtttctcatataacagtaatgattattctaagcaactgcatgagncttt

SEQ ID NO: 47537 - DNA, 2056 bp, Homo sapiens
agttactaaattatagactaagttttgtcagcagcatactccggaaagtctcatacttcttgggagtctgccctcctaagtatgcgtgctatatgcattcattacgtgtaagtatttaacaaaaaagcattcttgaccatgaatgaagtagtttgtttcatagcttgtctcattgaatagtattattgaagatactaaatgatgcaaaccaaatggattttttccatgtcatgatgtaatttttctttcttctttcttttttttaaattttagcagtggcttattatttgtttttcataaattaaaataacttttgataatgtttactttaagacatgtaacatgttaaaaggttaaacttatggctgtttttaaagggctattcatttaatctgagttttcccttattttcagctttttcctagcatataatagtcattaagcatgacatatccttcatatgatcactcatcttgagttaattagaaaatacctgagttcacgtgctaaagtcatttcactgtaataaactgactatggtttcttaagaacatgacactaaaaaaaaagtggtttttttccaccgttgctgattattagacagtaggaaatagctgttttctttagttttacaagatgtgacagctttagtggtagatgtagggaaacatttcaacagccatagtactatttgttttaccactgattgcactattttgtttttttaacagttgcaaagctttttaatgcataaaagtataattgaaatctgtggtatttatttacaaacatgtctacaaaaatagattacagcttattttatttttagttaaatctcttaatacacagagaactcccaatcttgctcatctaaataaggaaagacttggtgtatagtgtgatggtttagtcttaaggattaagacatttttggtacttgcatttgacttacgatgtatctgtgaaaatgggatgatattgacaaatggagactcctacctcaatagttaatggaataataagaggctactgttgtgtctaatgttcttcaaaaaagtaatatcctcacttggagagtgtcaaatacatactttgaggattgactttatataagggtgccctgtagaaatctgttacacatatttttgacccatattatttacaatgtcttgataattctacctttttagagcaagaatagtatctgctaatgtaagggacatctgtatttaactcctttgtagacatgaatttctatcaaaatgttctttgcactgtaacagagattccttttttcaataatcttaattcaaaagcattattagacttgaaagggtttgataatctcccagtccttagtaaagattgagagaggctggagcagttttcagttttaaatgagtctgcagttaatatcaaatgtgagtttgggactgcctggcaacatttatatttcttattcagaacccttgatgagactatttttaaacatactagtctgctgatagaaagcactatacatcctattgtttctttctttccaaaatcagccttctgtctgtaacaaaaatgtactttatagagatggaggaaaaggtctaatactacatagccttaagtgtttctgtcattgttcaagtgtattttctgtaacagaaacatatttggaatgtttttcttttccccttataaattgtaattcctgaaatactgctgctttaaaaagtcccactgtcagattatattatctaacaattgaatattgtaaatatacttgtcttacctctcaataaaagggtacttttctattaattggtggtcaagtatatctgtgttatgaagttctaaaagctaatttagcattgcaaaataacctcatttttaaaaaattagccttatatgcagtgttttatttatcaaatgatcttcacatctttcatttccaaattgttgaaatgtactaatgaatacaaatagacttcaagtaagcaaaaatgttcttaattttgaaaactgtaaaataaagtcacttaccttgggcaatatgctatttttt

SEQ ID NO: 47538 - DNA, 1140 bp, Homo sapiens
  misc_feature (1)...(1140): n = a,t,c or g
tttttcaatgcattgtttattgagtactaactagctttgggcccaggctctgggttagcagcatgcgtgaaacaatcagaaacaatcatgagcgcctgcccacatggggcatacagtctggcagggcaagactgtagacacagaaataaatatccgattataagctgtgattagaggcatgatggaaaagagcaaggcttcctgagagaaacagggcgagcacaggaaaacctctctgagacagtgacatgaacttgaaacttgaagggtaaacaggagtgggcaagacaaaaggggaaagaaggaatgttccaggcagagagaaagagaaaagacccaggcacggtatagagccgaggacatctgaggaagaaagggccgccggggttggggccctctgggtgactgggagaggaaggcgccggaatggatccagattaaatcggatgctgtatgccctgtggagacatggggtgtacctctacaacgcactgcgttgtaagcaaaggagtgacctgatttaatttgatcttttaaaagtcattctaggccaggccgggtggctcacgcctgtaatcccagtgctttgggaggccgaggcgggtggaccacgaggtcaggtgttcgagaccagcctggccaacatagtgaaaccccatctctactaaaaatacaaaaattatccgggcatggtggtgcatgccntgtaatcccagntantcagaggtgaggcncgagaatccgcttgaacccgggaggtggaggttgccagtgagccgagaatcgcaccgctgcactcccaccnnnnnnnnnnnnnnnnnnnnnnnnnnnnnnnnnnnnnnnnacaaacaaacaaaatgtcattctacactgtgaaaaatgagctggaggaggcaaagggaagaaaggggagatcagtgaggaggctgttgtcatagctcaggcaggagtatggtagcttggacttggcaacagcgtgcaggtagagcaccaccgctggagtctggatgcgggatgcattctgatgtagggagtgggggaccgcgcagcatcaagaagccaccgctggagtccagatgagggatgcgttctgatgtagggagtgggggacggcgcagcatcaagacttgcactgaaaat

SEQ ID NO: 47539 - DNA, 942 bp, Homo sapiens; identical to SEQ ID NO: 3161

SEQ ID NO: 47540 - DNA, 2207 bp, Homo sapiens
  misc_feature (1)...(2207): n = a,t,c or g
ccgcgggtcgggctctgtgtcagcagccgggcgggcgctcgggcgggacatggcagcctgtacagcccggcgggccctggccgtgggcagccgctggtggtcccggtcgctgactggggcccggtggccaaggccgctctgtgcggcggccggagctggagccttctcgccagcgtcgaccacgacgacgcggaggcacctctcgtcccgaaaccgaccagagggcaaagtgttggagacagttggtgtgtttgaggtgccaaaacagaatggaaaatatgagaccgggcagcttttccttcatagcatttttggctaccgaggtgtcgtcctgtttccctggcaggccagactgtatgaccgggatgtggcttctgcagctccagaaaaagcagagaaccctgctggccatggctccaaggaggtgaaaggcaaaactcacacttactatcaggtgctgattgatgctcgtgactgcccacatatatctcagagatctcagacagaagctgtgaccttcttggctaaccatgatgacagtcgggccctctatgccatcccaggcttggactatgtcagccatgaagacatcctcccctacacctccactgatcaggttcccatccaacatgaactctttgaaagatttcttctgtatgaccagacaaaagcacctccttttgtggctcgggagacgctaagggcctgggcaagagaagaatcacccctggctggagctctccgatgttcatcggggaaacaactgagaacatacgtgtcactgtcatccccttctacatgggcatgagggaagcccagaattcccacgtgtactggtggcgctactgtatccgtttggagaaccttgacagtgattgtggtacaggctccggggagcgggcactgggaggattattccagtctcttctgggcaccttggagacagtgcgaggccgaggggtagtgggcagggaaccagtgttatccaaggagcagcctgcgttccagtatagcagccacgtctcgctgcaggcttccagtgggcacatgtggggcacgttccgctttgaaagacctgatggctcccactttgatgttcggattcctcccttctccctggaaagcaataaagatgagaagacaccaccctcaggccttcactggtaggccagctgaggccccaagtgcccaggcttggtcaccgggaagaacaactctcatcccacaattgctgcagaactcttctctccccatcatgggccacagtgggtctcttaatttgattgtggggttctttttgtggggaggggtggtataacttttcttcagaagacccatgtgggacacctccaaggctggcctcctcataagccctgcctacaccatgttccagtaaacctctccaccaaggaactgtgttcagctgccacaggcctggaggagtttcctggcctgtcacgtgaggtttgatcagtaaaccagtgcacgcttggccacccttgccatttctgctcccagagtctcaggctccccttctgacccagtgtgcgcccttgactgctttctttgctgcccttccagggagctgcccccctgggtagggcatgtgcctgtttccctctcagcctggaggctggctggacatctcctagggtcactgtgcctctcagctagttggcgggggtgctggactggactcttgttcactttaccttctgccaaatgcagagagggaggccagtgtcagggtcggagtggcctggctcttagcactgaccgaccattgccatttctggcctcgctaggcccaggagaggagggaggcaagccagtcgggtttcctggagcaatgggtgtgccagccctcagcatgactctgccaagcatccagaccacaaatgcaggaatttggctgaggagcagctttaggtatggattgatgactaagtcaagctacttcctgagcttctctcagatttccaagagccagagatgaattgtgctgcatcttgccccaattcttaggatttcttttcctccgccactgcagtgattgttagaggtagttttcttgaattaatattaaatcacagttccagcccttgttattcttgtccttagtcctccagggggagctggggttgcagggcaacagtacagtcgcgcttacgacctggctagaacacaaggncagatgataaacagaa

SEQ ID NO: 47541 - DNA, 1239 bp, Homo sapiens; identical to SEQ ID NO: 3167

SEQ ID NO: 47542 - DNA, 2410 bp, Homo sapiens
catctatgttaagtgtaaaatttcacttaaaaatccatttaaacttaaaaggtttgtttttaaaaatattaagtaactcaagtactagaagtacagaagcctggcaaacattatgaaggtaaggaaggtaatacatagacaactgaactggtaggggcactggtctgagtgaggactttgggcacagtaactccacctcatgctttgtgctttctggggttttgtctaatttgctgttgttgttccctaatataggactatttttttagaaaacccaaccttattttggctaaggggaaagggatttactttcatttgggttaaggtagggcagaccaaaggcccctagaagttagtggttcaggttctaactacacaacactggcaagtggaaagggagatgtggggagaagtgaaaaaccctgggcataagattccagaacagcagagtgtgcttcccttcccaccaagctgtcaaatacaaatctggagattcaataaaaaaaatcattccatgatagagaagacagaaagctgtaattctttttaatgtttaacttttctttgtaaaaaacttattaaaaaacttaaatggtcagttaaagttaaaaatctattgctgcacaatttaactgattaaaagatttccagatctcttgactccaagagtcatttctttcatttcttacagatctcacacttccagatttctctttagcaaacatgatctgaaatcatttgtaggtaatcagcacttcaagcatatggaggctctggctgaggcagcagagtcctgggagactgaacactgggagattcaatgtcccccacagaaacctagacctgggctcagcccaccactgctaggggtcctgcacaggacccatgtggctcctgcacggggatctatgtggcgaacctgagctcgatcttcgctgtcagtcctcctggtctctcctgagggccgccgacccgccacagtgtggctctccttccaaaagccagagcttcattccactttgattctcatcagctcccatcttcctcctccacagagtttcagaaccaaggaatgaaacttctcaaggctctgccccatgtcccacactgatgaacgtcatccccagctgctggccgatgcgatagagctcgctctccacttcctctgtcagggcactggtggcttcatcaagcactgcgtacttcggctgcaggtagaagagtcgggcaaaggagagccgttgcatctcccccggggacagaacatcataccagttccagtccacctgctggtccagaccctctgtccttgccaccaagttggacaggcctgccaattccaagaacctcaagatcctctcatcatcggcagaacctgagtcggggtagacctccttcaggggatatatcacctgctcccgaagggtcccgtcagtgaagaatggcttttgtggcaggaatagcaccccatggggcccaaagtccgtcagcatctgcactgagccccgtgtacttcgtccagaggccacctagaacccggagcaaggaggtcttgccagtgcccgtgttgcctgtgatgagcaggctctgtccctcggagatctttaggctcagatccttgattaggggtttgtcagaggagggggcagagatggagacccgctcaaggagaaatgctgtgtctgctggctctgccgctggccaccctgggggtgtgtccaagccccactcgctctcgcccaggatctcgcagtcctgtgacttcagggacatgtccagaagcgtctcccgaagctgcccaattctgtgcgtgtagccagccacatctgagagcgtcgtggacaggtcgatgagctgggtgaagcagctgatgaggtagatgcacacaaaggcattcttgctgaccagggtgctaagctctgcgggactcaggtctccatagaccccgctgaaaatggggattgcgatgacaacgtaactcaggatgctgcccagatagtcaaaggtgttgatgccgatgtacagccagagctccttggacatcagctccctctgggtctgaaggagtctctgcagcctgcggtctgtcctcatgtgctccacatgcccagctctgacaaggaaaggctgggatgtccacagggctgtagaaagcagcaggctccgcattcacccgaatctgcatgtgcttgaacctaaaatctccctccagcttctcctgatgcaccagcttcatcacaatggggcccatcaaagttttgttcaccacggtccccaggatgaaatacccgaagatgctcacaggcccgagccagcctgtgctttggaagcactggtaagtgtagtagacgagggtgaacggggagatgatgagcttgctggccatgctgctgagctgccggcagaatcg

SEQ ID NO: 47543 - DNA, 1454 bp, Homo sapiens
ctttttttttttttttcagtatttcacatggttttattacaaaacaagccacaaaacagttttagaaaatttttgctacataccaattaggagatcacataaaatgagaagcgtaacagtttccatgcactcagcctagagcttacagcgagtgcatttcacagctgaaacatcactgctttaaaacacagaatcatgctaccccttcataagcagagggggaggaggtcaaacagtatgtttttgccaaacgtttgctttatctgaactctatctagtatgaaggactggctgccgcagcgaataacacagagaggaaaaggaacaaaggaagaaaagggtgctggcagacaagatttaacaaacctgtccacttccgacattttgaaagtttataaacaaagctcacttggggacactcaatttccaaaatgctgtgacctccacatgttatctaatttatactgaaaacaaacctactaaactccactcctcaactactgaacctgctatttattcatggggtctttttagcccatataagagtatatttatattcagaaatataaaagaaaaaaaatttgcttcaagtagactaagaagctggaccttaaaactactttctttctcgtgggagctgagtattcaactcagaaatagatgtataactccaatattctgacctgacatcaatctccataatgtatacctcaatacccttatgatgtctcacttaacactaaaggccaaattatttttaccaaccatcagctgacattgagtaagcaagtcttttgaagatttcaaaagtaatagatggtggccaggcgtggtggctcacacctataatctgagtactttgggaggctgtgaggcaggaagatcacttgagcccaggaggtccaggctgcagtgagccatgatcaggccaccgcactccagcctgggtgacagagtgaaacactgtttctaaaaataaaaattaaagaataatggatggcattattcagccatggggaggaccacctgaaatactgttacacacagtgggtcaagaccacttcaaaagccttatgaaaatagcacaactcaggcaagggcttttattccacaaagaaaatgcagtacattttttagttcctgtaaaaaaagcaaaaactccagatttactccagagcctatgcacttagtcactaatctatactgcatccccaacctattttttccatttggttcaattttatacatttaaaactaactgctttggtcaaatacgtaccatctttggttcacattaaaagattatggtccaaaactggccagaagttaagaaatatcaacaaaataggaagtttgaaatacaatttaggaatggaatgcttttagagcttgtttcattgaagataataatttatctcatattgaactacattaacgatgttctgggtaggtgc

SEQ ID NO: 47544 - DNA, 458 bp, Homo sapiens
tttgaaatcctatgacatgattacgaatttaataccgactcactatagggaatttggccctcgaggccaagaattcggcacgaggagatttcatttatgagatgacatgaacacccaatgcttttcccactcccacaaagtagaccttcaagaaaaccatggtaggcataggagaatttttgtctttgttttaacctttgtcctaaacagatctgatctggcgaatcttcacatattggttatttcctttccataggaagtgcttagcctccaagtatgggctacttattttttaacaattactttcactccaagacgtacataattttttaaacatgggaatccctgatgtttcatttttgttttggaaatgatttttagagaagatgaattatcctgtctgatgccatgagatctatttttatcatttgggatgttgagactaaaactgacaacat

SEQ ID NO: 47545 - DNA, 2251 bp, Homo sapiens
tttttttttaacaagaaaacagaaccataagatttttatttaacatttttgattaaaggaattgtattgcaaattatgactttttaatttggcaacatccttttaatggtgttctttctttgtccttctctttctcttcctctctctctccctctcttccctaaagctccattccgacttagacaagggagagggcactgcgaaatacaccctctcaggagatggcgctggcaccgtttttaccattgatgaaaccacaggggacattcatgcaataaggagcctagatagagaagaaaaacctttctacactcttcgtgctcaggctgtggacatagaaaccagaaagcccctggagcctgaatcagaattcatcatcaaagtgcaggatattaatgataatgagccaaagttttgggatggaccttatgttgctactgtcccagaaatgtctcctgtgggtgagtaggcaaatcaaaattctgtgagatacaatgagacctcttcaacattgactttttgcaggttgatgtaaacatcttatctatcatctaaaagaattatttttcaattctagaaaatacagttcttttcatttatttttgtaacttttttgtttttctttctgcttcattatgaagataactacaggaatatataacattagttcctgttttccaccctgtgaatttacctgaattcatagaatccttgcgtgctttaagcaaaaaatgtattttgtattgaaattgattcttatctcaattccagacacctatacagtgctggagacacctaccctacaccacgaaatgccagacagtaattcctagatcaaagtaaatgatctaaagcatgcatcacatctgatctggaagtggtccagaaacaggtgtgttgcatcttctgtagctgtaaatagagattctggaagggtgatactgtttccttttcagggtaaataacccatacttgttatgccatcaagccaagcagcaaatgaataatgtcatgaaaatattattagaacaaattaacaaattacaattacaattatcaaattaacaattagaatatagtagcaccatcattctaaaaatttaaatttgatataaatatacatttccatatcagcctaaatttacaaagtcctataatatgtaggatataaggtcaataagttaagaattccagccttaaggacaattttaaattataatttttattcctcagtcaccactgctaatccttcaatttatttcaaagtaacttctggtttttattacatttggaagataaagcaacttatcacatgtaggttacaacttaaaattcgtgtatgagccattgcttatattttctaaatctgacatgacccagggggtttctactgctcctaccaccacccaggacatgcgatgaagattgtgcacgctaccgtgagggcagaagcaggttagtagctgtaggagctgtcacatggatttactataatgcacttgaaattgtgtatgtgaccttatcaggcatttaaggaccataatctctccttgacctaagaaatcagcttgaagtaattcacttagatttcaaattttaatgtggatacccaaggctgcaaatctgttattcagtacctgctacacttttggggttgcctcttttatgcactgttagaattgctagaaatttagaagtccaattggaaagaagcatatcttgttagaaagtattcccagaaaatgaggaaggctacattttaactgtgtcttgattttacagggagaaaaataaagttaatattttgaggaaaaaataaggcttttaagatgacatgctatatagtagacaaatagtttaactcggtgcctacttcatgtacactggatgtgttaacatgaatttatgaccttcagtgactttttattaccaaaacagcttccttaaagcaaacacacacacatgcctctacagtattggaaaattccgtctccttagataaaacaattaggatttttcttgggccaactagaataattagggctgcagagttggagcctttatataaggagtttgcagctcatatccgaagagagaaatgtatttcgaaagtcaaaagtgtaggtaagtgagaaagcagagtagtttcagcttttgcatttggagtgggtataatttactgtgttgtcataagatactggaaagatctttggaagaataggttcttaaagtgttttctcatgtgccctta

SEQ ID NO: 47546 - DNA, 1204 bp, Homo sapiens; identical to SEQ ID NO: 3173

SEQ ID NO: 47547 - DNA, 1136 bp, Homo sapiens
cagctccatcctgagccacattaaggcctctctggcagcagtgcaccttttcaccgccaaagaggtgtccttctccaacaagccctacttccggggtgagttctgcagtcagggtgtccgtgagggcctcatcgtgggcttcgtccactctatgtgccagacggctcagagcttctgcgacagccctggggagaaggggggtgccacaccacctgccctgctcctgctgctctcccgcctctgcctggactacgagacggccaccatctcctacatcctcactctcactgatgaacagtttctggtgcaggatcagttcccagtgacgcccgtgagcacgctgtgtgcagaggccagggaaacggcgcggcggctgctgacccactacgtgaaggtgcagggcctggtcatatcacagatgctgcgcaagagcgtggagactcgcgactggctcagcactctggagccccggaatgtgcgggccgtcatgaagcgggtggtggaggataccaccgccatcgacgtgcaggtggggctcctgtacgaagagggtgttcgcaaggcccagagcagcgactccagcaagaggactttctccgtgtacagcagctctcggcagcagggccgctacgcccccagctatacccccagtgccccgatggacaccaacctcttgagcaatatccagaagctattctctgaacgtattgatgtgttcagccctgtggagttcaacaaggtgtcggtgctgaccggcatcatcaagatcagcctgaagacgctgctggagtgtgtgcggctgcgcagcctttgggcgcttcgggctgcagcaggtgcaagtggactgccactttctgcagctctacctgtggcgttttgtggccgacgaagaactcgtgcacttgctgctggacgaagtggtggcctctgctgccctgcgctgcccagaccctgtgcccatggagcccagtgtggttgaggtcatctgcgagcgcggctaggcgcagccgctgccatgcaccggtctgtccctgcaccccatggcacccaggatctggtctcggtggtccttccccgcaggcaggtgtcaggaccggcctaataaacatgtgtggcctcctcaaaaaaaaaaaaaa

SEQ ID NO: 47548 - DNA, 1130 bp, Homo sapiens
  misc_feature (1)...(1130): n = a,t,c or g
aacgaanggccantgcccaagccnaaaaattnaccctcggcnaaaagggnaagaagcttgcggccgcnttaataaaagaacntcttattttttttttttttgttatagaaatctgtttaatggtttaggaatgtgtacactctggctctgccaagtttccataaaggcaacttttccatgttttaaaaaatagatttggtataaagatttatatattcataaataggtggcatgaaaaattaccaaatgcaaatggaatacttgcgctgactgaagccctgttcaccccaagtccaggccctgcaggggtccgagggtctctgctggaggaggccccaactccggcagcctcttagggaagagaaactgaattaaatgtgtattaggaacccctccagctccttaagccagcgtcgcactggccccaccgaggcctcagcccacctccctctgcttccccccgccacctccaccattgccccctcccctgcactctggcccctgaccccacctgttcccactctttggcaatttatcaacaaaggaagagatgacactgttctccttccgccccagagcccgggctgccgggagagcttagcctgccaaggggaggaaacaagccggctttgttttgtctcacacacttccccgtcttcactcccagcccagttttaagggccggaagggcagtggggccccctcctggtgggatacagcaggcaggagcccctgcaaccccaggtacaggtcttgagtccctggacaccggcttttgtgcctgagagggggtgggaacgcttctctgtaggaaatggcttcagtccaggatccaggggtaggggaacctcgaccatggggtgggttgctcctgccagggggtaacttagcaaggccccagggtggagccagttctgggagtgtgtccagctaggcatctgtgaccccaaatngcatgaataaaaggncaggttgctaagagccaggggaggncatggggcagggagaccaggttggcccagacaggacagaggtgctccagggacagggtgctggagtgaagccaggtggagcggtggagctgtggagcctttgaaacatcctgatggcccaggcctttgttcccaaga

SEQ ID NO: 47549 - DNA, 7657 bp, Homo sapiens
tttttttttttttgattaagaaataactttatttttcatgtgtcaatcccatgattgaaaagacatgttgctctcaagtagataagaggcataatcttaaacaaaattctttctgaaaatttagcttatgaactcattacactgcaaaccagagaaggagcacaaaaagctgcagcccacattgaaacctggcaaacactctccgccaaaattagtagcaggaatgttaaagctttatcaaaaacatgtcagcaacggaatagcaacaatacagccattaactgttgtgccttcaacttaagaaaagcatttaaagaatcaccccatttcttataaaaatcatttctcagaaaagaattgttaatcaaaagactattagaactggaactctcttctttcacttcagttctagattttctttaatcaacaatatctctagttaatacttggacagaatttggcttctcagaagagtctttgtcatttaagcacagtgtggaatgggaaaaagtgtatagttacaaggaaactagaagagtacaaaaaaatagtcacttctgaaactcgctgatgcctcaagaaatcagagacccttcattaaggtgggtctcatatgcctgagagctttgtgcttgaggaagtatgacttagaggtagctctggttctggtaatttatatttaattataatttgctgtatcctgtcacaagagagttctaatattttcagcaaagtaaaagcattcaacattttttccttacccaccctatagcttccccatagaaaaagataagaaaaagcttaatgtgactccacatagaatagcagctaattcagcaattcgcactgtatggttgttgacaggactaggaaaggcagcctagtgccccaagctgtaggagctggatctgcagaagtgtgcaggtctgctgtgttcacagcactcagggaaagaggggaggaggtggctgatgagggtgcacgttcggagaagtctgtatgtgtttcatggcatattctgccacagcaacaaaacaaccaaatcagcagtagatttgactgtacccttcgatttcaaagaagtctgcgcccctcgcccactcgccacctacacttcatgcaggaaagatagatcactatcatctatttgaatacagggcctcagaagaggtgggctggtatgggtacaaaaccagccgtattttataacaaaacactttttgaaaagatttatataactttaagtattaaaatgaatgctttacctctacatatgtatcactgtacagtcttgcacccacacgattatggtcatatttgaaagcgaactcaagcacaaacactgaatccaaaaggcagttttaagggagatccaaccttacccacagcgccaaccattccactctgagcctctctccttgagtcaataatctgaatgtcaagttgaaaggaacagaaagaatcaaatattcagaccaaattaatcaggcaccacacactatttagcgcacagggtatcaattaaatgatactagaaaaaaaatgtctactgcctgaggtattcattttttaaaagtcaataaactgaaaatttcaaaggagaaagtggtatgaagacgttccttcccaatccctcttcaaataaatcattaaatacactgggcaacattatactgtcatttttatcataacaatataaacaatttttatcatcatcctgaatattactttataaagatatatattttaaaaggctttcaaaacatttttcaacccagcatttgagaataaagcattaagagttttgtatacagtaacacattcatgtgataagtgtatgaatttacaaccatacataatatgtatatatgtatatatatttatataaaaaacaaacttggccagaagttaaggctacctacgaagttgtccaagtaaattatgcttgtcaaaacaattataaaattcaaatcacacatgcatttttaaatcatctaaatcactgacaaacaaggttcagcatccaaagttttcaaattaactgcaagaaagtgctacagacatttacattttctaaatatgaatcagtgttcccacaaagttacatttaaatttttcaccagcctcaaaagtaatataactgaaaacaaactttcacaatttggtacctagcactcttaagagagaataggttgaaaatggcaggcagcaagcatcattcacaaatgtgctgtctcagacagcaaagtacagtttataatactgtctgacctgacacgtggttgaaattctaagcctcataagggactaggagtgaacatttcattaataattacacacaccagcaaccacatgataaaggcttcaggcttttcccactcaaatcaaagtgaatgatttaaacatggaacaaaataaaaccaagacataagtagcctcatttcaaaataaggaaaagtaatttctgacgtgcctaaatatttaatttaaacttttaaaaaagtattctgaactaatgcctcttttaagattaatttctgaagatatatttataaatataactcacagcctgcaggcctctgacagagttttaaacagaattagctaagatggagagaaatcatttaaccagctcaggtattattttagaaaataaacacagatagctaaacctatattgcttaaatttcatgagttttacatttccaatttgcaatctaaaagctacctctttttttcatctttccaaactttgtacatgtattttaggatgaaaatttctatcaaacggtaagagaagcaaaaattccaaaacaaccatgtttttaattctaaagatgtttttgtccctgttgatcaaaaagaaaatcctacttacgacttgactgaaatttagtgttttaggcactatcttaagaaaattagcaccctcaattattagctcatgccaaaagaggtaattcgttttgacaaatcactgaaataatttttctcttttaaaagaggttgttcctatttaaaaaaaaaaatatattcatttactgagtcaacagcatatttgagcaaatcatagcttttttatgagagctgacccacccaaaagaaaattatccccaactctctgcagcagagcttcaactacagaatttaggcattgagaagttacgtcaggtaagaagaatttattaatacttagtgatgtaacagtttttcttaaataactttaaacattatttctccaacagttttcaggtagcagtgtctaaagaacataatttttaagatgaatatacaaagtcaccttagtcaccaagatgctactttgccaacatggcctagcgtctgtcttagttcgttttcccttcatctttgcttaaaaacaaaacaaaacaaaaaaaacaaaaaaggaaaacacctagaaggtgaggcaggtgattgtcttcatgagctatctgagagactgtggcagaagatgagaacagaatgacatactgaaagagccaaacccacgcacagaatgcttccctttgttatgatccggtggaatgcaagctgggaataggataaaatttggaaatccggctctgtgttgatgggttaaggcattcagactccccagtcattttaaagaatacttcctgttcctgtagtttcctggcaaactcttcttccagtgtctttttcctaggtctcaatttctctctccactcctttaattcttggctatgttcctcatctaactccttcagtttctgagtctcatgctcaaccaacaagtggcatttttcattctgcagctgatgcagttcgcggacattggcttcacactgcaactgaagatctcgcatttgattctcatgtttctgatgctgagccattctctcatttttctgcctcttttcttcttgtgcagcaaactgtttaattttatcacggtcctgatctggtgtggctgttgagttaattctcaaactcttcttaaacatggccattcgagtcttggcttcactgcgctgaatcttgggcagtcttgctctttcttgagtctgtctgtttttcaattcctcaataagtctttgattgtaacgctgcatttgctctgtttccttctcgtggcggcttaagtagctgatgtctttgcatgaaatactgatctttaagctgctgtttgagcagctggtgtttttcttgtaagtgtcgttcttcgagctcccaaattgcagcttctcgagctctcatgagctgttgcttgttattcaggcactctctctcaatattagctaactctgccttctgctgctggatgatctttttcagagagccatctaattcttgctgttgtttctgaacaaactcttgttcctccttctttcggttcttcagcatattctgaaatttggacaactctttctcttgttctcctttgatgcgtttggcttcatctcgcaagcgatttgtgtgctcttgttccaggcgttcgatagtctgtttctgctgtttttctagattctcaatttcctggtcatattgtcgctttttactcatcatttcctgctcaaagcgccggaaaatttgttctcgttgttgctgtagtttgctattgagctgttgttgggctctttgctcttctttctgaagaaatcttaattcccgaagttcctgacgtctaagaaaccgcaattcttcagttttggaatcactatctgtaactatctttgatgttgttacactcacttctacaccatcaacaataaatttgcgtgttttcttcaatgttttcttttgtcttcttgtttcttgtaaagatatcgatccactgtctttagttttacttagaaagctagagatggataaattcaagtcaatactgctagtatcagcagtggaaccagtgcctgaatcattatcattttcctttggattctcagattctggtggcagaatagtttcagtttttgataaagaacctatttcttctttattttctccactgtcagagttgatattaatactgggtattagaacaggctgaggttcagtgggctgtgaaactacagtaacttcaggctcttttttaattgacactggaatttcttttttctctttatctatctgagtagtgactttagaagcatcctgaacttcacttcctaaagccttttggtcagtatcagccaccacacttctgacctccatttcttcagtgctacttgactcagtgatttcttcaccttcagttgttcctggttcctcattgatgtccattatgttctctgaactgtttattgcttgttccttatttttaccttcttctatttcattcatttcaactatttctttaataggaacttccttagtaccaccagcctcaggacccaccatgggcttattaattaatttctggcctacttcgaccacttctttcccatcattactctgcgtatcctcagcactgtcttcatccactttctgagccacatctgctgcctcacatgttcctatcacatcacttgtattgctgatcacatctttttgagttttgtcgtcttcccccaatttctcttgggtgtcttcctttgtaagcccaacttcactatcaactgcctgaatatttgcctctttttctccagtctcttgagaaactaaatctactgtttgcaaaatagtatctttaatttcttcagattttataagcttattttcaaacatctgttgcttttcctgatccttttcttcctcagattttagattatgttcaatatttgtttctaaggttatcattatattattctcttttccttcactgactgaattaatgtccacagtttcttggtcttctgtgtcaggcagattttcaagcttgggcctcttctctctttcattctccttgattactgctgttctgtcatggagttcagtcattgcttctaactgagcatcggtaatatgttcattaatatcctccacagccttttcaggttcatcagtggtgggtttttcattaagaattttgctgttgagtttatcttcagagttactacgttctgttttttctgagacagactccaaaatacaagcattttgtgaaagtttatcttcttcagagctggcgatactaaggtcagaagatgcacgcttacttgcaggtattggcagagaattttctgtttcctcctcttcatcttcctctttgccatcttcaacttcttctgttacttcagccttcgcctctgcaatcaattctcggatgggtttgttggaatcaacagtaacaaagggatgctgcagcagctgagatgtagtccacctggcatccacattcttttctaagcatttctttagaaagtccttaaaatttgaagaccatctggatggctgtgctaatgtaggtggctcagattttgctatttttagcagcactcgcattggatttaattcatgatgaggtggttctatctcagccatttctattaaagtgatacccagggaccaaacatcagctttgtagtcatagggtctgtccttagatgtttcacacatgactacttcaggagccatccaatatggtgtaccaataaaggaatctcttctttgaattgtcctcgtgtttttagctgatactccaaaatccgccaatttgatatctccatctaaggtaaagagaatgttgccagccttcagatctctgtggatgatcttattatcatgtaagtagttcaatgcatctaaagtctgcttgcaaactacttgtatttgggactcagttaatggtctctcaagttcaagcatcacagcatctactgctccacctgcacaaaattcaatgaggatccaaagattgttctcataatagaaggcatctagaagcttgactatatttgggtgatcacaagatgctaatatgtcaatctctaccatgtaatcttcaagttcttcttcagatttagtgtcaatcacttttgcagcagctaaaacactggtctctttattctgggccttgtacactttcccaaaggctccgtcgcccagttctcctataatctcccaaaagtcttcggggttcaggtccctcttcacgtgttcgtactgcttcttcttcttctcgctccccaacttgaagatcttacggaaactgaagaaggacatttttcctcccaacacagagttccttgcacttaaggactaaaaacaataaaaggcaaagtttctcttccctgctctcccgcgcgagcccggctggcggcggcgggcgcggcgtccctcggcccccgcagctccggccgggcggtcccgggagaaggcggggcggcgacccgggctccggcccgcggtgggggtgctgcgcgagcggcccctccgccgagcccggcccgcgagccgcgcggtgggcgcctcgcctccggcccaccctccgggagcggcacctgcccgcaagctcgctcccacccggcctgatccgacgggtccgagcggtcaggactcccgcggcggcggcttaggcccgtgtcacggcgagtctccaggggcggcggccactctgggagagagaagcggccggcggcctcggaggcgggcagtcgagaagccgagccctcccgcctcgggccgcgagcctagggtctcctccgccgccgtccgctcccgcggcgcaaggccc

SEQ ID NO: 47550 - DNA, 950 bp, Homo sapiens
ttttttttttctaagttgaaaaaccatttatttcaccggaaagaaaaaaagtgatccaactctataggtctagcctttggaccaaaaagagaccctggagcagtgagactctcaccaaggtcattcccaaatccaacagccgcaggaggcaggaggcagggaggagacagcacagcccccaccacagtttctgcacacaatgaggcctgctgggagaagagaacatgaatgggaagctacagaagtattgaaggacagaagaacaggaaaatgggcaggagaggaaaggaaaggaaaggaagagaaggtctgaacttagcaaggtaaattaaggtccacggttcctgagggactgaacgcacagagccgagaacgtcccggagatggggtaccacgaagggtgtattctcatgcacaaccgcagctcggaatttcagcccacacacatcccaccttgaaactctgtgttatcaaggcccctgatggcctccactgcatcctctgcccgctccatgtgtacgaaggcataatctttcacgatgtcacattcgatgaccggaccatactcctcaaacttggctcgaagctccttattggtgcaggtgggactgatgttgcccacatgcaactttgttgaggttttgctcttattcttgctggcttccacgttgatgttcaccccatgaagcttgtaatggtgcaggttgcgtatggcatcctcagctgccgtcttgtcttctatgtgcacaaagccgtaattcttaatgatgtcacattccagcaccttcccatactgctcgaagagtgagcgaatctcctgctctgtagcctcccggggcaggtttccgatgaacagcttcaccatcctgacaagagcccgcacagaaaccagcagggcctcctgccgctcggcgcggacgcttctgacaaaacgctaaaatggcggcgcc

SEQ ID NO: 47551 - DNA, 1886 bp, Homo sapiens
gtttaagaaaagttttattaatgtgttaatatttcagcaaagttattgcaacaggttgaaaatgcagacacactattacaggctgtaaagtaacaaatgagttttacacaattaaaatattaacacatacttatgggatttgttgaatgactaacagacccataaaagaaattaaatctgagacgaaatccagtattagcacctacaatatctctgacagtgaaacttttaatggtttctctctcctaatgtatttttaaactctctccccaaatacagcgctctcaaacccccaaggataaacgaaaggcataagcagcccccgatcctaggaacgtacagcccaaaagcagagctacaaatatggactcagacttgagagttttactgagaagtaacttactgtacttgagccaatcataagatttctgtgcactgaatactgtatatgagaaaattctgtgggtcataaggtttgccttagggatagttaaaaattagtaatatacagtattattcctatcaaatttttttctcataagttatatttataacaaaactataattaaaatattttttatacctgcttattccatatccagggacacagcgggaacatttatgtgtctgatggtttggcatccactttattgtgcttactgatttttgtgatgaacaagcagcacgtatcatatctttccaacattcaaggtaatggaacaatgacataaaattctcccaaagaaataactggaaattgcattaaatactgctttaattaggaataattgctataataaaacaaataacattatacatttttttttcaataagcttcagtttgaggaactgaatagtagaaacagatcttaagatttgagtcatggtaaaaccagtaattctttgaaatctgggaggtgcaaaacgacagccacagccaaccctcaccaaaatcctggagaaaaacattttattaatttaggggaacaagatagaacactggtgaagatacggcttgttgaggtctaaagccacctgagaagctggcccaaggaatgaagagaacccaatggtatgtactggtggcagataacaagctttgcactgggctgaccaactgtgttttattaaatggctttgaataaaaaaaagtgaagtgcttcattgtgttttctcagaaactaatcaaaagattacagagtcctacacaatttggagacacaaagtggatgctgagcgactagaggtcactccaggtgtggaattttagaaagtgagtccttggagtaaatggcaccgtggctctggcagcagatagaaaggaatgatgctctggagaggaggtagggacactctgcggtcggccagtggatacatgaggggcccggctggaagtgggatctttaattcttcggtttatcttccactgctcatgcctctgtcttcataaatggtaatttcaataactcgcagtcctcgctcaatagggtctgtcaggaggaggccttgtggagcatagatcttctcattctgctcttgaatgtatttggagactttcttcagaaccttctcaataatgagtttcccatgccataggaaagatggtaatatgctgttaaacaacccaaacaaccttcgaagatatgactggccgccgagcttctctgcttctgcataaaggttatttagagttcgaactgtttcttcaaactgctgcctatcaatccggttctccacgtccgcagggaacttggtctggaactggcagcgtgtgccactgctgtagtctcgctgaatgaacacctttccggacaccggcgcctgctgcggcctcatggcgaggacaggacacgcccgcgccgcctcctctgccctccagctgctgt

SEQ ID NO: 47552 - DNA, 1121 bp, Homo sapiens
tttcctgaagtgatgtttaaattttatttaataaaaatacagttttctttttaaatcaacaaataacattgtttttcagaaatctactcaaatgctgctccttagttatggcttaagagctacccaaagacttcagtgggtaggctgaggggaatagaaatgcagaatccttctttcagtagcctatatacagttatctcctacactcactacacacgtttgggcatgtagaacttgccccagtatttccccttgtgggtcaagtcatatgggctcagtactttccgtatgcccagcatgttggcagtggctattcgctcaaatgtccaggggttctggttgttacgttctctttcctcttgatcttttcgcatcttctctagagtcccgcggctcacagcctttgctgcgaagggcaacttgtgggcaacctggtcaaggaaaccttgcacttcttcaaattcacaacgcccacccatctctacaacaaggcggccagccttcacaggtgtcacgtagtggtcaatagcacctttgcctccccccatgcgatgcccaacacttttgcgagtgatgggcttgaaaggggctggtactcgccatatggcaaacatgttcttggggtccatagagcggttgattgtcaggcgcatcatttcaaagtggccccaatgcaggtagccaccacccaatgccaagattgcaaaaatgcccttcctgtaaaaatcccgtaacttcaatggaaaggtcccccgtaatgtcaacttaaaattttaggttctccttccttactttttggcacaaagtgggtgcccctttcaaataaatctaagcttgggtttttcaggaatggaaacatcttcaaaacttggtactgggagcagtgtctttacgccagcactggcggggaggagtgccccaggaatctgacaagggcaaccgcaggagcggcgcactagcgcgagccagcagcctccacatggtcacgggctgtccggctggcgcggagctcccccagcgactccggctgtctcctgcacccaggtaagcagcggcgctccactacctagctgtaatcggctcaggacaccgctcagtggggccggaagttgtgttcaccc

SEQ ID NO: 47553 - DNA, 447 bp, Homo sapiens
gcagacctgccgaaacgacacaggatggctgctttgctttttgttagttctccaaccttccaaacccttggggcacatgcaagcactgtggaaaaactccattaaaccaagagtcatcttactccagatcccagactgcttgggaagttggacatgcatattcccaaagagaacagtgttggaagaagacaggagagcagctcgcgggttgggggtagagggtaggaaaagagggcaagatggaggactaccactcgaggccagcctccactgcctgttagggcggtagaacctaagagccggtccaaggcaacacaaaagacagtgaggctaggtctttaattgcagccaacgatcaagaaagcaactccgtctcaaaaaaaataattattatttaaaataatcattgggcctggcgcggtggctcacacctgtaatcctagcact

SEQ ID NO: 47554 - DNA, 1420 bp, Homo sapiens
tctacctgtacttcgggggcaccctggctgtgtgcgtctggaagtgctcctgacactctgtcccctgcttcctgaatctcctgggtgtgtcttaactgccagtcccagcacctcctgaaagccccactctcctccagtggtcacagtggaaggatcatgggagaaacagaagggaagaaagatgaggctgattataagcgactgcagaccttccctctggtcaggcactcggacatgccagaggagatgcgcgtggagaccatggagctatgtgtcacagcctgtgagaaattctccaacaacaacgagagcgccgccaagatgattcaaagagacaatggacaagaagttcggctcctcctggcacgtggtgatcggcgagggctttgggtttgagatcacccacgaggtgaagaacctcctctacctgtacttcgggggcaccctggctgtgtgcgtctggaagtgctcctgacactctgtcccctgccccgtcccctgcagggccttttcctgccactcatctggggtggggagcagccctaggcaggtcctggtttttccaaggagagttggggtcttttctttttgtctttgtgtaccagtttcctgagccacgcccagtgtgtgaacttgacatctccatccccaggctctcaactgtctccctcggagtctcagggtgtggacggggcagcgggcatgggtctgtgtgggagacgtggggtggggcggtgtgacagggtagaggaggtgggagatgagatcttccgcacaggaacacgccagtccccctttctccagggctgccttccccttgcatcctggggaagccccactgccctgccatccccagtactgccggaaattgtcgcccgtcccttgtcattagtggtcatatgaaaatggccccccaagaaggagatgattctttcaagggacacaggcagcttctctccttgtcctctggggaggtgctgacccctcagaaaccccttcccccaacttgaccccaggctgaacagaccactgcatctcactgggccagcagcccccccagcccccagccttggtggggaccaagcagcctttcccgtcccctcctcgacccgtacagttgagagccaggggctggtgtgtgggagctgctacctggcagtttctcgaggggtcaccgagcctctggtgggacacctgggcaggagtgctctcaccacgaggctgcttccgcagggaaccctggcctgcccgcgacttcgcatcagggaccgcatgctgatttgtactgctctctgctgggttttctatgttcttttcgagtgtgggaaaagggttttagtagaagggtgaatcgtattttacacagcggtcttatttatataaatgtcttggtttttacaattaaaatgaccaaaaactg

SEQ ID NO: 47555 - DNA, 700 bp, Homo sapiens; identical to SEQ ID NO: 3197

SEQ ID NO: 47556 - DNA, 1394 bp, Homo sapiens
ggacgtgagccacagcaccagaccaggggctatttttgtgacccacataggtggcccattcagcctcaaggggaaatccagggtaggaagcagcagctctgctggaactgggctcagcagtcccatttgggatgtaagcctctattgcctctaagatgacccttttcctgtgggttgactgactctgagggcgatttcggaaatgttttcagcagaaatgaaggataagcatcgcacattgtccagcaatgtctttgagaatgcagtcatttgcacggtgagttctcatctttgttttctgaaacagacgtttcttttagtaagtcacaatacatgctaattttcatttctagaatggtcactggcagttctcacttttaactataagaagtcacgtgggaacttagtgatttttaacaaatactaaattcatcctcactttatgttgatcttccagcaacgtttatatatttagtaattttaaaaattcctatttgatacaattaaattttatataatgtgttttgcttgaataaaatgttacatttatactttgaggaactctgaccgaatctttccatacaggatacagggtaaaggaaatatttttctagggttgtcgggagctggcgtacctcccgctgcttctccttgtggtccagcaccacccggctgggtcagtggcagaactgtcctgacttcgtgaacatggaactgctaagagggaaaactgcatctcagcattttcattttttctgaatattaagtgaaaagcaagttctatttgtaagaaatagcttttgctgaggagttgtgaattcctgcacctgtgtttgatgttatttgtatgcaatggattgctggccctttgttcctaagcaagagaagaccaaagatgcttcccccatgacctctccggtgaggatccgcaccccccggacttgctctctgatgaagggcatgtcgttcagtgccccagcagtcagaagcagtttttgggggaacctaaaacctaataatgttacccctcacaaaggaaatgttcttttactaagtaagttattgctgattcttgaatgtctgttatataactgggtcggctatcaagaaggaaggttatatttcttatcacattttaagttgttaagcaaatgtgagtttttttttaagaaatgaggctttcactgagatttgtgtgctattcataattttaggaattactgcttagaacagctgcttgggtgtatttttctacacaggtctgtacttctgccactttctccttttaaaaaaacaaaactatgcatattatgtattaaagttttcttggttttatatatcagagaataaaaacttttttgacttttgagtaaacaaaaaaaaaaaaaaagtcg

SEQ ID NO: 47557 - DNA, 813 bp, Homo sapiens
tttttttttttcacattctaagccatttattcaacgaccctatagagtataagtatacccaatacctcagactgcttttggcccctggactagaccctcattgctccaggcatgaggggctgtgcaccctgacagagccacccagggccagtggcctgtggccacaatgtcaatggctataaccgcttcatctgccgccgctcctgtcggcgctgccgtttctcattgtgctctggtgctggggtgccactgtctgcagtgaaccaggggcccagcacattcacccacaggaggtaaagggcccggcctggagccagaagccagaaggaccagacattagagagagaagcagctgagcacctgcacgatggctgtcagtaggatcacatccttaaggtgcctgggctggcggtgggggacactcactctgccatgccctgctccatgttgaggtccatgccaccatccatcagggccccatcctcagagaacgctgctcgtgccatcgagctcatagagtggtagctggccccatacactgccagactaaagcccagggccaaccaggcccaaaatgaggcagatgagtaaaagaagaccaacgtcacaaggcagtaaatggcattggcccccagtatgatccgcaggtagaacttcagagtctctctgttctcttcaaatatctgcttcttccctctcgtgcccactttgcccttgggcgccatggtgcgaggcaaatacccagcccgggaaacacgggagagcgaccgaaaccgcaatcactaagcaccacatcggcagctctatgcactt

SEQ ID NO: 47558 - DNA, 1376 bp, Homo sapiens
caggcttaaaaatactacaatatcaaggcaacaccgttgtattggaaaagagccagtttctatgtggtcatattttgtgaagtgcctatgccacaaaggccctctcccagggtttatatcactttgagaagagaatatgagacgtggacagggagaagataggaagaggagcatgatgcaggcacacctagacaaagaataataacggtactcagattcctctacagtttattgttatagcagaagttgtgggagacgggagggcaccctccacacatactacagtgtggtcagagccccagggtagccctttccaccctatgccaagccccaagcagcccagcccaagcttagctccctccccagtcccactctagatgcacactgagctaccaaagttagtgcagccaaacggccccaggccccttcctgttgccccagcaccaatccttccccacactcgttcactgcccgccaactcccattccaacttcctttttacactggatgtttctatcacatcctgaggaccactaacccaccagcaagtctccccctgacacacattcacgtaggtccatacccttcagagtcctaaagggttaatgagaagccacctcagctttggtgaatggagccccagccccaaatcccctccccttgcaaatatgggacaagtagggagagtctgatggaggcaccaggacaactacaacaacctcttacccctcagctatagacacctagatcaggacagaggatgcatatgccctctccaccttaacatcaaaatgggggaggaggagaatttaggggtctggggtccctaagagatattaggacatctcttcccaggagctggggggaatcacgggttaaaggtcaaggttagggtagcaatcaaagatcaaggtcatctccccgcatgatctgccctttttcccttgcttacggtggcccaatgccccttcagcacctcccaggttagctctgggggaggtgagggctgggtcccactctagggcaacaagggccattcaacaggagacctccatggtgtgccccgggggccccgaagaaagagttccagactcgctgctctgggacagggtgcgagagcgggaccggttgccatcaacggatgctgcactggtcagagaggctgtacgagaccgggacaggcgagtcatgcaggatgaggccatgtagcccatgccttgcaggaagtacttgaaggcctcggtcagcttgcctggctgagtcagctggggctgacctccggagtcagccatcttgaggaacgaggtctgggtggggtccagttttgagttacattccaccactgcatcttcatgaggtgcttggtctcctaccac

SEQ ID NO: 47559 - DNA, 343 bp, Homo sapiens
cgatgcacagttgaagtgaacttgcggggtttttcagtatctacgattcatagatctggaattcgcggccgcgtcgacgactcttggaaggggctatactagacacacaaagacagccccaagaaggacggtggagtagtgtcctcgctaaaagacagtagatatgcaacgcctcttgctcctgccctttctcctgctgggaacagtttctgctcttcatctggagaatgatgccccccatctggagagcctagagacacaggcagacctaggccaggatctggatagttcaaaggagcaggagagagacttggctctgacggaggaggtgattcaggcagag

SEQ ID NO: 47560 - DNA, 477 bp, Homo sapiens
  misc_feature (1)...(477): n = a,t,c or g
gcctcctgccttgcacttggcagcctgaagcggagagcacagggggatgagggtggcaggcagcggggagccgatagaggctcctttgcctgctgtggtcctccaggcagcctttcacaggcacgcccatgcatatctcctattctaacggcccctgacctctcccttttggatcctaaactgtgtctctggtctgaagactgggaaggagcaatttctcaatttatctttctactgtggatgctttcctacgccctgaggcacatgaagtcagaaaggaagggcagaggggcaagtaggcacagtaagggaattttcttttcttttctttttttttttngaaacanagtttcantntgtcacccaggctgnagngcaanggcatgatctcgcctccngggttnaagcnattntccngcctaagcctcccgagtanctgggattacaggcgcctgccaccacgcccagttaattttt

SEQ ID NO: 47561 - DNA, 1057 bp, Homo sapiens
  misc_feature (1)...(1057): n = a,t,c or g
catttctgtattatattctcaactcgttatctaaagcatcagaacatgtgttttcagagatgagtcctttactataaggttaatatttattttcattttctgtattatatatgaaaagtaaattaatgtgaaacctggcccagcttgctggaaagcaggttttaaattgtaaatattccttagaggagcaaatggattgtttaataccatagtctcagtaatctagcttatataaggtcattacattttttaactgaaaaacctagttacctgattattgcacattataaaattgtttttctaatactttatagggcccaacttcagaaaatacttcgcttttttctttttatgctttcgtttgtttaccagcaagcaacttccctgggggaaggccaaacacatattcataaaaaaaatcaagtagctgatgtgcagttgagaaaactagaggactgaaaaaacaaattttaactaggcaaatgctgtgaattactcttcctccccttctctgaaatgggtaaaggacaaattgtgtaaaaaaacctatgcactatagaagggaatagtaaccatttcttttgtctctctgtttctgttctgactgagaacctgcagccatttcttgttacatgaaaacaaaatgctacttgttacctctattttttgttactatacaattatgaaatgtaatgtaagacaccaacagaaatgatatacctgtaactgtacctatcaggactatacctcatttacagtcaggaaagcttactggggatgtcagggaaatgatacagggttggttctcatttcgtgccgaaatgaggacaggaaatttcagtgacggaggtggcgttgttgggggtattgatgtggccccgggtagtgccagcagagtaggggaaaactgcttttgccttaaaaactactcttgactggattgttcattttacaaaaaattcccttattaccaggcctcacccngccctgtgtgatagggttttgtagggaggaacttgattttccaatattttttaatgtatcncttgcccaaggt

SEQ ID NO: 47562 - DNA, 1669 bp, Homo sapiens
actctgtccttgagctcccacccccgggcccggggaatgccccaccttggggtgacttgcactgtagcttgcaaggcgtgttcttgcacgaaagtttgaatcttatggccctgcgagaggtgctcatcatcatgcccattttctgctgtttctgatgggtcagctacctcacggcggggccagctctgctgtcctggcaagtgtcattgactctctaaacttgaagtccttcaggagccctgagcccaacatccatgagacaccccgagttgtgcttcatgagagttggattctctgcccactctttcagggatgtccaaggtccatgttagggggcaggcccccagctccactcactgcacaagcaccctaaatgttggaagcacaaaatggttgtgatttgagcacaatggcagggtcctgcaggcagacttgacaggcccaggcccgggaggatccccccacgttggctctgtccaaagtgagattgggggtgcctgtgtctgggacagggggctgcccttgctcagaccaggccttggctcatggcttgtcctaattctgggactcgtcatcttacttcttgcccttctgtgcccatcttaagactggaggctgagccttgtcaggcccagccacatctttacgccatgggaccaggagtaaagcgctctctaaaccccgcaccccaaatctctaaacgcctgagttcaggctgagtcctagccctagtgagcctgaagagcttggactgattcccagtctcctgggtcaagccccactttgtgctttcgaagcttatgagcgggttccctggatagaaggagtcttccatccccactgcccttgggcctcttcagcatagtcctgtgccagggccctgtcctcaattatcagtcagttcagtatttgctttcacgtgagtgacggactcttctgaagcagccagaactctcaaaggcagcgcatgggagttgccttgcgagatttccaaggaaggaggaaagattaacaggcggacggccaacacccaagcctttgaggtggtcagagtgccacctttcagccccttggggaaggggacagcggtgggtctgggagtggcctcaccctggattcagcctaggaatctcttcaccctcagctgtccagccctgctgcctgtctggggatgtgtggcctgggcagagggcagtttaaagcacaaaaccacatggggaaaacacaaggttgcggggactttctcatgtgcctgatgtggtggagggagacaccagcaggtggctgcagtgacgttagggaacataacacttctttgccctgctagctctcagctctggggggcatcccccgatgtggtctgggctgggagcaggcatatcccctggttgttgcctgtgcctggtctgttcaccatcgtgtttgtgtgggcagagcctgccctgcaggagcagtgactttcttcccactgtgtgtcccggacctgtggtatgtgtccctttgccatcccaaacaggcaactgcttgctgctctccttgcttggcataacctcctggtcagtggccaatgccccacaggccttcctgggcctggccctcctctcctgactcccagatccttccctgccctcttgtgtgcaaggacagattttgcagggaaaagttctgt

SEQ ID NO: 47563 - DNA, 352 bp, Homo sapiens
gtttgcgtggtggttaagagctgggtttgagtcctgactctgcaatcacatgatattggccatgtgatactgtgtggctttcattcaacactgggaatctcagtttcctcaattatgagaataacctgaggtcctatgggtttgtggtggaaatcaacaaagcttacaaacttaacatgcttactagtccctagtgcacagtaggcactcaataaatgttcgctgaatgtcatgatactaaatcatgatgaacatactaaataagaagcatgcccaaagtggttaaaagaccaatgtttcctagtaaatattcatctactgatagttactaactgctgaaaacaacaaaact

SEQ ID NO: 47564 - DNA, 1637 bp, Homo sapiens
ttttttttttttttcatttgcattttacttttatttatttttgctttaataatgcatattctgttcacgcaaaaggtgcaaaggacagaaagcaggggtttaacttggctgatgaaaaatcaagcaggatgacatttctagtttcatgaacaacctaaaactaggagaaatagaaaagtcacagctggtaccacagagcacgcccaacttcacagctgtctcctcttaggacctttggctagggtgagagaagctttgaagacagtggcctctagtggacttggataagtggcagattttttttttttaatttttaatttttttgaatcatggtagctgcatcacaaaagctccaatccaagagggtggtaaaaagaaggcacagatcattgcaaataccagattttctctttctctttttgtaaatataccgtcatatataagctaaaatttctcttagggtggtggggtttgctggcagggaaagggacaggttgaacctacaattgcatatgtaatagaatcctaatggggggacaaagagcgaggcagctcttagcctgaagcaaaagaaaaggacactcgcttctgactacgtgtagtacaaacactagggaagtctgtgacaaaacacgattaaaaaatcataaaattataaagcttgtaaacgaataatctgaaattacattttattaatggaaaatatcatcaaaatagtaccactatggactaaactgcctgagttttcatttcgcattgagatctcagagtagaaaagcctttagcacaattttgctctgtgtaagtcacaacgagtgccagccccaggactaaaccctggggaagattctcctcttggatggaatttgtgttgtgctatcaagacttttgtgctaatctttcaaacagggacattttgaggcaaacctttaatcttttggcacaagattattttggctggggcagaaaatttgagtctcggactcaggatgaataatgtgacatttcattgatcaagtattcattttgattgtagagctttctttatgtcgttcacttccatctgcaaccgaagccggattttcttctcttcatccaactcagacaataactgtttaatctctcgtttctgctggtccttcatggtctcgatgatgctcctcagctcgcgggacctgtgtccttagctcctccacggccgccttggctgcttggcgcaggctccatctttggttttccttccgtgccgaacagagacggggagttggctctgtgtccagctgttcccaaagaggatgacaggggggagggcgccgctgaggacagaggggctggcccaccgccacctgctgccatggtccccggcttgggcggcagggatgctttgttgtcagacacttgggatatggtaacagtcttggaagttttctttgacgcgtccactcctctgtgcgcaagtgaaatgtgttcctccttatcctcttcgggacttggggagtcgaagatatcagggcttgaaagggatgaagatgtgagggactgggacggaggccgcctccctgtagcttttggtctgcttgtggtcggatgactgagtttctcagtagatgataccacggagtcaaaaccttctaagt

SEQ ID NO: 47565 - DNA, 1591 bp, Homo sapiens
  misc_feature (1)...(1591): n = a,t,c or g
ttttttttttttttccttttttgcaacacgtttattgagaggcagttgtgctccagccttccaggaggtcacagtcttaggggaagcagtgcaatggaggttggaagcaggggaaccctttactgaaggctgagcgctggctggcacactaggcctggcagcactggagggcaggcagggaaagtagggtgggtaacccagcctggcaaatgcatggcagctagaaaacctcttcaggttctggggtggctgggccatgagaggggaggccaggcagggctgtcaaggtaaccggggtcagatcatggagttgcctgccaggctccacaggagtcggggacagaagcagagcaacccagctaccagccgggccctgagctccctcagggtgaccagggaggagctgtgactggctggggaggcagggctggggcccgaggttccccaggacgacaggagggagccaaggcactctaagaggtggaagaagaggaccagaagctggtgagtgcatcactggagcccataggagggctcctgactgtcctcaaaagcctcagacctcagtgtccactttctccatccaagaaatggggctgtgatctctgcttatgacagcacaagcttgcacagaagtggaggcgggaaataagcacaagtgtgccttcccagcccggcctgggtccaggcagaacagctgatactggccccagtctgcccacccacccctgctggccaggaggctggcagaaccccagccccacctgcctggagcgcgtttgatttggactcgactgttgtggtgatggaggggggctggatctgtagctaaaaatacctcggagccaagccagctgctcagagcttcctcggaggctgggccgcgctgggcccactgaggaatgggcatgccacccaggaggtagcaccttacctgctagaggttgagggctgagntatccccttcagtcaccaggaattcttagtgggaggactgtcagagtcaaactaggcctgcccctgccgttgacagaaggaaagattgtccattcgggggggtgcccgaacgtcgccccttctccggcccagaacctttttgtaagttacaccctcacgttctgctccttccacttctgcaaactttccagggttgggtaggcaaaaaggccgcttcgctgaggactgtttactgctttggatatagcaatggtgtgatcgtcattaagagacaaaaggcgaaaatacagtcaaatcaaacaaaaggcacaagacgcaccagccgcccaaccaccatagaaaataccccccacttaacgttggtgtttgctggaaccagctaggacttgttttccagttttaatctagtttcctgtgacggctttagtctctctacacaaagaaaaggtcttcctttccctcacccaccagctccccccaacccccaacaccaaagacgagaaaaacagggctgtttttcttcaaatagatcgattttcaaagaaagtgtacaagctacgtggaagaaagctgactagcatttagtgctgtaaacattttcaaaagcataaagctagaaccttagctttataaa

SEQ ID NO: 47566 - DNA, 423 bp, Homo sapiens
gcggcacgaggctgcatttaatgtgccagaatataagaacatttgtcttagtccaagaactattttcagtttagttttgtcaccagaatcatgagaggtatcttttgaccaaattcagtttcatttattgtttaactgctaagcaatgaagactattaacaaacagattatcattaactctaaataataaaactaaatacagactaaacgcttacttaactaaattataaaagttccttctaacaattccatctctactaaaaatgcaaaagttagccaggcatggtggcagtcagctgagataacaccactgcactccagcctggacaacagagcgagactccgtctcaaaaaaaaaagtgagcgatcttggctcactgcaagctctgcctcctgggttcacaccattctcctgctgctccc

SEQ ID NO: 47567 - DNA, 618 bp, Homo sapiens; identical to SEQ ID NO: 3229
  misc_feature (1)...(618): n = a,t,c or g

SEQ ID NO: 47568 - DNA, 2383 bp, Homo sapiens
gtgaatggaacaggggaaaatggaagaaaatgttccaatatttccattggagatgaggttcaatttgaaattagcataacttcaaataagtgtccaaaaaaggattctgacagctttaaaattaggcctctgggctttacggaggaagtagaggttattcttcagtacatctgtgaatgtgaatgccaaagcgaaggcatccctgaaagtcccaagtgtcatgaaggaaatgggacatttgagtgtggcgcgtgcaggtgcaactgaagggcgtgttggtagacattgtgaatgcagcacagatgaagttaacagtgaagacatggatgcttactgcaggaaagaaaacagttcagaaatctgcagtaacaatggagagtgcgtctgcggacagtgtgtttgtaggaagagggataatacaaatgaaatttattctggcaaattctgcgagtgtgataatttcaactgtgatagatccaatggcttaatttgtggaggaaatggtgtttgcaagtgtcgtgtgtgtgagtgcaaccccaactacactggcagtgcatgtgactgttctttggatactagtacttgtgaagccagcaacggacagatctgcaatggccggggcatctgcgagtgtggtgtctgtaagtgtacagatccgaagtttcaagggcaaacgtgtgagatgtgtcagacctgccttggtgtctgtgctgagcataaagaatgtgttcagtgcagagccttcaataaaggagaaaagaaagacacatgcacacaggaatgttcctattttaacattaccaaggtagaaagtcgggacaaattaccccagccggtccaacctgatcctgtgtcccattgtaaggagaaggatgttgacgactgttggttctattttacgtattcagtgaatgggaacaacgaggtcatggttcatgttgtggagaatccagagtgtcccactggtccagacatcattccaattgtagctggtgtggttgctggaattgttcttattggccttgcattactgctgatatggaagcttttaatgataattcatgacagaagggagtttgctaaatttgaaaaggagaaaatgaatgccaaatgggacaccgggtgaaaatcctatttataagagtgccgtaacaactgtggtcaatccgaagtatgagggaaaatgagtactgcccgtgcaaatcccacaacactgaatgcaaagtagcaatttccatagtcacagttaggtagctttaggggcaatattgccatggttttactcatgtgcaggttttgaaaatgtacaatatgtataatttttaaaatgttttattattttgaaaataatgttgtaattcatgccaggggactgacaaaagactttgagacaggatggttattcttgtcagctaaggtcacattgtgcctttttgaccttttcttcctggactattgaaatcaagcttattggattaagtgatatttctatagcggtttgaaagggcaatagttaaagtaatgagcatgatgagagtttctgttaatcatgtattaaaactgatttttagctttacaaatatgtcagtttgcagttatgcagaatccaaagtaaatgtcctgctagctagttaaggattgttttaaatctgttattttgctatttgcctgttagacatgactgatgacatatctgaaagacaagtatgttgagagttgctggtgtaaaatacgtttgaaatagttgatctacaaaggccatgggaaaaattcagagagttaggaaggaaaaaccaatagctttaaaacctgtgtgccattttaagagttacttaatgtttggtaacttttatgccttcactttacaaattcaagccttagataaaagaaccgagcaattttctgctaaaaagtccttgatttagcactatttacatacaggccatactttaccaaagtatttgctgaatggggaccttttgagttgaatttattttattatttttattttgtttaatgtctggtgctttctgtcacctcttctaatcttttaatgtatttgtttgcaattttggggtaagactttttttatgagtactttttctttgaagttttagcggtcaatttgcctttttaatgaacatgtgaagttatactgtggctatgcaacagctctcacctacgcgagtcttactttgagttagtgccataacagaccactgtatgtttacttctcaccatttgagttgcccatcttgtttcacactagtcacattcttgttttaagtgcctttagttttaacagttcactttttacagtgctatttactgaagttatttattaaatatgcctaaaatacttaaatcggaaaaaaaaaaaaaa

SEQ ID NO: 47569 - DNA, 1694 bp, Homo sapiens
cttccttagtaacctgggcgatagctgtggatgtttccaaggattgtcttcagtcatggccttgggattaaagtgcttccgcatggtccaccctacctttcgcaattatcttgcagcctctatcagacccgtttcagaagttacactgaagacagtgcatgaaagacaacatggccataggcaatacatggcctattcagctgtaccagtccgccattttgctaccaagaaagccaaagccaaagggaaaggacagtcccaaaccagagtgaatattaatgctgccttggttgaggatataatcaacttggaagaggtgaatgaagaaatgaagtctgtgatagaagctctcaaggataatttcaataagactctcaatataaggacctcaccaggatcccttgacaagattgctgtggtaactgcctgacgggaagccttgctttaaaccagatttagccagatctccatgaagtcgccacagctgattttggtgaatatggccagcttcccagagtgtacagctgcagctatcaaggctataagagaaagtggaatgaatctgaacccagaagtgggaagggacgctaattcgggtaccccattccccaagtaaccagagagcacagagaaatgctggtgaaactggccaaacagaacaccaacaaggccaaagactctttacggaaggttccgcaccaactcaatgaacaagctgaagaaatccaaggatacagtctcagaggacaccattaggctaatagagaaacagatcagccaaatggccgatgacacagtggcagaactggacaggcatctggcagtgaagaccaaagaactccttggatgaaagtccactggggccagcaatactccagagcccagtttctgctggatcccatgggtggcacattgggacttctctccctcccccatctacacagaagactgtcaccatgctgacagaagcctgtccttgtaaggcccagccttccaggggaacactcagacatgttcattctcttcctgcttctgctctgggccggtgggtggctctcagaaaatacttgctgctggcaaaaggcctgtactcaggcatttgctttgacttgatgttgccaagggactgaggccattggcaggcttagtaccacctgctcctcatcttaggagtctccttttcaaataattaggctctgttcccattttaaaactctgatattggccttcacctgtgactggacactttactagaggcccattttcactaaacaataaaatctaaataaattggaaggaataacaaccacaaaggaaagaatagagttggtctggattgatgatcactgaggatctgtatgtgaggcacccataacagtagttttgcctgtgagtcgtcttcacacatgctgttttctctgcctggctctctcttcccctccttacctggccagtcctgtttatcatcaggccttgtcttggatatcacgtcctctgggaagtcttcttttcccctctaacctaggaccctcattaccggctctcatagcacagtctactgctttgtacgaattctaagtattcttggttgcacttaattagcctgtatatcctcagaactttgtgtaatgcctggagcatagtaggcagtcatatgttgtatcgtgaataaattgcacatagtagctacccag

SEQ ID NO: 47570 - DNA, 1002 bp, Homo sapiens
  misc_feature (1)...(1002): n = a,t,c or g
taagaaattatgtattaatacatatggctcatcgttgaatacagcattcctaacattatcccacattcccccactcccaccgcgcccggccatatctcagttttctaatctgtaaaatgagtaggttagaccagctaatcactctggtaccttccaacttgaaaaaagttttttccccattctttggtaaattttagatgtggcctgaacattctcctgggaagtcagaggtcaaattatctttccattttcttttattttagtaagaatttcgcaaatgacaagtgataacaaaggcagcaggatttttcatttctctgtaaataatgtataaaatatgtgaacagaactatatctttcatctaaggccagttcaatttattaaaaataaaactaatgccttttaaaattgatcagacctttgatacttgaactaaattttgcattagagactttttaaaaattgttcgcttttgctgaataaattgcaaatagagaagcttcattgacagtcagtccctctctgcttaatgcagttatgggtcctttcgtttatggcaaatgacttacctgacaagagttaattttgcctccattgtatcaagtttgaatattttccaagaaatctgatttatttggcagactctgagagagagaacagattaagtgccgttttaaaactctgtattttcatttataataataaaatatttgccaaaatacagctgttttgtaaaattatctgcaccctcatccaagctttatatttaatagccttaatcacattttatgaagaatgttaaaganaattttttttttactacatcgaaatgagataattaatttctntttttgttttttggaaatggagtctccctctgtcacccagggctgggagtgcagtagcaaggatcttgggctcgctacagcctctgcctccngggttncaagcaatttntcctgcctcagcctcccaagttaggangggtatttacagggtgc

SEQ ID NO: 47571 - DNA, 390 bp, Homo sapiens; identical to SEQ ID NO: 3233

SEQ ID NO: 47572 - DNA, 1699 bp, Homo sapiens
tttctgagaaaaatgtgaaaacttttactgttacattaagaacaggtggtagaagcaacctattccgcacttctcaaaagatacagaggggcacatatgccacactggaataaagaatacagaatcaaacatgtacaaaggtaccacagcaggttatggttcatacaggactttaaatgacccatgttgacaatacaatttgcaaaaaatatgagaaaagcaatacatatttctgaaacaaaaacatacctgttgtaaaaaacaacacgcgtagtatcagaatagaacagttaacagagcagcagttactgaagacagacggcaacaggcagctgcgccagccatgggtctgccatgcggctacacccatgaggccctattgtgaacaacgcaacgttctccatcagcggggaagcacacagactgcttggccaccaagctttccgcctggtctgttcatactgagatttagcagtaacagcccagaagggaatgcagctccccgctccctatgacatcaatgtcttcaacacatgtgtaagattctttctggagcccctagctcctccactcttcaaaactaacaacgcagagaaagagaaataagaaagcaaagacatcacattgccttagaaaagctgtcctcaactcatcttctctacatgttttcagatcacgtcctgacggaatggaaggagcagctccacctccccgaggcttccgtggactccgcacacacacgaccaccagtcttcagtcatgtgccatggagactttggtcccaaccagtgtctgccttttctagaaactggagaccctgattcaaatggcaagatgtgttagttcccatttgccttgcaataaccctatgcttcacaaagattccagactaggggttattcctcacccaatttcatgcatctggaacacagagtaccagaatactctcacattttatttcaaggcactctccagcagaaagtataataagaataaactactttgtaaaatgtgccatttttataaagacaacagtgagatccaaaatgagacaaagtagaattatactgaatgttcattatcccaaagtggcttaatttcatttgcttgctgcaaagacaaagactgtaaaaaggagcaaagaaagtgtgcaaagcacttcccttggaagacctcgtccactaacagatcacaagaaaagcaagtgcagcccctcacacgaaaggaaggcaggcagtaacatcggagacttcccagtctccccgacgtctgctcacgctggatgctggcactggcttatcatgaagggaaggagagcagtaacgctggagacttcccagtctccccgacatctgctcatgctggatgctggcactggcttatcagctacccactggctgaaatggaaatcaacaccagcacttcacgtgacagccacatagtgacagtccaggcacgtgaatgaccccatttgtgttcccctagtttgtggagagacttcctattgctgtgcttctcacaccctctagttttaagaatatgtcaaattgatgatatattatgcaagtaaacgatcttatatacacgaatagtgaaaggtaattaggaatatgctgaatcacctggtgctgttgaagaaaacgtgcagatgcatctctctcacctcaccgctttcttctagcttctgctatatttcatc

SEQ ID NO: 47573 - DNA, 1714 bp, Homo sapiens
  misc_feature (1)...(1714): n = a,t,c or g
ggtttttttgagagtaaaataactttatttttatttttgcaaatcatcctctgctcaaactactataaactggcagctgtaatttctagaaatatgggttgaaaaaactcccagagatggaaggacctgatgnnnnnnnnnnnnnnnnnnnnnnnnnnnnnnnnnnnnnnnnnnnnnnnnnnnngcatgagtcaaaattacttcatgaagtatgagatgtcaacattatgtaaataaaatttaatattgaaaaagtgatctggaagccctgtgaatttttaccctacacattttggaggacatcacatgggttaaagaaaacaccacaaaatctcatttgttcagataatcatttgaatgtttacatacatttttggttatttatttataactaatttaatttacatttcctcatattaacatatcctcttatttagtatgtaatcaaattatgtcagtgagaaaaatcctcatagtaccttgagttgctgattctgagaaaacactaaacatgaacatgtacaaaagaggcatttgaataaaacagcatgtgcatttttttaatatttgcacagtttgatctttgcatttctgtctggagaaaatatgaacaaaacccaggtttaccatgctaagataatggttcatatgactgccataaaagtagtacatacaaacaatgaaaacaaatcacatccttaggttccatgattaccgagatgatttcccctgccctaagtgctttattatatttcttaaaaaatataggagcagcagcttatccacaagtctcccacaagtgcatttaatgatggaatcaaaacaacacaacagattcataaggatgagagaactgcagaacaaccagaagtcagttttatgcttcttcttgttctggataattcagaattttgcggtgtgcctgtcgtaaatattgctgctgtttgaaagtaaactttaaatgctccttttatggcaacaaacgcaattccacccaagattgtcctttgtaaattagagttaacactactgaacatcaatttaccaactattgtagcaatagtaggaaagacaagggctccacacaagattcgagtagcagagacatgatctgctaaaggattggcctcagctggaattcgaggaacaggacaacctatccctggaaatatactatttaaaatttgtagtttattcgagtatttgcgccacagtctaagcacatagtcctcccagcgaatcatcttgcctaatatcagcatgacaggaatagtaggaagtcccaattaaaaggaataaaggatcagctctctccataacatccagaccttctttatgaccttacaacctgcatcactgtcactgctccataagtcacagctgtccaatagatagagccgaccattattcctgctgcagcaaatggacaggcttttgagatcagtctatctgcaagatccaagacgtaaaccactggacccaattttggaaaaactattaggtattcagcattgcactgaggacatgccactctggctgtactgtttcctctttgcttttcatccacccagcgttgtagacaggcctggtgaacccattttgtagatcctctgcacctgcatggtctcacccattcagctgttctatcatcttcatcagtagcaaaacaaacccagcaacttctgtccagcatctgctgtagggcttggtccgc

SEQ ID NO: 47574 - DNA, 333 bp, Homo sapiens
tgttgttgaggctgaggactgactggggttctgagactccctgtcccggaccgcagcgttaaaaggatctgaacaaagtctgctcaaatctcctgctgtgaaccagcagaatttttgaacaggtttcttcacatataaaaatctattgtaaaaatacggaaaagaatggcagcggaaacgcagacactgaactttgggcctgaatggctccgagctctgtccagtggtgggagtattacatcccctcctctttctccagcattgccgaagtataaattagcagattatcgttacggcagagaagaaatgttagcacttttccttaaagacaac

SEQ ID NO: 47575 - DNA, 1256 bp, Homo sapiens
gcgcgtgtgggtcctgagtggccagggcagggtcagcagcacaggaagctgcccagggggtccttgcaagcgtgggctctggccagcgtctgggggaggctgtgctaggcggggcctcccgtgggcatgtccctggagctcacaggctggcgccctatgcccatctccagatagcctgggctggaagctcttctacgtcacaggctgcctgtttgtggctgtgcagaacttggaggactgggaggaagccatcttcgacaagagcacagggaaggttgttttgaagacgttcagcctctacaagaagctgctgactcttttcagagctggccacgaccaggtggtggtcctgctccatgttgtccccgacacagcgtcctctccctggtggacatccccagcggtcaggtgcttccccaagggcagtgaggggtgaacatccagggcctacctggctgtgcacgctgcagccacactgtggaagctgcccctccccgaggacccgcctcccttgctgatgccaggatctcggcgcatagaccactctgccccagcggtcgtcacagaaaggtctctctgttcctcacactcagcttcagcataagctgtgaggccagaaaaaaggtcagctcttctagtatcgtgcagtgcttaaaaaccgggagctccagccgggcgcagtggttcatgccagtaatcccagcactttcggaggccgaggtgggaggattgcttgaggccaggagttcaagaccagcctgggcaacacagcaagatcctgtctttgtaaaaaaactaaccaaacaggaaaaactgggagattttctgcagaaattgagttccagcctctctcgaacctgggaagacctggcaggagggggctgggctctcggctacagacttctccccaccccgtaggagctgaacgccaaccatcctgacccgccagtgctcttggtctcctgagtgtacccaggtcctcccaggtgcggtgtgcaccgagcgcgcctggcctgatgccctggcctgtgagctggggactcctgggccctgtgagcccctaggcggcaggcccaggaatggctgggtaggacagggaacacctttgccccacgtctggctgtgacctcggtgaaagccgacaggagagagatgggaccctcctcctcagtagtggctgccagtccctcgttgcaggacagggtcatcataaccataaataacccttcacgtgtcacctgcaaaaaaaaaaaaaa

SEQ ID NO: 47576 - DNA, 519 bp, Homo sapiens
  misc_feature (1)...(519): n = a,t,c or g
gcccccagcgactcttcttggcctgatgtttgtcctcacaggcatgccacgtggcctgagatgattcagaacaaatcatgctaactttgaatccatccagccacttgcaaatgataatcagaagtcagcttgttcactgttagaaagaaactaacaaaagagaacccagagcaatctagaatctttgagtgcttggctttccaaggatactgcggagactctggccaaggttgatgaccttctgaagtgtcactggcaccatatgcaacaagaaccaccattcactgagtagctaatgggtttggggcctgggacattccatctgaggtccttcctgaacatgtcactccacagcagaggaccggttgcagcttacccagaaccactcctccaggagagctggatgttttgcgtgcaacaccttgagcactgactgctattgttcaaaaaaagcctttgctgcattcggaggactgccccgtgccctgaggngacttctaactatgtggggtcaataac

SEQ ID NO: 47577 - DNA, 1699 bp, Homo sapiens
  misc_feature (1)...(1699): n = a,t,c or g
tttttttttttttaaagaagctgtttgtcattctttttttttttagattacaacacacatacaataagtgaattttatcaaaatacagcacatttcttctactatatccataaaaatcaattcctatgtaaatagtactgaaaatcaactaaaatgagttaaaatttacaaagagttgttaaagggtttcaatcaaaattattaaaactatacagtacaataaccaattgataacatcttgaaagaagtgcaatatttgagttcacatatttttaaaagtgctgcctacttactctgactagcaagaatggaaagtgagtccaactcacttttgcaaaaataatgttggttggtgttttaagctagtcttataaaagtcttaattaaaatcaaggttgataaacaaagcataacagattaaaaattcccaaattgcatttcttagtaaataaaaatgaagtgcaataaccaaatattgctctaatgaaaggttccagactagcctcaactaaacagttattggtcttctatggcacttttttctggtccaaataaccatgcattaatccttaccattacatgttactcaaattttatttgattacatagaacaaaaacaaataaaattaatggtctggataaacaaaattaataaacctctatcatcaaatatttgttacagtaactaggaacaaagaaaggcagttggtggtaaaacactattacactgatacacatagaaaccctttaaagactctggaagtgttgagttcacatttaatgttacctgtagaaacagccctttatttgaacacctttacacactggcaggcctcaaggacccatccctttgctctataactctccacagcaattctctatcactgtgccagtttcacaaagcttgctttggtttcctagctccaagtgtactgtttccttttactttaccaaggcaatgcaaggccaaacaaaaatcaaagaggctttcctaaaccttcgtaacattttgtgttacaggcaacacaatcttaaaactggccatttttgtttcatttgctgcttaaaataaaaattataaattagatttaaatggagcactaattataaaacagattgcaagtaccaccatttgaaaaaaaaaaaaaaaaatcagtggatttccataacacagaaaatgcatggacatgcatctacagtagagttaaaaatttcctgtgactaaaaaattaaaaactgaatcaccagtagcaaatgtatagtcaatggctatgacaagaacagatcctgccgagctcataaatgcaattattgtcttttttgctttataaaaaagacattacatattttattgcattattctcctaataaaaacatactaccacgtagctctccccatccccattctttgcttccagatttttatagaaaataactgttttagtctggccttggaaagtgaacccaccagcaccaccttcacctactcactcttcaattcaatatgcacatagcaaaagccaacacttcaaatctcttgcccacatcaaaaaaagtagtttcaggagaaaaacattaataccagttgaataaaaataagggcataaaagctatgagagagatagctctgccatctgtctctgggctaaaatcaaggctaactattgccttgcacacagntcagtcatgtatatgaaat

SEQ ID NO: 47578 - DNA, 932 bp, Homo sapiens
tggcccggacgccagaaaatgttccacgtgggataccctgcgtggggttcactgtagtagctgcactaggtgattcttggagcgggcctgagagacaaggacatgtggatcccagtggtcgggcttcctcggcggctgaggctctccgccttggcgggcgctggtcgcttttgcattttagggtctgaagcggcgacgcgaaagcatttgccggcgaggaaccactgtgggctctctgactcctctccgcagctgtggcccgaaccggatttcaggaatccgccaaggaaggcgtctaaggccagcttagactttaagcgttacgtaaccgatcggagattggctgagaccctggcgcaaatctatttgggaaaaccaagtagacctccacacctactgctggagtgcaatccaggtcctgggaatcctgactcaggcattacttgaagctggtgccaaagtggttgcgctcgaaagtgacaaaacttttattccacatttggagtccttaggaaaaaatctggatggaaaactacgagtgattcactgtgacttctttaaactagatcctagaagtggtggagtaataaaaccacctgctatgtcttctcgagggctctttaagaatttgggaatagaagcagttccttggacagcagacatccctttaaaagtagttggaatgttcccaagtagaggtgagaaaagggcactttggaaactcgcatatgacttgtattcctgtacttctatatataaatttggacgaatagaagtaaatatgtttattggtgaaaaagaattccagaaactaatggcagatcctggaaatccagacttgtatcatgtattaagtgttatctggcaattagcttgtgagattaaggttctgcacatggagccttggtcatcatttgatatatacacccgga

SEQ ID NO: 47579 - DNA, 1653 bp, Homo sapiens
ctttgcaatcataaaataactttattggtcaggttagccaccactcatgcttttcctgtaataaggatcctttataaaggcatgatggtgttcacatgcagatgctttctgaagagccctggggcagggggcagccttgcccctcacatcggagctcctttgttgaaatgagctggtttggcttttgtggattccaggtctggagccaagaacgtagtccaaagatcccctcttcccttctcagggaaggtgcttcaaagcatacacagtatcagggatgtgatggcatctgggcagagcctatacttgggctaactctcctccaacagtccttgcccctggactgcccagatggctttgtcccaaccttgcccaaagggcaggtgggttaagccccaggcaacattaccttttgaaatgggaagaattaagtgctccccagccaaactataaagcaaaagccaccttcactaatgaggatatagctcagagatgtgaaagcagagggttgtatgcccagcacaggcaagatttggctgccctggccctgggcttcacggaacccccagcccagagctgggtactttttaaactatggcccttaggacaaacccaggtgaaacagattaaccacatcctccttctttgggctagcaagtcccagggctgccctggagtctgtctctaccatcaggatatagaatcttcctgcttggataaaaggagaggacaaactgtgtttctcatactttaaaaaccatgtggccgctacctttgtggataaaaaccccaggtaggatgctgtttggaatgcagaaagtgctgggcaagaatggaactactggggctgctttctcaactcagccaatttgaggtgtgtttggcccattgcagatgctgatggtaagcaaagtctggcctttcctcttctgaagtcttatccaccttcaaagagctacccagctgccaaaatatagccctatacattgatctaagcctgaggttggctgtctcctcccacatcaggtcatgaatattatcatcatgctggtgacctccaatctggtggctttccaggggtgaggttagggaggtatagaagtgactcctggtgtcctttcaccctcagaccacagtgtgggttgtctccacaggttgcctgggcagatgcctcacatgccttggggtctcctgactctgcttaaggcacagaagaggcatctgtggaggaaagtggagtgggtgaagtggatttcagaagaggcagctgggcaagaggtatattttgagaagcaacaaatgggagcccagagtaactgcacgaccagcccagcacagagggagagctgtcaagtgctgctcacagacagccagggattgttagaaaagtatggttatatactattgcccatgccacttttgaagttccatgacctcagatcattgggaagaacttaagagccgtgagatttatggggttggaacatccagggatccttccatctaccaccacttctgtccctggaaaagagtgagcttctgcctatgtcctcagcagaaggctgcctgtccctgatcgccccccctaaccccacctacaggaaagaagactacagagggtgcccgtggacttctgtcacatggtccatcctg

SEQ ID NO: 47580 - DNA, 756 bp, Homo sapiens
tgaaaataccaaatcagttatttgaatatgcctaggattctaaaaccacagaaaataggcacattaatttccttagcctattactccctatggccagttggtacctcccaggtatcttcttattcttgcctgaccagcttaaccagttccatcatctgttcacatttgttcctcttcttagagcaacagagttaggtatacaagtaattaaataaagactaagcactaatgccctaatcccagctaattttaacaaggacactcaggaggataaagaatcaagaagagaaatattttttaaaaaagaatagaagtattatataacttttgttcttctaaacatcaaaatccagtcagaatggttatagaaaacattcaggaacagtgtctaagcaggaatagtagcaatttagtgagctgactaccagtgttctttctcataataattcccttaaacaactttgcattaagggagatgctgcaaaagcaaaatgatctttttacttagagtaggtaagtcctattggaatttaagagaagaggatgagaaatggacagggaggaccacatagggcataggaaagacagtagagaaggaaattcattccaaatagaggtaagaagatagcagtaatgtgacacatgattttataaaccattccttaatttaagatcttggcagtcttgagaattccattgaagggaatattggcttctaaaacctacgtcacagccaaaaagccctgccatgttaaa

SEQ ID NO: 47581 - DNA, 1530 bp, Homo sapiens
gggcaaaactttttttttttttttttttaatgtaatcaatcattttattattttcatcaacaaccaacacagcaacacaaattgacagccagtcctcaagggaaccttttttgaagtgaagagcaaggccctgaatgagctacctacatggaacatagtatttgcaatatgcaaatggagacctaaaggctcatgacgggaacagaaggtggctgtatacagaggaacagacacgaagtggagttatgggaagttcaatcaacaattggcaacaagctaggtcagtagtttacgaaagtggtcatctatacagtgccctgagtttgggttctgggccctggatcatgtaagaaaggcagcaaagtctggggtgccatgaatcacacctgcaatccccagcactttgggaaatctgtggtgagaggatctcttaaagctatggcccttgaaaccagcctgggtaacaaaaccaagcccttgtatctaaaaaacaaaagggcaggtagattccagataaataatgttgcaggaagggggtgataaaatacagaaatgtgatacacagcaaaccctcaactgctgtttcattggctcccagtgtcttaatctgtgtctgctaacactttaaggtacatctgaaataccccccaaacccagaaagcttttcaacagctaggttgtccaagaacttggaaaattcaccttctgatgtcctccaagacagattccattttttatacaccttatttgctcagacctgtaacttcagcctggagtgaacacagacacctagttttcctcaaactcctcttgggctttagagagaaggtgctggccctttgagccaagcaggttattggttagtagtacctctcagctctgaaggcttttcaatggtatattagcaaccaagctggctcctgtaaggatagagggcagactgtcatccaggaatacctgtattcaccctgggaggcagctgaattccccaggatagattatgagatgctggaacattactgtaacgctggctttgcataaagatgggtcttgtcccattccttcaccagtaagctcttgtgggctgaacattgcaacaacagagctctcttcggttccaacgtgcgcgtaaatcctgcagacaggagcccaataagacattaggtcaactcagggcatttcgaaaacgctattttctgaacagacgggctaagcaagaggcttgcagggcccatctcctcagagttacttatcctcacggagctcagtacaggtctgtgaaaaggtcctcatcataggaagggggacctacacggcccgccatcgccattttgtccttcacaaagccccactgctacttttaagcctcgaggccacgcacaagaccttatccgccagtcgccctggccaggcagctacaacacagaaggcatagtgcgtgctatgctatgttcgcacaatcgctcaaaagaaaataaaagaaaaagacaaagtataaaagagtaacagctataaagaccacgaagccac

SEQ ID NO: 47582 - DNA, 1156 bp, Homo sapiens
aattatattttttattattttttcaaaataaaaggggtttatgtaacaaaaaacaaaaaaacaaacaaacaaaaaaacacagtaaaagataccacccagctagcagaaaggactcagcactgccttcagccttcacttactcagaaataactcatatctcaacctcagcaagccccaagcagtagaatgaggcttccctggaaagaggctgagactcacaggctggggatttaagaccctctcaccgtccaccttccttccttctttggtcttggaagatgaaaggctccatttttaaagggtggagaacagcagatcccctgctactgtgagacaagccagaaaagtgagtcaaggccagactcactatggggtcacccccaaacagcttcagatcaaaaagcctgccttgctgtgatgcccattgacagtggctgcaaatataaagggggggggccacagggtctctggcttttattttccacagggtagggagaagaccctgcagaaggctaggcagaggggcccagccgggaattttccccagcttttctggttctcagcagaccaacgtggtctctaatcagaaagacgaagaggcaggagagcactggcctcagatatcccccatcttgtcctcttgcactgtgggccagggctgctgtgagctaggagaccagggttccagaggggctcactaggtcctgcgggaggctttcccgggcctcctgcatgcggcgccgggctcgacggaaggcctctagcacattgtgaatggaactctgctggctgaacccttccagacggtccaacacactccgcatccttttctgaagggagctcgattccatgaaggccctgcagggaggccagccacatggttacggctgtctccacccctcagggttaaggtgccctgaggcagagggccaagtcactcacctggactgctgcagacagtgcaagcggaaggtgacagtgcctgtggtctctgtgcggagtccaaagcggctcaggcgttccccctgtggcatgccattgggacagcctcaggtttctgctctctctagacacccccgcaccatgctggcctcacccccattcttattcccattcttgggaagcgcagttctgttggggaaaccttattccatcc

SEQ ID NO: 47583 - DNA, 1911 bp, Homo sapiens
gatacagaacacacaaatccagggggattaaagctggaaggggctaagagattagtttacagagaaaaggcttggtggtgggatttttttaaatgtgtgttatgtacatatatatatatatataatatatattaaaaatgaaacaattaatctagattttaacattttcagaaacttagtgataacattatgaacaattctaaaagccctgtgatttgaaaaatatagaatcattaatggcccaagataggccttcacacccttcacaggtgcgaaaggaaaggccttcacaccctcacagaggcatcatgcaaaggacagcggctttggcttttccaattttccatctttaggccctggtgagaggcacacttatgcactaaaatgcacatatatgcacatgcattcaaaaataggcatttggtacaatggtgatcttgtacctgatgggctgaaaccagcttaagaacaaatttgttcttcctgatatgataactaggtctccaagagaaaatagaaaggctgctttagtgccttacgcttactaaatttaaatctttatttacctgggtttgagcctacagtctatttatgattacatatcaaaattgattaaaacacttccatttctaaaagttcaaatatacttgttaataaaaggattatcggcattaatactttaatttaaagaaaagttgtgttctgttttcctttctgtgtcttactccccccacactctccctcccccatcaccatcttcaattctaataaataatgctgatgttcaacagttgcagaaattgtgctattatgtaactgtgggccttgcccctgtctggccctctagatgatttgtagcagtgttattctacactttttaaaagaagcgtcctccttttgtccatgaatcatgtttaccccatacccagtggcagaggtgttctttaaagacttgaatatatgaatgtgtgtgtgtagttacttaaaggttattcctctttgtaataggaaactatatgggatgaacacttttaaactttccgacacaacttccattactaactttctaacagaacttccataactagaaggtggaaaccaaaaccctcatggtagtatttcctctggcagctggtgctgtgggcaactgttttgttcaatcgggtttcttttctttttgcctctaatgcagaaatcaacagaatcactcacacatacaagtacactcacatacataaactaattatttctctggatatctttctgtgttccatgtaaatttatttaccaacatctattgtcaacatgtacatctaccttagtatggtctgcattctttttctgagagtacctcatagggctcctgcctgatctttgtagtttgttcattcatccatccacctgttcatttgttcatccatgtattctaacatttctatgtagtgtgcaactctaatgtcatgcttttgaagaagagaatagctgcccatagcagccatccgtctggataatagcaaaacactctagataagttattttgcactttcttatgtataaagttggtagaaacttatttttgctttgtatcatttaaatacattttgttttggtaaatgaactgtgtataaaatatttatgccgttaaaactgtttttagaaagtatttttaatttcagcaagtttggttacttgttgcatgactcttaacacagctgactttttgtgtcagtgcaatgtatattttttgtcctgttattaacttgtaagccctagtaatggccaattatttgtacagcaacagaagtaaattgaagatactggctaagactggattgattgtggacttttatactatattgcagaaaccaatatctgtttcttggtggttatgtaaaagacctgaagaattac

SEQ ID NO: 47584 - DNA, 455 bp, Homo sapiens
  misc_feature (1)...(455): n = a,t,c or g
anancctttggaaancgntatgacatgattacgaatttaatacgactcactatagggaatttggccctcgaggccaagaattcggcacgaggcggtggcactcgtgggagggagaggacccccgcccacatcctccttccccaggacctgagctcccagcatctgcagacgacccccgcagcctttccctcggacccccctcgaagccccctggactgattcccacccacgactcacaggcattcctcccacagccctttcatttcctccccaccccactccccaaatacagaggtctgctttgaaacggagaccatttccaggccttattgagaccagaccccaagtcccccacccccatcctgctccagcgtttcctctaacagggaccagctctccgctttgcccccacggggttcctctaaccagaaccagcttcctagcctcgtagagac

SEQ ID NO: 47585 - DNA, 2369 bp, Homo sapiens
ctgaggaccgcacggaaacggggaagtcaggtggccgctgccgccgccgccgccgcggtttgtcgccagaaggaagatggcggatctggaggagcagttgtctgatgaagagaaggtgcgtatagcagcaaaattcatcattcatgcccctcctggagaatttaatgaggttttcaatgatgttcggttactgcttaataatgacaatcttctcagggaaggagcagcccatgcatttgcacagtataacttggaccagtttactccagtaaaaattgaaggtttatgaagatcaggtattgataacagaacatggccgacttggggaaatgggaaagtttttgggatccaaagaaccagaatctgttttaaattttgatcactttaaggaaggagggcaactgatcccaaggacccctgttgaagtaggaaaatgcagttgaatcatggagaacttcagtagaaactgctctgagagcttacgtaaaagaacattacccgaatggagtctgcactgtgtatgggcaaaaaaatagatggacagcaaaccattattgcatgcatagaaagccatcagttccaagcaaaaaatttttggaatggtcgttggaggtcagaatggaagtttacaatcactccttcaaccactcaagtggttggcatcttgaaaattcaggttcattattatgaagatggtaatgttcagctagtgagtcataaagatatacaagattccctaacagtgtctaatgaagtgcaaacagcaaaagaatttataaagattgtagaagctgcagaaaatgaataccagactgccatcagtgagaattatcagacaatgtcggacactactttcaaagccttacgtcgacagttgccagttacacgcactaagattgattggaacaagatccttagctacaagattggcaaagagatgcagaatgcataagatgaacattgcatgaccggatcattttagtgtctttgcgttaaaaaatcattgcaaaagtattctgaactgtcaagctgcccagtcagatgggctgttgccatttaaaatcactgtaattaattagtttgattagagcacaaagcttagctaatcaaccattatttttcattttgtttgttctaagaggattgaaaatcagtttagtttaaatgtctttctgttaggcctttctttcttacaatgaagagatgattcttctagtttatggttaaaagtttttgaagtgtctcaaaaatattttactaactgtaaccctaaaattgatgtcttttggtttatgaaatcagtaatttttgatatttccccagttctttttaatggggtcaataatggacattctagtttaaggtggttgatggatttagccatatatgctgctaaagaaattgtctaccttttcttcctcacctgttccatttatgtaaagttgagattagagggaaagcattttctatatcaattgtgtttaaacctttcaagaaggttatttagctagcttagtgttgaactaaattttttttaaacaaggcaaggtctaatgctgttttgagattctgaaattaatgaaaatacttatttcagaaatgcatttaatgctttttttcttgtgacagttacgcaaatcagcttgaattccatatgtccctgagttatttttatcataaagccacaaatgtattataacaaggcaaattgtaatatatataatcctgaactcatgaccatgtctcagtttatttttttttttcttggattgaaaagtactgaaattcaatgtgacattaaaatgcaaattttcctatttatttgagtagaaaatcacttaccagtgagcatatatattttaaaatactttctttggatattgtaattcttaactggttgtaaattagaaaagctgggattacatatggtgtgcggttacagtctaaattttttcatcctcctatgcatcataagcatgtttgtaatattttcaaaaatagttctactgatgctacaggaatttcaagcctgtggtgaatgttagtatttaccatagggagtgaagtggagttatggtttcattcaatagagtattgctgattatacttgagtggaatcctttcctcacgtactcccacagacgtctgggcctggaaattttttttttattttattttattgtttttttttttagaaaaacaccacttttattatgtacaataaaatatttcattagcttgaattgtatagatttttaaaaattcaatgaaagcatgttgtttaatttctttttaaaaatcactgttgggctttgaaagcattgagaatataatatgaaattatgaaaaaaaaaaaaaaaaaactcgag

SEQ ID NO: 47586 - DNA, 1415 bp, Homo sapiens
  misc_feature (1)...(1415): n = a,t,c or g
cgatgtcttattgtgatgagtctcgactgtcaaatcttcttcggaggatcacccgggaagacgacagagactgaagattggtcactgtaaagcagttgaaagaatttattcagcaaccagaaaataagctggtactagttaaacaattggataatatcttggctgctgcacatgatgtgcttaatgaaagtagcaaattgcttcaggagttgagacaggagggagcttgctgtcttggccttctttgtgcttctctgagctatgaggctgagaagatcttcaagtggatttttagcaaatttagctcatctgcaaaagatgaagttaaactcctctacttatgtgccacctacaaagcactagagactgtaggagaaaagaaagccttttcatctgtaatgcagcttgtaatgaccagcctgcagtcaattcttgaaaatgtggatacaccagaattgctttgcaaatgtgttaagtgcattcttttggtggctcgatgttaccctcatattttcagcgctaattttagggatacagttgatatattagttggatggcatagagatcatactcagaaaccttcgctcacgcagcaggtatctgggtggttgcagagtttggagccattttgggtagctgatcttgcatttcctacgactcttcttggtcagtttctagaagacatggaagcatatgctgaggacctcagccatgtggcctctggggaatcagtggatgaagacgtccctcctccatcagtgtcatcaccaaagctggctgcgcttctccgggtatttagtactgtgctgaggagcattgggggaacgctttcagcccaattcgggtcctccaattactgaggcatacgtaacagttgttctgtacagagtaatgagatgtgtgacggctgcaaaccaggtgtttttttctgaggctgtgttgacagctgctaatgagcgtgttggtgttttgctcggcagcttggatcctagcatgactatacattgtgacatggtcattacatatggattagaccaactggagaattgccagacttgtggtaccaattatatcatctcagtcttgaatttactcacgctggtatgtgaattattcttttcctttttaatgtgttggtttattcaggcccttaaatggatatgtaagaaattaagggctttgtnnnnnnnnnnnnnnnnnnnnnnnnnnnnnnnnnnnnnnnnnnnnnnnnnnnnnnnnnnnnnnnnnnnnnnnnnnnnnnnnnnnnnnnnnnnnnnnnnnnnnnnnnnnnnnnnnnnnnnnnnngtcagaaattagcttggtgtagtggtgtcgcactgcgnnnnnnnnnnnnnnnnnnnnnnnnnnnnnnnnnnnnnnnnnnnnnnnnnacttgaggttgaggtgagctctga

SEQ ID NO: 47587 - DNA, 1358 bp, Homo sapiens
tttttttttttttttgttgttgcagctctcaaatcttgcagccctttacttcctttattaataacagtgttctgcattaattcgtgccacagtgtaatcaactatcaatgtgaccattagctccgccacaagtaaagatcgacaggatccaggctgcactgtgtgaccaacagcccaggcaggtgaagagtcgtgacatcgcaaaaaggaccacggtttattaccatctctaacgcccatgttccagcaaaccgaagaaaaacactgtttcttaaaactgcagaggaatacaaaattaaatactacaaaacaaaaatcagacaggaagacgaaacaatctacctcctcctaatggtaaaataatctgaaaggagtttaaaaataaatgaactaaaatttttataactattatcttttctgccaattttgaagatgtcttcaggtgccacaacgtggggacagaaagaataaatatcaatgtataacttctagagtgataataaacaacaggaccccatctcagatggatggattttttttcctactggagccaaaaaacaagctgaactctatgtacaacagacagactatacaactaggagcatttaaaaataataagactcctctctctgccttcttccaaagaatagaatatatatttaacagcacaaaagacgacaccacttgagcttcccctttagccaacaggaagaatttccacatataaaaattaaaaatttaaactttcaaatcattcatgttttaaacataatacagacttaaaaattcttcaacattgacccataatcccaccccagcacaaaaatcaaccccaaatccagacgtcacagttttttgttcctaaaaatcccacagcactgaacttgatcttcacatcaagctgacagcacgtaagaggcccatgccatgagcaatccccgagggaagaacggaagcacagtcaatgctgcagctcttatctacctgggcggcactggtgcacctctgaggtcaggtccgtgagattcgccccacactagggtcccggaagggtgagctggccgcttccctcctcttccccctcgaaggatgtccaataagcacctgggaattgacttttcttgggaaaagggtgctggtaacagctgtcagggccaaggcaatagtgagaagttcagttctctgctctttggatgaactgtgtaaaacatttcttttaaaagacacaatgttaaaaatattaagaaaaatgtctacaaaatctggagggcttcctttttctcaaagggtaaagcctgtggggtggtgggaaaggaatcgagggcccagaactacaactctgcagcgaaagatagaga

SEQ ID NO: 47588 - DNA, 388 bp, Homo sapiens
gccttgtctcagctgctgaagctggagccatgaccctctgcattacaaacccattatgggtaacaaaaactcgccttatgttacagtatgatgctgttgttaactccccacaccgacaatataaaggaatgtttgatacacttgtgaaaatatataagtatgaaggtgtgcgtggattatataagggatttgttcctgggctgtttggaacatcgcatggtgcccttcagtttatggcatatgaattgctgaagttgaagtacaaccagcatatcaatagattaccagaagcccagttgagcacagtagaatatatatctgttgcagcactatccaaaatatttgctgtcgcagcaacatacccatatcaagtcgtaagagctcgtct

SEQ ID NO: 47589 - DNA, 1436 bp, Homo sapiens
  misc_feature (1)...(1436): n = a,t,c or g
gagagatagctcctcagcgaattccttccctgggagttcaaggtgtcatgcacctgactctttactgctcggccttacgcttcctgaatgaaggagtaatgaatgcagtggctgcgtctttgcctcctagagtggcacactgtcgaagtaaagatgttgccaagattctgtggtcatttggaactctgaattataagccacccaatgcagaagaattttactccagcctgataagtgagattcacagaaagatgcctgaattcaaccagtacccagaacacctgcccacctgcctgctgggcctggcatttttggagtactttccagtagagttaattgatttcgctctcagtccagggtttgtcaggttagctcaggagagaactaagtttgacctccttaaggaactatataccctcgatggtacagttggcattgagtgtccagattacagaggcaatcgtcttagtactcaccttcagcaagaggggtctgaattgctgtggtatttagcagagaaggatatgaattcaaagcctgaattcttagaaactgtctttttactggagaccatgctgggggggccccagtacgtcaagcaccatatgattttgcctcatacccgatcttctgacttagaggtccagcttgatgttaacctgaagccattaccatttaatagagaagccacgccggctgaaaatgtagccaaattaaggcttgagcatgtgggagtcagccttacagatgatttgatgaataagttactaaaagggaaagcaagaggacatttccaggggcaaaactgagtcagagcctggggcagcagccattgggagttgggagaattaaggcagctgttacctcttgggggcttcctttgcaatgtagcagataaatcagggggccatggagatggctggcctgtgccccgcagcctgcatgcagaccccaagaatgaagctggctgttcagttcacaaacaggaaccagtattgctatggctccagggatctccttggactgcacaatatgaagaggcggcagctggctcggcttggctaccgtgtggtagagttatcctactgggaatggctcccactactgaaacgaactcgcttagaaaagttggcgtttcttcatgagaaagtattcacctctgctctctgaagggcatttaggggcatttctatggcaaagcctataggtgtatactgtaccaggtgttgcaaaatgattataaaagccagaatgtaagtttggcgataaaatagtgtgttgaggagacttaattgtatccaaggcaggttagagctagtgtatgttactgtgaattgtaatgtagttggattgtacaaattactgcctanatatacatgttactcttagtaaataataaacatcttaatatgtctacggtcaaaaaaaaaaaaaaa

SEQ ID NO: 47590 - DNA, 729 bp, Homo sapiens
ggcaggctgaaagttggagcaagcaggaagtgaactgagggccaccctgggaggaagccgactaggcgaattcacttactgaccggcctgggctgctctgagacatggaggaagccagtgaaggtggaggaaatgatcgtgtgcggaacctgcaaagtgaggtggagggagttaagaatattatgacccagaatgtggagcggatcctggcccggggggaaaacttggaacatctccgcaacaagacagaggatctggaagccacatctgagcacttcaagacgacatcgcagaaggtggctcgaaaattctggtggaagaacgtgaagatgattgtcccttatctgcgtgattgtttttatcatcatcctcttcattgtgctctttgccactggtgccttctcttaagtaacagggaacctctcccacctgcccttcttttcagggacaaccctccataaatgtgtgccaagagggtctcctttcctgtcttcctctacagagaatgctgctcggtcctcctacccctcttcccgaggccctgctgccacgttgtatgccccagaaggtaccttggtcccccggaaggagagaaaaaagagagatggactgtggctgcatttcttgggtccttagagtgggctggagagacctagagggcccagcatgtggctgggaaactgttggtggccagtgggtaataaagacctttcagtatccctaaaaaaa

SEQ ID NO: 47591 - DNA, 921 bp, Homo sapiens
ttttttttatcagtgaaaaatacttatttcatgtgtttaaaaatacattcttagggtgggccctgcaggaggagacaggccgtccacatctccttcccaatagtgtgtccaggtcgtttccaaaatctgtgggtccctcacagcttctgatgacagctgctaatgccatttgctgaggaacaaggatggggaggatggcgagggcctggcccccagggcggccacaccagaaggtcggagaaaggcccaaggcggatgcaccgcccagcagtggtgactgccccccactccttttctgagtctatcagcattgtttggttttcttcttgttgcttttaaatcctcgagcggcaccctgaccaaagcagatggtagagggtattctatgtctgtagatccgcctctcacctgccggtgcaggggaggctgccacaggctcagagcagatttccatggcctccccttctgaccgctctccactgtcccctggggcttctgctgaggctgggcttctgcttttctttggcttatcaaaccggaagtccgcggggtacaggtgcatcctcaccatgtgatccttccggtctctgctggtcttgaacttcctctgtgcagccttctaccaagcactgatacatgtcctgcctctcagacaggatctggaagagcgaatcgtgccactccaggatgtgggcgtccagcaggtgtccggaagggaaggcccgcttgcaaaaggagcaaaaatttccgtgcagcgtgtggtagtggtgctcgtagtcgtccagggcatcgaacacctggcagcagccggccacctggcaggcaaaagcgggcaccctgggcttctcaggcacgtcggccacctgcatgatcacgtcctggaggtagaggtggcgctgcacgtccccatcctcgaagaac

SEQ ID NO: 47592 - DNA, 308 bp, Homo sapiens
  misc_feature (1)...(308): n = a,t,c or g
agaataaccacccattccacagactaataaagaatttatctctttgcaactaacatagtttgaaatgggagatacgggctcttggagagagttttttctggggttctgaaaaggtcagatcctatcaaaacacaatccactcactcaaacatttcagcgtactcacattctgagtactactgtttagtatgaaaagaattccagtgttacatgaagtaaaaatggattatctcaatcctcatggaatataacgggacttgaccagcatttcctttttttttttccttcagnanctcnnttatanggaa

SEQ ID NO: 47593 - DNA, 1000 bp, Homo sapiens
taaaagatgacttcaacttttattgaatgaggtctttattttttaacattacaaactaacactccctttctgaaaaggcagatcttacactcaaagacaatcttcaagcatttttttgttgttgtttaagaaattgagaggggaaatccacagtttattaacaagaagattcaaaacttcattttacagtaataatgggacaacacctaatacatttcacaatcaaaagtggttcaagctaagaatatctagaacagattttaaaatctgggaaaagatgacataaactggacaattatcagtattgctcatcacaattttggctctaacagtacaggacaaatgcttgttttgcactgtgcctaagacggccccttcattaaggttcaccaggacacaggcagcatccccgcctcccagtcatttgtacaaatcattaaggcaaatctacaaaggaccagtaaggcactggggcacagcagctgactgcaggaagtctatgtaacttccggtagtaaaacagcctttaatgcagacataggtgtgaaaaattcagcgttttgtttttttttcagtgtcaacctgcacctaaagcacaaaaggtcacttgcaagtcacttcaatgtaataaacaattcccattcatcaacattaccagtgaaaaggggaaataattcactgggctagaaggaattagaagcaggaataaagaaaatgccctttgggtttacacttactaaagagaatgtctttaactctccaaggaatacccattcccgctttgtgaaattatacccaattaattaggactcctctatattcccattaatgtcggatcattacataacttcaatagaataaacacttttttcccactttgctataataatagctagggatacctcaacaatataataatggtttaaattatgaccatttctctttggccttgtggtatttaagcttagagaaaaatcatgttaaaaaaacaaaaagatgc

SEQ ID NO: 47594 - DNA, 749 bp, Homo sapiens
gtgctgagtggatgctttggaaacctaacctcaggcaaaaggtccttggttcaggcttggtgactgatgttgcattgtctgctgttaatagcctagagattgaagacccaagtaggccatatttttgcctgtcaacagcgaatctccaatcttttaacttctttagtttcaatatttgattttgcttgggttcacctctacagttgctttgccttgtccctggtcaccttactatatttgactgaattaagctttctgtttcaatgtaagtacttagtattttgcatttaaaaggctgttctttaataactttggaggaagttgactgattttaatgaaattctgtccattataaaaggcattcacatacacctcaggtttaatttaaatgcagtctgtccccttgaaatgaaatggcaatgggcaaaagtctccaaaaagaccatttttttcaataatacataaggatttccgtggaaattggtgcatttttacaaggtatggagatattgtcccacctgtgtgaacctgcctaaaagagtatctctgtgtaacagtgatggtgagttagaaatggagctctcttgtctcaatgcctgacttcagtctgatctttgcactactccttgactgctgacctcactccccgccctgccatgtacatcctctgtgtaccctgggaacttgtatgtagttaattgtatctggacctgcacccccagcttctttcttggcttcatttaatctct

SEQ ID NO: 47595 - DNA, 1256 bp, Homo sapiens
tcaatgaacaattcgacttaatttagacaatgtttatttcatatgtttactgctacattccatcaagaaatttcttgttttgatgttatgacaatttagcaagtaaaaaacacatttctttgaaaaaaatacttctaagctcaggctcttaacatataaatataatgcacaaaataaatatactgcaaaaaaccacccacctacaaattgctgtatgcatcatttctgaaacatgaaatacttataaaagcgtaactctacattgcttttattttcagctctaagtaacagaaaaacttactttgtaaagtgctagatcttaggctcaagggcatgtggtgtctgctacaactactcaactctgctggggtagtgcaaagacagccacaggtcaaacataaataggtgttttttgtttgtattcatgttttcaaaactttatttatggacactgaaatttgaatatcatataattttcatgtgtcacaatattctttgattctttcaaccatttagaaatataaaaccattcttagcttgcaggatacaaaaatgggtagtgggccagatctgtctgatggactgtcatttgtcaaaccctgacttagtgtagtcaggatctgcccctaaatcacttgtaggaaaacaaacaaacaacaaacaaccaaatcaaggcactggcagcaagaaggtggggaatgaatgttgggtagccaacattttttttttttttgcagcgtaattcacaaaatacaaataatgatgataacctctaacatatagctcttgtgtctcagacactattctaagtgctttgaaaatgttaactcatttagacctcaaagcaatcctaagatgttgtcactatcactactcttttatgggatgggaactgaggcacagagatattaagtagcatgccccatgctggaatcggggcccaggcagcaggagcccagagtccacacccttaactatgccatgttgcttctatgaggaagaaaaagttggtgaagaacatttaggactctcacactaaatacaaatgcagatagctctgctccctgatcacacatcaacagtaagatacataatatttcttacattgcactatttgttttcattgtggagattgtaataaatactactgtttttagctgtttaaaaacagctcaggcttttgctatatataaatgtgtccctaatgcaaaacttgactgacatttgaaaattttacaaaaacattttaacttatt

SEQ ID NO: 47596 - DNA, 2389 bp, Homo sapiens
ttttcaatttaagcttctttaatgttgatgaaaggtatttgtagttcatataaactatacttatgtgaaggatagcagatgcttcatataaattatcattttgatatacatatcttatggtttatgagaaaagagaaaaaataatacatcggttttgctacactttaatgggttttttttttaagggattttttttcaggtcttgtcagcaacatcaaacaaaaggtactgagtactccacagggtacagagtgctgccaagcaccttagaaaaattacatgacacggagaaaatgcgcctcttgctccttgaagagcttacagtctagggatttgacaactcacagtcttaggaactgggcaaagtaagggcaaattcttcatcccctagagctattgtggactgaatcattttagaatttggaattaatcccaatcaagatgagagacaagactaaatttggctgagaattcattcagggctcgcatagtttttattaacatccgtctagtaaaccagaatggacctaacagacaactgaaagtaaagactagatctcttgaagtgcaagggctacaacaacttaattgtggttacttattttaaaaagcaaacatactgaatggtatgactagggtgattacactagtttaaaaataggccaggtactgacactgcattcccctcatgcattgctcatttaaaatagtgaatattaaaatatgtgggctttacatctaacccacagaaagcccaccgcaaatgttctgtgtatcaaatatccacctcatgtgtactatgaaagttttatttatgccccattaagtcaaaagtaaattatagtaagctaatgacctgcatattttcatatggatgaatgtcagtatatctaaataggaaataaatggcgatcctatctacctatataaacaaaatagaatatctttccagattttgcatactcctcactgtaagaagaggtatgcaggttttaaggtttcacaatcagttgtcagaaaaacagcagttatgcctgcagtatctcgttagcatctgactcaattatttttagattacattgtttagaagacattgtaaacccatctaaaactttgtaattattttgagatggttccaatgttaaccctagaatcatcatcagaaagagtaacaatgtgatgtagaagaacagctaatcgacatgactaaaaatatgctcattttcagaaaaacaatctggtcatctggaaacaatcacagctacaacctagggaacactcccatgtgggatactgatctggccaaggcacactttctaagcaggaaaactatcagatcagggtgaatttaggccacttcagaggtgctgcctataaacatcccagacagaccttcttaggcagcagaactggtcccattcctctcaaagcagtttgacactaccctacccacatcaacccaaagcttgacgttaagtcaaaagagcatattggagcaaaagtgaacagatgtgtaaactctagcacattcttattgctgtattaagtctgaagatgagcacatcctacccacaacagtattgttcccaggaagcagggtaggagtagtggtaaattagaaaatagactattaattgcacaattaatagaaaagtaaaaacatgtttcaaaatctacaataaacctgtatcccaaggagtcctatacgtcagtgtgatgtgctggactctgaattctgtggtacagctttgccatttggactccgtccggcctactggtctgggtacggcttgcttcctgcctgttgaagggtgaatatgctacacagagctatgatggtttctactgagtggtaaaattcacagaagttccaggttcatcatgtcaggatcattccttgtgcaaagtttgatgtagatgaagataaagtggtttcttggtcaataattgcaatttctttcttttaaagtcagtgggtttcttgtatagttctattacaattggcccaggtttaatttcatccatctccatgaaagcaaaacacttggtgctggtaaacctttttttaggcttgtagtgtttgaattcaaagaagatagctgcacctttggttaatttttcaacatgcttctggagctcaatgtccacattaaaatgaacatatgtatcttcttttcttgaagccacaggagtatcttgcacaggagttaagtctatgccattcagatcctttacactaactgtaatatagggatcgatgcactgcccagcatctttcaaaccaattttctcaattctgatagtgagtaatgtcattcctggttccgatggcaaccttggtaataaagtaccgggaactctagcaggaaaagaatcaggagaccctgct

SEQ ID NO: 47597 - DNA, 1527 bp, Homo sapiens
acactttagttgggagctgcgcccgctacacgtttactggagagctggccgcgcgccgccgcctcccgcacgcttgcacgcgggcccggcttcggggttttgggttcttactccaagcggcggggaggagggggagccccggacacactgtggggaggaggaggaagaagaggaggagggaggaagaaaaaagacgaggaggacaggggcggggggcgggaggctttgccaccttcagcccccccgcgaacgccccaaggttgcacacatctttgaccaactcagcagcaaggtggattttctttgtgtttaaagaaaaaaaatgtcccctgtgtctgtaaaagatgattttgcagttcagcccggcttgaagctggaccgaatgaagactatgggctgtgcctccgccaagcatgttgccactgttcaaaatgaagaggaagcccagaaagggaaaaactaccagaacggagatgtgtttggcgatgagtataggatcaaaccagtggaagaggtcaaatacatgaaaaatggggcagaagaagagcagaaaatagcagccaggaaccaagaaaacttggaaaaaagtgccagctcaaatgtaagacttaaaactaataaagaggttccgggattagttcatcaacccagagcaaacatgcacatctctgaaagccaacaagaattcttcagaatgctggatgaaaaaattgaaaagggtcgggattactgttcggaagaagaggatatcacatagcaccaattttaccactcaaaccaggagctactactgtgtaaataggttacaccccagttgaaatctttgcaaaggtcggttctattcagcgaacagcactatagcaaaagaagatcgttccatattgtacgccccattaaattacagtgtttcttaatgaacttgcaaaggaatattgctaaaaacaaacaaaaaaaactgttatcgaactttctttgttgctgctagttaaaacttgttgcaacttttcacttctcttgtgtccaggtatgcagcaaaattctgcaatttcaccttaaagatactgttggttttacagatgctctccaacctattttctataagatgaggtagtggtgaactcagataacaaacttctcttctaaactggttctgcttctaagacaagcatctcctgccctctctccttcctccccatctctcgcacgcagtctagagatggactgagccttgcttctcactggcagtgttgagctttggagatgggatggttgctatgccaagccttgtttctctgctcagaagaagtagagaagctattatcaattaaaagcatgctgtgatgtgactcctggaagtgacgtaggagtgagtggcaggttgtttgatttaataggtatcttaatcaagaattaagcttgcaacattggctttgctcagatgcagatggaagtgtgatcacaatcattttgaatccctcttcctcacttttttttctaagaaaataaacattttactgtttttatgga

SEQ ID NO: 47598 - DNA, 1431 bp, Homo sapiens
  misc_feature (1)...(1431): n = a,t,c or g
tttttttttcagcccaaactcatgttctcaactttattccccatcccagtggtggctcttctgtacagtggagaaagaagggggaccccaccagggctatggagagacagtagaggcaggactgaaccgtcagcaaagattaaaaggatgacctgaggctggcaaccacaaaaccaagaagccagcgggggctgccccttccaagtctcaccaatgacccagagcaggttccagagcccaaaggcccaaaagtgcaattcccaaaagccaaggtctgggagccatcaaggagctcccagagatccagcgacgctcagagggcaagggtgtctttgatgagcctgcgcatggtggtggtgactgaggtgcccagggcatcagtgatctggaaggagatcttgtacaggtagggctgcacgtcccgcaagcctgtgtcaaacacgttatccacctccgactgtgtgggcatcttgggcaagtactcatgccgattcatcacctccacgatgttgatgatcttctcgcagagtttctcacccaccttctcccggcagatctgccgctcctgctccgtggccagggctaccacatgcaccttgaccgtccacacttcccatgggatgcactcgtctgagaatggccagcgagacttcttcttctggtagaactccaaggacatctgccccagcccatcgccaccagagttgcgcagtgcatccttgaactccccaacaaccttgcgcagggcacgatccagttcctcagaagagacacgcacataagtgaagtcgatgaagtcacagtcaacatcctgggtgcccacggtgccaatggagtaggtgccctccttcttgtagtggaacttgcctgtgctgcggtgcagaagcaccgtgtgcagcacagccagcatggcctcctccacctgccgcccctccaccgacacctccnagcacctccgagcgacaagttcatcctgcacccagtanaccccaccaaggtgtggaacttaggataaagacaaggggatcttaacccttacccaagngccacccttgagtgtagagtttggagcacggattcctcaagctcgctcatgcccttcctcctcctcctcacgccctggtgcgacctccgcaggtacgcttcaacctccgcacggcgctgagccacaagagaccagctccacagtccacgtaaccagggaggaacggactcctcgggtgtcctcgggggcgccccgcgcccaggctggctggactcggaagctggaggagcgcccgcgttccactgccccgggggatgcccacgccggcacaggagagggggcacacggttaaaacagctcccacctcccccaaccacagtccacgaccagcctctcagatgccaccactctcccggcaggctccagaccacctgggtcggaggctg

SEQ ID NO: 47599 - DNA, 1049 bp, Homo sapiens
tttttgttagataactaactttatctctatcacatctgtttacaagcaaagtattactttgtctggacttatttcatcttcagtgtctgggatcgtgggcaacagagcagatcgcgttaagccccaaaatttttgaggtgacatgtcttttttggtggccgtaaacttccatccaatatggcttgcacagatcttacactgggcaacagtccaggcatacctaagaaattaaggaaagatatcagctaaggaaacatttctgtactccaagcctatcatataaacctatcatgaagacagactttagaggcaaattctaaggattagagattctaagttgagatttgatccatacagttccctgaaacctaaaaacatttctaaaaacattttctaattttgtaatatgtatgacttttatgctcttaagccatgtttacatttttcttctactgcatagaaataaagagtaatcttaagaatttctttatagaaattgctggttgccaagaccacattctaacttgtactggcaccacattctaacttgtactggcttttcctttgttgtattgcagtcaagttagaaaacagcaattacctgcagaaataatgcacttctgtctgagttaaactggatgggccaggaaggacacgtctcaaaaagtaaatatttatattctaaaataagaacgattgtcagataatgcaaccagaaatacaaaccatggtattttgttcttaagataaaccatgtaattgcaactgtttccttatttttttccctaggtataccatgccacatttatttatagtaacaaatgtattctagttttagtcctcacatagggtgccaagtaagatagggcaatccaagatacatagtcctaaccccagagtagcatgtaatcccttcttagcatccctctttgaaaactgaagatagtacagctgagggaactgaacaggttcccaggatcatagagaatcattaagctgaagcaaacaaacaaaaggcaaactagaagaaaagcaggattcaatgggtt

SEQ ID NO: 47600 - DNA, 565 bp, Homo sapiens
aacaatctttgcattttacagtaggatcaagtccccttcagtgtgcctttgtcagctaatatgtgaccagcaatgacaaccttgggagtatttattaaatattatgctatgaatataggcaacacagaacagggtttgcagtatagcgtcttgatgctaaattctcatatacctctacacgagaaatatggaggagaaaaacaagcatttacatatattcttcgtcactttgaagatgcatggcctgaactcgactgcttgtgtttgtttacatatcaggcatacccaggcatctcctgcagccagaggttccattgctgtctttgctcagtcctcttttaaaatatgaattagtggacaggcacggtgcctcacacctgtaatcccagcactttgggaggtcgaggcaggtggatcacgaggtcaggagatcaagaccatcctggctaccactgaaaccccatctctactacaaaaaaattagccgggcgtggtggcgggcacctgcagtcccagctactcgggaggctgaggcaggagaatggtgggaacctgggaggcagag

SEQ ID NO: 47601 - DNA, 1183 bp, Homo sapiens
tttttttttgcagttgagatgcagcatcaggtgcttttacttcagtgaatgaaaaataatggtcacaactcaaatgaatgggaatttaatatgaatatatgcaccttaccagagatgtttgctaccaatgatatcttagcaattccatattccttacaaagtcagtataattgttgtaaaaaaatcaactgtggttctgaatacccattcacagttgacctcaacaatgtatctgatgtaggagactgagtatccgtgacaggcagaagcatgtgatggtcctcagtcccaagtggaagagctaatggtaaagtcatatcagaaggcttcacatccatagtttctgataaaggacttttttgtatggaatcctgttcactcaaagtatgatcctctgcactggagtctagagttttatctgcaccagaatggacttttgttttgtgcttctttaaatttttaatatctgtgtaagaatttccacataattcgcagataaatggtctttctcctgtatgttttcgagaatgagtgataagagaactagagacagcaaatgccttcccacaggtatcacatacataaggcttttctcccagtaatgccctacggacatgataggtcagtgtgctggcttgagcaaatctctgtccacacctatcacagacatatggcttctctccactatgcttccttgcatgaatcttgagattgctagaagttgcaaactgtaagttgcatacatcacatttatagggtttttcttcaccatgatgcatgcgactatggaagactagctgacatttctgagcaaatcctttatcacacaattcacatttgtatggcttctcacctgtatgagttcttacatgcgttttcagctggttacattgggtaaatgcctttccacataagtggcagacgtaaggtttgactcctttatgtattctcatgtgccttctcaaactgctggcttctgaaaacactttcccacatgtgttacacattggcttggccttggaatacctctgatccagctcttccccggagttctccgcctcataaggactcttgacgctggctatattagacatagagtgttctttcagagcacagtttggctgtgattttccacgtttccgtttcactgtaacagtgtgcacaatatcttgtgctggaaaag

SEQ ID NO: 47602 - DNA, 1472 bp, Homo sapiens
ttttttttgatcatttaaaagtgtttattttctaaatgggagtaacacagagggaacttttggcaccttctttccagtccatcacccccatcatgtcctcccaaacacaaagcaatggcaggagaaaccacaggacagtcacaaagtcagtcacagagagatctgtacaatcccggatagctggaattcaagagtctgtcccagctatcttgtcctggagtggggttacagctcaggggcatagggctcctcagtaggtgaaggtacccgcagctcagcatcatgccttaccacggtgaagagtcccaccactgccagcagagccatcaccatgacagcagagcaaatgctgaacatattccgagtgcctgtttttcgatcactgtcatggaggacaaggagccctaggcaagccagtgagtgcagaggtacccggaaccagttgagtacaccagcctgctctgtctcagggatcacctttctccgtaggaagctcatgctgggaaagtataatccacaagccaactcaataagtagaaaggctatgaaggactccaccggactctcctggcctgggctggtagagaaagtcaacatgaagagagagaagacgacgatgagcacagcaagggacagcaggtgcatgggctgaaggtggtacctcttggaggtggcgatacggtacagggaagagccaagcaggctggctgccatgaagctggagaagataatgcccagaggggccccgtgtgggtccagcacaggtgtccagaggaagacaaagatgaagatgacactctcaaatagagcttgtatggtgcccaacagcagcacgcggcggtccgacaggaggcagcgcaggcctccagcacaggtccttgagaaggcacgctgccggtcatagttctccccccagtttcgaagggccaaggcccctgccagagccaggagagggatggcagccacaaagggcgctacaggccccagcccctatccagctggctacagcctcagctgccacacctgccactacagcccagcacatggttccagaaggcagctcgagcaaaggtagctgggatccactcagcagggaagtcatgcccgttccacgtgctcatggatataccaggcctcgaaggctgagaagagcagggctgtggacagcccaccaagtgctcgccccactagcagcacaaagtagtcttgagagagtttggttaagcagcatagtgagtaagtcagggagaagaggacacaagaattcttgcgacccagccaatccacaagggaggaggccactaggccaaagaggactgtagaggcaaggccacagacatagaggatggcaatttgaccttccaggaagtagtaatgctggtagagtttatagaggtagggggcctgaagccaatcagctgccagggccaggaagtagacctgatagaagtccagttgaaaccgaaggaagg

SEQ ID NO: 47603 - DNA, 1206 bp, Homo sapiens
ttttttttttgtttttgattgttatcttttattttcatatgaaaaatagattttaagcaaaattcaaaaataactcgacactataaataaagagggccttaagtacattctttttgttaataagatttaccagtttgtaggttcaaatatgcagttaaaatcactgttttttttttaaacatgttacgaagattaaaaaaaaaaaaggctcagccacatgttggtttaaattcccatatgcaactattcccatatgtactatgtacaagtgatttataaaaacattggcattaatggtacaggcaaagtaaactacagtggagtttcagaatctcagttcactgcatcttgattaaaaaaaccatgtgacattccaattatgaagtcagtgaggtagtggaggtgttttccttgaatatatttacacaagacagtattcctcatctggctgaggcattcttttcctgattttgtccaagttgagagtcctctgtgagggaagactccagctgagacagactgggtgatgacgctgaatctgcagaggtgctggtgaccaattcccctaaagcatctacttgtctcctcaaactgtgtaaagtgccctctgtctgccgctttcctttaattaatacttctgcttgcttggacatacagtgtcggagttgggccttgagtcggtcttcccggtgacgcagtttctcccggagtgcttctccacgccagtgttcatccattatgtgaacttgggaaaagttcagtttttcttcaaaaggtccctcattcatggtaaatggaaggttctctttcaagctttccaattctccttctaggttttcgtttctttccaaaatagcttctagatctgctggtagttctggaagaaactgattaagattcttcaagctggttctgatttcatccttcacctcagatttaagtgtcctcattgcatcactgatttccatttgtcttctctccaaatctttttggtttgccatctgtttcttgagctccgtgtactcatactgcatctggttgagctccttcatcaggcgcctggcccgctcatggttgtcctgggctaccagttcaattgttgccatttccttttgtatgcagctgttctcctgtttttgctcaagaaggtttttctccagctggctccgctggatcttaagtgcttccttcaggctggccacctgc

SEQ ID NO: 47604 - DNA, 543 bp, Homo sapiens
gcggcacgaggcaacacttgctaccagatttccaggcatccttccagagagactgtataaataaacatatagaggataaggaatgctggacagttgcttcttttctccttttctgtaccatgtttgtttccacttgctggtataccttgtagatcctcccatatcaggacacaaaaaccatctcatcgtttttaacagctacagaatattccactgtatggaattcctaccattaatttagccaaccccctatctggacatgtgattgctacattctgttgttatcttacaaacagccattaattgaaaatccataggtgcaagaatatctgtaggataaaatcctacatataaagttcaggggtcattttttctatatacattttccaacaactatttgatgatgggctataatctataatctgcttttgctagttcatgacttttattagattaaaaaatcagccggccgctgtggtcatgcctgtaattccaacactttgggaggccaaggtggcagatcacttgaggccggagttgaga

SEQ ID NO: 47605 - DNA, 883 bp, Homo sapiens
ggagcgtgagcagctggaggcaacttgtccccagtgtcaccagaccttctgtgtgcgctgcaagcgccagtgggaggagcagcaccgaggtcggagctgtgaggacttccagaactggaaacgcatgaacgacccagaataccaggcccagggcctagcaatgtatcttcaggaaaacggcattgactgccccaaatgcaagttctcgtacgccctggcccgaggaggctgcatgcactttcactgtacccagtgccgccaccagttctgcagcggctgctacaatgccttttacgccaagaataaatgtccagagcctaactgcagggtgaaaaagtccctgcacggccaccaccctcgagactgcctcttctacctgcgggactggactgctctccggcttcagaagctgctacaggacaataacgtcatgtttaatacagagcctccagctggggcccgggcagtccctggaggcggctgccgagtgatagagcagaaggaggttcccaatgggctcagggacgaagcttgtggcaaggaaactccagctggctatgccggcctgtgccaggcacactacaaagagtatcttgtgagcctcatcaatgcccactcgctggacccagccaccttgtatgaggtggaagagctggagacggccactgagcgctacctgcacgtacgcccccagcctttggctggagaggatccccctgcttaccaggcccgcttgttacagaagctgacagaagaggtacccttgggacagagtatcccccgcaggcggaagtagctgagggcaagggtcccgatgagggtcccatggcctgctccctcaggaacagctccagcaccaataaagaggcatcttaccacccag

SEQ ID NO: 47606 - DNA, 1281 bp, Homo sapiens
cttatttctttggaaaataagttacttattccagaagccttagaaggaattctgaaaattcttctaactggccattaagagtaaggaagttgaatggtactgctgaagatctgagttgactcactgaaattttattttcttatttttttaacattaaaattatttctttttggctctccctctagttattttttaaattaaggtaattactgttttaacctagagcatataatggcaaattaaattttaatttgacactcataccgaactcagaaaagcttgtttgatcttctctaaattctgtatgtagtactttttttaattgtcacatttctttgttacatctttgtgtccaacaaaacctgtggaaatctgtgttcatttttgtggtgagggatgggggtgaaaaaggggagacttgctctaattatgcatatacatttgactatgtaaaggtagttgtagactatatgtataaataacaagttaacacttaatattctaaattgttctaaggaacagtggcctgaagccatgactagttttgtggagctgctggctcttttaacagtagctgacctattggatttaaactgagactgaaattgacatttgtggttaggttatctagctgaggcttttaacaatggagcagataatgtctgttcctgtagtggatccatttaatttcctatttgagtactctcacttaacaagtattatctattctgaacctttgtgttgggaatttaaggactattgtcaaaggctattaatggtaaacaagtatatgcaaaacaattcacatatgggtaaaaatttcaaattgtgggtttttgtttttgctttttagtttcaaagattagttatgtagcagcaatatcataaccaaagcaagtaggaagttgactggtttggagaatcttcaagtagttttaaatactgtaatgtatcagattgttaaccaggatttttttttcctgtattactgctaaatatattactatattaatgcactttttgtatatataactgtcttctgtacattctgtacttactacagtgtatataaagcctgttttccctgaagctgtgagggaataacaatagttgtatcataagtccgtttctattttgagttccttcttgtacttgaaagtagttcagtagtgaaatctaaatgagtgtggtatgggttggtaattaaaactgggcaatgtgggcagagctggcctttggaaactgaataccaggaatgaaaagtgttgttttgggttaaga

SEQ ID NO: 47607 - DNA, 2222 bp, Homo sapiens
ctgacctcatggcgtagagcctagcaacagcgcaggctcccagccgagtccgttatggccgctgccgtcccgaagaggatgagggggccagcacaagcgaaactgctgcccgggtcggccatccaagcccttgtggggttggcgcggccgctggtcttggcgctcctgcttgtgtccgccgctctatccagtgttgtatcacggactgattcaccgagcccaaccgtactcaactcacatatttctaccccaaatgtgaatgctttaacacatgaaaaccaaaccaaaccttctatttcccaaatcagcaccaccctccctcccacgacgagtaccaagaaaagtggaggagcatctgtggtccctcatccctcgcctactcctctgtctcaagaggaagctgataacaatgaagatcctagtatagaggaggaggatcttctcatgctgaacagttctccatccacagccaaagacactctaggacaatgggcgattatggagaaccagactatgactgggaccacgggccccaggggacgacgacgagtctgatgacaccttggaagaaaacaggggttacatggaaattgaacagtcagtgaaatcttttaagatgccatcctcaaatatagaagaggaagacagccatttcttttttcatcttattatttttgctttttgcattgctgttgtttacattacatatcacaacaaaaggaagatttttcttctggttcaaagcaggaaatggcgtgatggcctttgttccaaaacagtggaataccatcgcctagatcagaatgttaatgaggcaatgccttctttgaagattaccaatgattatattttttaaagcactgtgatttgaatttgcttatgtaattttatttgcttgactttttatatgatattgtgcaaatgtttgccataggcaattggtacttaaatgagaggtgagtctctcttttgccttggtgctttggaaattaaatgtcacaaacgagtatataattttttatctgtacttttagagctgagtttaatcaggtgtccaaaatgtgagttaaacattaccttatatttacactgttagtttttattgttttagatttattatgcttcttctgggaagtattagtgatgctacttttaaaagatcccaaacttgtaactaaattctgacatatctgttactgctgactcacattcattctccgccattcaaatactattttttatccacatttttttttgttcccaaactgtaatgtacaaggatatgtgtgataactgctttggatttgagtaatatttttttttcttccaagaaaactgctttggatatttttagataatttaaacataatttaggataatgatattgctcaatctgaccacaattttaggtaaaacattaaatgtgtcaagaaatcttgggcaacagagactctgcagcttgcagtggacatagataaaatgttacagagatactatttttttggttggaattactatattaaatttagaagcagaaactggtaaaatgttaaatacatgtacaattgcttttagttagcaattgattgtagcatgggttcctccaaggtttcaagcaatgggcagagtttaaaattatatcagattcgtttacttcgtttattattttacagtaaatttgaataaatcttaggggtcattatcacttaaataatactgtacctaggtctttcaaattaaaattatacctgaatgaagttgtttgtatacataaaggatatttgtgtacaattaccttttttcccccacacttgttttctttgtttttgttttttatggcaactggaaagtatttactatgggattcatttatgtctgtctttctatcataaagaattgatcaatatgtaaaatatgtgatttgaaccatggttgacttacaagtgtcactacagctttttagaaaacatagccctaatatatgttaagcaggacccgggtgagccagtgggcttgcgctttatgtagagctggaagaaggccgtccatcctgtctcttgggcggacagtgtactttcctaatagggaagggaagcacaatggaaatacccctgaaccgttttattgcagtaatttttttcatatctgaaactattatttaatattttgaataagattttaaaaaataaatggcaaagatataaatctatgaaaaaaaaaaa

SEQ ID NO: 47608 - DNA, 2187 bp, Homo sapiens
gcggcggatgcagtacaaccggcgctttgtcaacgttgtgcccacctttggcaagaagaagggcaccacgttcaccaagatcttcgtgggcggcctgccgtaccacactaccgacgcctcgctcaggaagtacttcgagggcttcggcgacatcgaggaggccgtggtcatcaccgaccgccagacgggcaagtcccgcggctacggcttcgtgaccatggccgaccgggcggcagctgagagggcttgcaaagaccctaaccccatcatcgacggccgcaaggccaacgtgaacctggcatatctgggcgccaagccttggtgtctccagacgggctttgccattggcgtgcagcagctgcaccccaccttgatccagcggacttacgggctgaccccgcactacatctacccaccagccatcgtgcagcccagcgtggtgatcccagccgcccctgtcccgtcgctgtcctcgccctacattgagtacacgccggccagcccggtctacgcccagtacccaccggccacctatgaccagtacccatacgccgcctcgcctgccacggctgccagcttcgtgggctacagctaccctgccgccgtgcaccaggccctctcagccgcagcacccgcgggcaccactttcgtgcagtaccaggcgccgcagctgcagcctgacaggatgcagtgaggggcgttcctgccccgaggactgtggcattgtcaccttcacagcagacagagctgccaggccatgatgggctggcgacagcccggctgagcttcagtgaggtgccaccagcacccgtgcctccgaagaccgctcgggcattccgcctgcgccctgggacagcggagagacggcttctctttaatctaggtcccattgtgtcttgagggaggacttttaagaatgactgagaactatttaaagacgcaatcccaggttccttgcacaccatggcagcctctccttgcaccttctcctgcctctccacactccaggttccctcaggcttgtgtccccactgctgcatcgtggcggggtgtcacagaccctctgcagcccctggctgccctggactgtgcagagatgcctgactccagggaaacctgaaagcaagaagttaatggactgtttattgtaacttgatcctcccgagctgtgagcgcagtctgaggtctgaggacacggcctcctgttggagtcccattttctccatcagggcacgtgggcggcttcctcaagcccggaggagcttcccagggcgcacaggggccgccggtaacaggggccgccggcaaaaggcccttttccagtcatagcactgaagttgcaacttttttcttgtaattgttttgctactaagataatttcagaagttcagtctattttttcagcggatactgccgccaccaagaatccaaaacctatttttgacttgggagagacttgcttttgttggttccgcccgtgggagacgacgatagtgtttgctgtgatgaatgaaagtgtgctgccggcttcgcgggccaggatcctctcggtgggatgggcaccacagacaggaggcccctcaggcccgtgcgggccactgtctgctgccgcctgccggggtggcagagtgagttgtctcaggaccccgtcactgcgacgttgacactcctctcccttcccttcctccccaactccccaaacactgtggaaggggagaaggaagtgatccacagcattcaggccacttggggtctagaccatggtggtgccagcctggggggggcagtggccctcagctctgcccgctggagcggttgagtgcagaagggtgcgcctcttccctctacccccgcaccacctgctgtgtgccagcctgagacggttcctgcctgtcttgggggttggtggagggtggaggcagttctgccagccgtggcagggctgctatggggcatccagggctgtgggggtctggaggaggggacatgaggtgagaggtatcctggccgagggcggggggacagcggggggtctccctccggacctacctcagggagctgagcgtgcaggcgctccagggcaggcctgggacagagtcaaggctcagagaataaaggtagctaatctcatcataatatttttattagaatgttctgatgataaaaataaaacttgttttctttaaa

SEQ ID NO: 47609 - DNA, 517 bp, Homo sapiens
tttggaaaacttgtatgactgattacgaatttaatacgactcactatagggaatttggccctcgaggccaagaattcggcacgagggaaatagcaggtgctttcctagtgacactggatccacttatcagtcagctgctcacatttcagcctttcatgcaggtggttttggacagtaaattagacctgccatgtgaactgcagtttccacaatgtcttcttctggttgttgtcatggataagctgccatctcagcctaaggaagtgcaaaccctgtggtgcacagacagccaggtctcagaaacgacaaccaggatatctctactcaaagccgttttctacagttttgagcagtgttctggtgaactctctctacctgttcatttacagggattaaagagtaaggggaaagctgaggtggctgtcaccttgtatcagcatgtttgtgttcatctgtgtacatttattacttcctttcatccctcactgtttgctgaactggatgctgctctgctgaa

SEQ ID NO: 47610 - DNA, 833 bp, Homo sapiens
tttttttttttttttttgcagtaagtaactcagaatgactttactcaggaaatatgaccatgactcactggctaggagtgccccatgcccagttcttagagacccttgatagctcctagaagacaggaggctgccgtggtcaagaagggccaagccttgaagtctcacggcaccccctgtggtggaggtataaggctcaggggccaactactgggtcttgcagtccccatcgttgctgtgggctgtcttcaccttctttagttccttctgtagctcagactcggccaccacaacctcctttggcttctggtaagagatgatcagggtgcagttggcgtgggcaaagctcagcaaggcgtcatccagaggtagctggtgtctatctagatcaggaatggagaacttcttgtagtacttcttgttggttgttctgacaatgatgcagcgctccttctggtccacagagacactatagacatccttaggataggggaggtttcgaatccgccactggaaactcatcttggtgtccttgcgcatgaagataggattggcattgctttccttgatgagttcaggccccaggttccctgctcctaggggcgctgggtctcctacttcaagctgccactggcccatgggctcccagggcacttttcacacgccactttctcacaagtagttcactcgtcttctcgtcatattcttcagccatttccttgccgtctgggaaataaatagtgaaccttccttctcccgtcctgcagcagcgcagtcttctgggctgtccgcagaactctccaaccagcccgtcaccgccatcctcgtgccgc

SEQ ID NO: 47611 - DNA, 340 bp, Homo sapiens
ggttttggtagttctagccattgcagtaagacagtagacagaaagtcaaataattggcataaatattggaaacaaaaaattatttctactttgaaatgatacaatagaatagctggaaagcccagggggactctagtagaaaacagcaatgaggattaaatgtaagacactttggaaagctgatgtgtgagaaatgtacacaaactaatagctttctctttattagtagtcatcagttgaaaatggaaatgaccaagcaaaaatattcaacagaatgacaaaactattggttacacctaggaataaatgtgttaaagaaaggtacagagtgaaggtaatg

SEQ ID NO: 47612 - DNA, 461 bp, Homo sapiens
ggctcatttcctggccgctcctgggcttagcggaaagaagagattactcacactccttctcaagcacagaaccagttgtactgagctttttgctaagctgtttcagccaagaatggctgtggaatctggagtgatttcaaccctgatacctcaggatcctccggaacaagaactaatactagtgaaagtagaagataacttttcctgggatgagaaatttaagcagaatgggagtactcaatcctgccaaggaattgtttcgtcagcaattcagaaaattttgctaccagggagacacctggggccccggggaggctctggagccgactccaggaactttgctatcagtgggctaatgccagagttggcacacaaaggagcagatcttagaactgctggtactggagcagttcctgagcattctgcctgaggagctgcagatctgggttcagcaacataat

SEQ ID NO: 47613 - DNA, 1551 bp, Homo sapiens
gcaaggtgaagagcccagcttggtgtccccaagtacttcttgtggctcattgactgaaagactactgagacaaaatgctgagctgacagggcatatcagtcaactgactgaagagaagaatgacttaaggaacatggttatgaagctggaagagcagatcaggtggtatcgacagacaggagctggtagagataattcttccaggttttcattgaatggtggtgccaacattgaagccatcattgcctctgaaaaagaagtatggaacagagaaaaattgactctccagaaatctttgaaaagggcagaggctgaagtatacaaactgaaagctgaactaagaaatgactctttacttcaaactctgagccctgattctgaacatgtcactttaaagagaatttatggtaaatacttgagggcagaaagttttcgaaaggctctcatttaccagaagaaatacctgctgctgttactgggtgggttccaggaatgtgaagatgccaccttggccctgcttgcccggatgggggggcagccagctttcacggatctagaggtgatcaccaatcgcccaaagggcttcaccaggtttcggtcggccgtcagagtatccattgcaatttccagaatgaaatttttggttcgacggtggcatcgagtcacaggttctgtttccatcaatattaacagagatggctttggactgaatcaaggtgcagaaaagactgactcattttatcattcttctggtgggctggagttatatggagaaccaagacatactacgtatcgctcaagatcagatctggactatattaggtcccctttaccatttcagaataggtacccaggcactccagctgatttcaatcctggttctttagcatgttctcagcttcagaattacgatcctgacagagccctaacagattatatcactcggctagaggcactgcaaagacgacttggaactatacagtcaggttcaactactcaatttcatgctggcatgagaagataatcctttgaaacatcattaattgaagtgattttaaatagatttccttttgtaaatcaatggttcttttgtgcttttgtattgtgaatattcaatgggaccaatatgaacacagcttatgattgtatacaaatcccttgccagcacatgaaaacaaactggaatttgtatatataagcattgtgtatgtattcatgcacaataattattgaattacctgtatatttgtggaatgctaatttaaaacattaaattataaaccttgtgtatttatcaaatgggtgaaaagattaaacttttacgcattacaatactgctgaatgtgtagctcgaggtgtcctgcacttttcttataaggctactgaagttacatgttttgcctaatatattctactggtgatgaagacagataatatcacttgtagagacctatttttgtataatggtagaagttttgaattttatggggtattttgtcaagtactgaaataaaaatgacttcaccattttcaaaaaaaaaaaaaaaaaaa

SEQ ID NO: 47614 - DNA, 610 bp, Homo sapiens
tttttttttagaagataaccagcatctttatttttcatgcttccttaaatagttttgggagtaggagacttgtcctttggaagattgtcatccagaggcccaggaaagtcatctccaccaagagagccaactccctgcctcagtgtggtgttcagctggaagggggtgaacccagccaggccccaagagctgtcccagcaaagcccccgataactttagatgtcacagagagtccagctgcccccactgactgcagaatagccaccagactgccagcagcaactccgcccccgttggcaatggctgctgtagacatcatcttggctgctatggaggatgcggcgattcctactgaggtgaagcccatggcactgagcgccacgagcacagtccccacagccacaactcctccgaccacagctgctacagcagccctgcctgagtcccatccactctcctttcccatggttggccccttcgcctcggtgagcctccactcggattcttggacttccacgttactgtgcgggagctgacaaagtctctcgccggagggagcacacagaatttcaccttctccggccttttcccaagctggcaggagtaaagc

SEQ ID NO: 47615 - DNA, 2460 bp, Homo sapiens
caaagcgggacaggtccagcggttgttctgtgtgaagtcgcgcggcttccacccacgcagtgttctaagtgaaggccagaaactcgctcgccatgtcggctgcagaggcggggggtgttttccacagagccaggggcaggaccctgcgcgcgtttcccgcagaaaaggaaagcgaatggaaaggcccattctacttcatcctgggcgcagacccacagtttgggctgatcaaggcctggtccactggggactgtgacaatggcggtgacgaatgggaacaggagatccgtctaactgagcaagccgtccaggccatcaacaagctgaaccccaaacccaaattcttcgttctgtgcggcgacctcatccacgccatgccagggaagccgtggcgtacggagcagacggaggacctgaagcgagtgcttagggcagtggacagggccatcccactggtccttgtcagcggcaaccatgacattggcaacacccccacggccgagaccgtcgaggagttctgccggacttggggagatgactacttcagcttctgggtcgggggcgtcctgttcctggtcctcaactcccagttctacgagaacccctccaaatgccccagcctgaagcaggctcaggaccagtggctggacgagcagctgagcatcgcgaggcagcggcactgccagcatgccatcgtcttccagcacatcccgctgttcctggagagcatcgacgaggacgacgactactacttcaacctcagcaagtccactcggaagaagttggcagacaagttcatccacgcaggtgtcagagtcgtgttctcaggccactaccacaggaatgccgggggtacctaccagaacctcgacatggtggtgtcatcctgccattggatgcccagctgggcagagaccccccacgggctccgagtcgtggtggtcaccgccgagaaaattgttcaccgatactacagtctagatgagctgagtgagaaaggaatagaagacgatctcatggatttgatcaagaaaaaatgacgctccttcccgttcccgttcacttttcacttgcactatttttttattttgccagaaacagcagctgcacacaacctcttgctgaaatataaaaatagcccaggcaggtttgtgaatttatgtccttttgcataaatcagagagctggggccctgtcctgaattatattcaaaatagaactgcatttcctttaaaatggagcgaatgatcctggaaatcagtttttaaaatattagactatctctgcatggatgtttgaataaattctcctaatgctgtgtttctcaactccacttttgaattggattgtattctggttagcatatggtcaaagtctgcctatcgacctcaattccaatctgacagccaagtatgatctttgataattccttaaacaaactacacctgattgtattaaattgtggtcacgattcccaaaacgctaggcaaaacaaagttcatctcctttcctttccagcggaacgaacagctgtctgccttgttgtgagagccatgcagacttattttgacaaggagccaagtaggcaccatttactgttcaattctgagacttctgatgataggaacagaatgcaagttgatacagctcgggagctttaaatttggccttcctggggtgcctagaaaagtcacctttgcacataaattggccatttctgaaaatctcctccaagagactgaaaccaaagctctaaaacgccgcttcttcagtctctggggagcacgttgagttggttcacatccacattctggctgtgtagccactccacagatgggtggtctcttgggatcagaatgcccctccactcatgagactcttcattttgtccactttgacaggaaaagtgggaatgtatgcagagctctcaaaagaaacaaaaaaggccaaaacggtgccttcagccacatcctctgaattggccctgacttggactaaatgcactaatgcaaaatcccttggacaaaagcgcataggttatttcaaaccagcattgttttttatgtaacctgttttaccgcatcttctcagcagcttctgaccactgctcaattttctcctttacagccattgttctggtggacaaataacctaggtactccaaatcctggcaggaaaaatatacagcattatgaaacagcactcagtaatcctaaaatggatttccaaagctggttacacatgacctgcaaagtcttatttaaatttaaaaggcctttctcattacagagtttagtcaacgtagcaaaaccatgggaaattaaatggaaagataattaaatatgtaaattcataaggaacaaaagacgagaagttaattatacaataggctggtgacaccagagttcattgttatgtgccacaagaaaattaaattttttaaaaaactaattatgttta

SEQ ID NO: 47616 - DNA, 1285 bp, Homo sapiens
gtcattttaaaatccagtggtagatgtagcttagcgacggtagttttttgttttggctatactaagacttggaaattattctctccagtgtcagcgaatccagaagggtatcagattaaacaccgaattcagccactggacttttaaaagtacttaagatggtttatctcgggttttttcttcagttaacaaaatcataaatatggtgccttataacatgaaaggaaaattagttgtgtatttcacgacgaaagcgacggaccaaaagaaatttcctgccccaagaagcatgggatccaggaaggggcgcgtagatgcttaacggtctcttcggaaatcctgcaaatagaaagataattctagatccggaatacctgtatctggtggaaaccatggatttctacaagctcgaattattcctcattgtatagcctgctttgtaaactagtttacaatttgcaggctgatcttaagatttttttatatctaattgctgctgccttcattttaggttcagcagttacttttaactaccttaatttattgccagaaggtatgagcctaacattctgatgagtccagaaaactacgttttgtcagtagcaatacactaggaagtaaaatatatttagaatttaaacattgtgtgccagtggtcctcgcgcttgactgcacatcagttacttgaagagccacacctcagatcaatgcagtcagaacctgggaagtaggtcccagacatcaggacctttttaaaggctcccccaagtgattctacgttccccaagtttgaggaccacttttctgtgcattggcttgcacaatttgaaaataatgcttttcctgagctggatcccagtgttgccttaacagggtgtctgtcgtgccgcagtagagcactgctgcttcctccaaccccaaaatttatgttcctaagtaagtcaggtccctaagccccgtcccaagaagtgacacaagtggccaacatccacactgtaggcttgcaggctacccgccctgagatttggtaaagaacactgccttgttccccatcagtaaacaaggttacctacctcaggaggctgcttgtgagagagcaaatgcagtatcttcagaatgatttatttttttaattaattgtaaagacttgtgccattggctgctctttctagtcccctaaatttctgttctagttttaaatttctctagaacttgcaatagttgggggttttataatgatgttttacaatgtttatttcttaaataaaaacttaaaaattcaaaa

SEQ ID NO: 47617 - DNA, 862 bp, Homo sapiens
ttttatatatcattctctgaagagcatattttattaatcttcaagttcctcagcatattaataataaaaacttgatatatattatcaacaagtctgactgttatgcccaaagaaaatccagattattttaaggtgagtttgcttctttttcatctgattcatcatccataacctgttctacgccttctacctccggaatataaaactgcagcatgttctgaattccatttttcagagtaatgattgaactagggcagctggtacaagaaccctggagtttcagctgtacaatgccatcttcaaagcctttgtagattacatcccctccatcttcctgcacagttggccgtattctagtatctaacaattccttaatcattgccacaacttcatcatcttcttcagatcctgcttctcctgaaggtgtttcctcagtaaccaggggtaagccagatgcaaagaagtccatgattgttgcataaatatctggtttcagtaaattccagtctaattcttcattttcctttgtgacagtgatgaaatctggtccaaagaagacactttttactccttcaatcctaaataactgcctagccagaggggagcgaaatgctgcagctggggtgggaaaatccattgtccttggtctaaggactgggttttcctggtataaactttaagccgtttgggatttggggtatctggtgtttgaataaactgggttctcactgggtgataaaaggctgcaggtagtgggaaaagtggtctttgtacaaactgatgcagaggctgtttcttaatggtgtatggattcttcaacttatgacagaaccgcctgcgcagccccgcggcaacagccgca

SEQ ID NO: 47618 - DNA, 726 bp, Homo sapiens
gtcgtggtctggcgtgtattccgagccttggtgtctggcggtttccgagcgttggtgtctggcggtttccgagcgttggtgtcttggcggtttccgaccgttggtgtctggcggtttccgaccgttggtgtctggcacgcgccaccctctcttgctttggttgcgccatgccgatgtaccaggtaaagccctatcacggggtcggcgcccctctccgtgtggagcccacctgcatgtactggctccccaacatgcacggcaggagcggcggcccagcactcggcactggccacttgcagacaagaagacaagaaaatgatttgaggacagcttcaatcggcggtgtgaagaagaaagcagcaaaacgaccactgaaaacaacgccggtggcaaaatatccaaagaaagggtcccaagtggtacatcgtcatagccggaaacagtcagagccaccagccaatgatcttttcaatgctgcgaaagctgccaaaagtgacatgcagggatgtccttcctgagatccgtgctatctgcattgaggaaattgggtgttggatgcaaagctacagcacgtctttcctcaccgacagctatttaaaatatattggttggactctgcatgataagcaccgagaagtccgcgtgaagtgcgtgaaggctctgaaagggctgtacggtaaccgggacctgaccgcacgccttcctgccgcttcagggctggatggt

SEQ ID NO: 47619 - DNA, 512 bp, Homo sapiens
aagaaaaaaagtttccttagaatggaaaatattcattcatgagctcttttggcaatccgtcatcagtatattctgaaaaccaataagatgttgccaagttgggggcgagagctatgtaatgcaaggcatatgcctgatgaagtatacaaatacacctgaccagaaactttgtctcccacataagtctcttctaggcactgtcggggtacatactgagctgctgctttggctgtattttctgtgcctcagaataaccattgtcctggtgttcatatccttagagttcagtacaaaatgttggatatccatttaataggttccaggttatcttagttggagtttggggtatttgaaaacgtcatgccttcaggctatcatttccctcagaaagctaagtaaatttactgcattcatttctcaaagagtaaaagtgcaggttgtatgtgtctatgaacatttaaacatgttaaaatgttaaatttaacattttaaatttaaacatttaaatatgt

SEQ ID NO: 47620 - DNA, 1991 bp, Homo sapiens
ttttttcagtttatttttatacactttttatttaaaaaataaaattataaacaaaatacagaaaaatattgacacctgtgataacaaggaaatgactcttaagggcagtttgttgtcctgggggaaaaaatcataagtgttataaagaaatattattgtgcaaaggaggaatgtaatatttaaggttcatttacaacgggcatttggcgtcgacagaaaaagtctttctatgtatacattcaacattttgcagcatatttacattcaagttacatttccaaattctatgccaaatacagtctaactcaccatcaacaatccctcagatattactaaaatcctgtttatttggtaggagtgcaatattatcttattaggaaataattttatgttcctactaagtcaactgcatttttactactttaacaaaattcactgacatttttatcccagttgaagtcaagcctcttttagacaaagtcaatactaactcaaatgttgccagttataaaattatataataatcttttcctccctccttagagacagtattacaactttcaatgaaaggacaccagctatgataaattattttcttttacaagagttaggatgtattacagatacaagttccagaattttaacttgttttcaaaagatgggccgaagcacttttccctttcagttgttaccgaattcctcagcaaaatacaacacattcagaaatctacatagcagttttctgaaaacttttctccattgtccccacacatttctcaaatcagagtgcttactcactagcaactggagaatctcttgcttagtttttctaaattatactagagtagctatcctaatttcctgacaatcttcccatttcattttttaaattatgattttattaaaatcaacataaattacaaaggttccatctttgctacggttcttttaaaaatttatcttaacttactgaagggtcaagaccccacagggcctgtctagaacaggcaaacaaaatgtcaagattagaaaattctcatgcctccaaaagactccaggcaaatcaaatctactcaattcttccttatttatctcaagttcaattttaagtctaagaagataattaatgacaaaataacagagattgatgaatttcatttagttgagctcttttttcctaattttcctcaggttgtaacttcgccttcagtacatgatgactggcagttggtagtaggttgctgagatgacaccacttctaagtcagattcacgaacaaaaaccactgcgtcaccacttacatttataagacactgtgcctggtttttatttggattctccatgaagacacactgcttcattatgtaggagacaacagcattccctcctaatgcagcaacatgagctctcaccattgcaaacacttcagcaataaaagcatggagaaaaccactgactcctccttcctcccgaagagaagtagtctctcgaataaaaaacatgttaattatcccaagatacttagttatttttgctccaggaataaaagaaagaggtgtcatcttaacaaccccaactgtggaatttgcacaaggtggagcagaacgattccggaaatttccatcacccactggacttgctttttcaactgtcatggttgtcttaattgatccacgccttatggtctgagctttcagtttaatgagctctatccagctgctgcatctgtctgcaaaggaactgtaatcaactgacgttgctgaaaacacagacagaaaacaaaagaaaaaaacaaagaaaaaaatatggatgatgtctcttactcgtcttaacactcctttcgatgatgtaatttaactgtaactcagaaaaagaatggtccttttcaagtcagataagagagatagtaaagagtcaagctttagacactgatttgtccaaaaccaagttctcagttagcaggctgagcatttctggtgatgtcatagttg

SEQ ID NO: 47621 - DNA, 905 bp, Homo sapiens
gtcctccctgcctgcaatgcagatttcaccctattcgcaaactggacagcatcttcatctgcctctctagtcatgggaggcaggtaccacacgctgcagacaatggcccagctggtcatcattcgcagcaggtacgtcaccatcccgtatttgctgctgttccagaaggcatcgccaaattgagggtcatacttgatagcaacagggtaaactgtggctccaatttcaaaacttccctttttgaacatcatcaccgatgtattattgatgcaggttccttctgggaagatgaggataggcagcttgcttttatcttgcacatgttcagtcagtctcttagccaccaggtggcgatccttcacttccgagcgctcaaaccagacgtgtgattcagagagccatggtgaaggcctgcccacacgtctggtttgagcgctcggaagtgaaggatcgccacctggtggctaagagactgactgaacatgtgcaagataaaagcaagctgcctatcctcatcttcccagaaggaacctgcatcaataatacatcggtgatgatgttcaaaaagggaagttttgaaattggagccacagtttaccctgttgctatcaagtatgaccctcaatttggcgatgccttctggaacagcagcaaatacgggatggtgacgtacctgctgcgaatgatgaccagctgggccattgtctgcagcgtgtggtacctgcctcccatgactaggagaggcagattgaagatgctgtccagtttgcgaatagggtgaaatcttgcccattgcccaggcagggaggacttgtggacctgctgtgggatgggggcctgaagagggagaaggtgaaggacacgttcaaggaggagcacagaactgtacagcaagatgatcgtgg

SEQ ID NO: 47622 - DNA, 1882 bp, Homo sapiens
ttttttttttttttttcagcattaatataaagatatattccataaaagagtttggcagtcaaagagaagcatcacacttccgaaaaacacaagcattcttctcctagtctacagagaattgtgtaaaaaaaaaaaaaaaatcatcatcaacagccaccagtatacaccacactagaatgtacactccggcaagtaaattaaggttgcagtccatccctgaacgatgagaagtggtctgagctatggcaaagtgttagaaagtagcccagctagacaaatgccccagctatccccaggggagttattcagtacttaagacttcatttccaagagcagccccagaaaagccctgacaggaagggtggaccagtgatcaccgatatcccattaggggcggtcaccagaaacaaaatgcctggagcttctgagcagctgcagcctggggttgtggctaggcacggggtgtggttgcagaagaacggctgtctccggggagaggcaaatggcaggccagccagccctgggtacatggccacaagaggagccctggccaacagtttcaggctggccatcttgggctggggctccctgggcttgcagtggggagggtcaggattcaaattctgggtgacaatttcagtagcaccaagaccagaagacagtgaggccacgctggggagtgggggagtgcttgtatgtgggatgcatggagggaggctgcagtatgtggaggagaaagagaggctgttgtgggctggttcttaagacactcaaggggactcaaagggtcggctccagccatggacactatctaaggctgctcagaggagaatgctggaggagaggaagaggaagtgaaatggtgtgagaacattcttacccctataaataaactatttacacactttaagaaaaggagagccggctctcagtgaagaaccatgcccaaccgaccggcgccatcagggcttaatgctatcaagaccagaggcagttccggcgccaggagaatagctggtggacacagggggacagtggacaaggcactcccgtggcaccagtccacgcactggctcaggcttacttcacttgaacatggctgaggatcctgcaaacaacccctgatatgtgcatgtcccagcagactgcgctggcactcagaggcccagcggggccacgtccgcctcccgttacgggcaggccccccatgctgctttgcttgatggagagagatgccctgtccacacctgtgggtccctctacccacggcccacccacagatgtggatgacccaaagcagatgtctggatgccagtggagaggggaccagggtgtcctgcagacatgcttgagctgcagggggtctgagtcaagccctcctggcagccacaggagccctctctgtctttcagagtcaccactcccacataaagacacattctctgtctctgggtagactccagagggatgcagtcacaagtttgggcaggtaacaagggggacccttggtcttcagcaccagcaagcaagaaacagagaggtcacgtcacgctgatgcttaagatggggcactggctctgggggtgtcggctcctctccctctggacgtagggctgatggcagagaaaggctctggcctcccagcgtggctcagctcggctccctcaactctgctcctcagaagtgatggccggccttcactgcctcgatgtctgagatcagcgtccttgccaggaagatgccaaatatctgcaacagcgagatggcgatgaagacgccagccacaatgtaaatgttccgcgggagccagctttccagcgcctggatgcagcctttcgtgaagatggactcatcccacttgctcttcagctgaatcctgacc

SEQ ID NO: 47623 - DNA, 1136 bp, Homo sapiens
  misc_feature (1)...(1136): n = a,t,c or g
tttttttttttttttttctcgggacaaggacacctctttattgctgttagaaaagggtggttacaagtttcctggacatggagagggacactatccctaaatccaagggaaccagaaaatttatagtatcaaacagaggaaagcgggggcagaacagagctgggcttaagatcagaaaattttcttcctgctcattacccaagcccagagttcttgccccagcttcaactgccaagataccacccttcaccccgacatcctcctaagctaccacaattcaacaaaggtgcaggtgcagaacttcagggtgggaatggggtgcagggaagcaggggctgtgccccagccccagtgccctctgctcaccctgaggtacccagtgcctttccctctgccagctgtacctcccggggaggggcctggacacatgtcaggctggggcagcagccactctgatcagcaccaggtcccgagctgggggcccctcttcagtccaccaccgccgagctggccatggtgttcacgccacaggccccggacccacgatgcaagtagtagtaacccttctcaccccagtcagtgccccagctgttcttgatggcccaaaagggaacgtcagagcggttgccgtagcccacaagcaacaccgcatggtcaatgagccaagggctgcagaggggccggagagggcgggagatcccgtggcggtaaaactgcatgccaaaggcattgatggccacggagattgggcctctcttggccagccaggctgccagcttctgctcgttctggctcagctccacggagtcattgatgtagaccttggccttctctgctgagaagttgcaggactgcatgtgaccctggtagctgtagtcatcctctgtctccagccctcccaaattctttatggccgagtaggcattggagggcaagccgcccatgcaggccttgtccatcttgtcacagtccaagagctcctgttcagagagggagagcagggtccggggcctgtgcgtgacacaccatggccagctcgcggggtggtggactgaagaggggcccccagctcgggacctgngtgctgatcagagtggctgctgccccagcctgacatgtgtccaggcccctccccg

SEQ ID NO: 47624 - DNA, 345 bp, Homo sapiens
ggacactcaaatcactgcaggcatatatgaagccaacacaatctaagctgctattaaaacagagccaagtcataaattagtacatcaacatctagaataaggcccaaagaactacctctgcctgttgtaacaacagtgggcagggacgcacagcaaaggtacaaatgactacatgatcccaatcaccgagctacatttagtgggctcagccaaggtatacaatcaagcttaatttgatgtaaaagctgaaacttccataatccatagtacaaaggtaaaaaagaccaaaacttcttatatggaatcttggcaatcaaatggttattatctgagataagtgtacaa

SEQ ID NO: 47625 - DNA, 1226 bp, Homo sapiens
tcatgttagcaaagaatattctatgaattagaatgttactgtggtagatctaaaggagaatgaacagaaggtgctggaggacctgttaaacaatctctggctattaaaaaacatcaagatgagaattaaaggcatatcctgatatacttgcctgcttgcacatgaggctgggagatcccatgcctgttgaagttaactctagccctgacctctattgatcttttgggaatgagggctgatttgaaggtgctgttgcaggatttcatttagctgctgccagttcaagtgacctgtccccagggctgcagcctgtatccacctgattgcagtaggtgagggctaacagcagaatttaaagtggaccctggggctgtggagcaaagtgactatccatttggacttttggataatgtggcaggagtcccagctgtttaatttctagtcacattttccagaaagttgttctaagttgagattactgacaagatttctcaagggcaggaccagatatgtgagagacttctagttcagagctgacccctctaagcctctgacacttaaacacgagtcctgctgtccccagcacacaactgcactgaagccttgttcctctcggctggtgtagagctccatccggccatgttgtgtgccagatacccagtagcctccctgcttgaacaggcctctcctaggctaggcaggtgttcagaggcatgaaggtctgggcaggggaagggcgtcttctgaaatgggagttaccaggtttttaaatgctgctattgttttatttaccatttaaggtcttttctattatatctgagtaactagtcagtttttcttacagtgctcatagcagttgtatttgaattgtattttcagtgaaatttgttttacattgccatttaaaattggcctttaacagcttcccaactggcttataagatatttttttttaatgaaaacataacccatgaggctcagatgctgttgaagaaataaatggtatgttgctgctgacagtagtgcttgcctattgtaacagcattggttctgctgtagcctcggtgaccatttaagttgaataaatctgtcattttcacccacaaacagttgttgagcccctggatttgggttgtcactgtggttctcctgccagtgctataatccagtgtcgtaggtgcagggtatgaatcagctcagcctcttaggagagaggggctctcagc

SEQ ID NO: 47626 - DNA, 1025 bp, Homo sapiens
tttcactgtatcctagcagggcaggtagtccaccaagaaatgtgcttattggattgggaggtgtttatttgtagtctgctgtaacacgtgtgaaagagcaggagcgtcatcagcatatgacttgcgctggtcatccggtaaatggatgtgctgtagtcccagtgctaatcatttctctccttcacagtgggtggaagtttagggttaaatgtcctttgaatgtcacctggtgagtccttgacaccttaggctcttcagaaacaatggttttgttgaggatggggaacagggaatgccgattttatatacatggtacacagagaggggtgtcacttcagaaaatcttccagcatgttcttcagaatattaatttatatgcgaggtgaggttgggaatgaaaagaacaggtcagcacttttttttttcctagaacatacaaaagaacatggtggactttcagggagtgcaatggaaggtgaatatttccttaagggtccccgagaaatgggagtgaggggaggggacacaatggctttttgagcttacttttaccttctgatactagtcaaggtccagaaccagccaccagccaaatttctatctgggtgcgggccactgaaaatccttgttaaaaaccagatcacaaatctggggctcttggtcccattggagaaggaaggaagagcctcaaaataagtgtgcatccatgcacatattcaggaacagcttgtttagtctttacactttgcctgaaagttgcttctcctcgtccctttgtgtgcctgggtggcctcggccctgtgcgttggcaacgcaggatcaaatgtgctgcagcttttgcagaaaacaactcagaaacacaaaaccccccaacagctcaattattattttttcaatgttttcctacaagagccaagtagcaccatgtacagaagacgcctttttttttggaatattgaaatcgttctgcatgtaaaatatgggataatgacctgtttatattaaaattctgattaaattatctg

SEQ ID NO: 47627 - DNA, 498 bp, Homo sapiens
ggtccaggcctgcaagacttgcctagtgagaagatataggaatgggaacccaggtaacagtctggccacttttccatagggctgctgcagtatgcccagggcccgctccagtctctagtagcctcagattttccagtacctggagttatcatcagtgaagcctgtgaaacagcaaagatggcagcctaccgctccctttggaagctttgccctagggaggtatgaatgaacttgttgctggcccaaacacacctgtaggaggtggctggagaccccagtttggaggttttgcccagtgaggaggaatggcattgggaaagtgcttaaaaaagcagtctggcctcatttttatagagcagctgtgctatgctgagggtccacatcaccccctggtctccttggacactccaaagactgaaggttgaagtggctaagttgcaaaaacagcaaagatggtggcatgcccctccatcagggagctccagcccagaaaaaatt

SEQ ID NO: 47628 - DNA, 990 bp, Homo sapiens
ttttttttttaacttgatcaataccacagtttatttgtaaacatgttatatgtgtcaataatcaaattgacaacactttatagatttcattgtataatattaacatcctaacagaaaacgatccactgtactcagttacagtttggtattttaaaatccttaaatacaaattgtatttgaaacactgaacacaaaaaagaaacatgaatggcagagaaaactgaaaacaacaagtaaaagaaaccaatattccgctcccctgaaaaaaaaacataaaatcatctgattacataatttaaaaaagaaacaaaggaaatcagatgacattttttgatataaagttgcatttcttcaaatccattttagaggtgaaattgtatcaatattaaattctatgtcttttttgatatttgttctttctttcctcttggtttctaaagaatgtttgccagggtttaaattacattaaggaagcgggaaaaagaaaggaaggaacatggtaaaaagccaaatgaaattaactatttgcaaaataattggacgtaaatttttcatgaatcttctttggcaaataacaaagtctgcattttaaatttacctttttgttgaaatggatcaatgcttgtaagatttaagagattacatgagttaatgtataagtaaaacaaagccaaattcacaaagcaaggcgcaaacatcagcttttcacattttgctaaaagctctaaaaatgcactctccctccttaagaggaccagaggtcttcagctcggaatcagatgattacccttgcctcattcaacacaagaaaccagaggggaccccatggttcttcggtactttccctaaaattcatgatcactattaggttctatttcttcctcctttctctctcaaaggaaatatagcagcaaatcattcccatattttaagctttaaattcaccaacaactgggttcactgccaacaactacaaatgttcaattctgt

SEQ ID NO: 47629 - DNA, 1039 bp, Homo sapiens
gagtatttatatgtgagactacttgtacaaacataaaaatatacaaaagctattgtctacttgaaatttatagttaataaaagcattataaatgtaatttctgttgaaagaccttttagaaaatataggccattaaagtgaagaagagtattcttaagacaaacattacaaataaaagagggttgtaatacctttatttgtatcacagatcttattgtacacattttgtactagagaaaaccctgaagcagttgcttaaactttgttcaacatcagagaatttatattggagagaaatcctacaaatgtaataaatgtggaaaaaaagttttccaaaactacaacttagacaacaccagagggttcatactgagatatatttttgcagatgcagtatatatttaaaacatttaatccaaaattaagactatgtaaacatcagaggatttacagtagaaagaactaaggaactaacacttcagactttaaaataaatcagagtattaagtataacaaaagttgaacctgttagaaaatttccttgtatataagttgaaaagtaggtttttgaagagatatattcgaaatatattttttcacttgaaaaaagtaaaaatttttttcaaaaggcaaataattcaactctaaaattatactatttcaacattctcatttatgtgaaagcatgtgataaattgttgctgcgtcagagatatgagaaattccctttgccattagggtggggcattattccatagacttctacatgaaagagaagagaaataaaagatgcacccaggaaaatcctgagcagagaggcttttagtggttgacttactgagtgatgcctgaagtaggtgttcagagtaatactttgcgttatactgagagagaatctgaattttagtagtaaattgttttgccaactgtatatttatgtaataagtgcaataaaatgcagtaaattttaaaattctcttaagataatgtgtgaacttaatttttgaaataaaaattgttattgtgttaaaaaaaaaaa

SEQ ID NO: 47630 - DNA, 1353 bp, Homo sapiens
taaaaaggcacataaaaatatttttattttctataaatacattaggaaatgtatttcttcccaacccagtccaccccattaactcaattttttctacataaaaaagatgctaataccaccctcacctgtgactgctaaacagagaaagattgcctggactaggcattatcctcctagttggaaataaaggccctttctgggggcaggaagtgggattttcaggggaccctacagacgtaggcagccaagagtcaaacaaaacaagcatatgcaatagtcataattatgctagtatgacagtatgaattaggtgactcagccaggcacatacaggagttcggagtggggacagtggaagcccacaaaactccatgtttgggccatcagtagacacttggtctgagaaacacagtaaaatgtctgcccgggtagtcacgatcattctagtatgaggtagacaggaagcagagcagggccaggaaatggaaggggccacccagggcctcaggagtccctgacaaggggaaggtccctccatgctctctgagggtggcggggctccaaagatcctgccaggagcccttttttggagcgggccttgtcctgggcagttgccaggcgagcccgttcacgtccccctggccgtgctgctttacgggccctcagttcctgctcagtaggacgctgggcaaatgtccaggagccatctgggcgagcagggtccccatcggccgcaagaaagcgttgtccccgttccacactttgaagatagaagtcggtctcacgcttggcttgagcaacctccgctctcaagcgctgcctgcgcacctggcgctcaaaggcgaggtgctcgctgaggtgggaccaggtgaaacggtgcaagtacttgaggttccaaagatcataacggaaaggggctgcgcctgcgggcacccataggcgtgttgtgtagactggccgccacgcgcttggctatgcgcttgtcacggaactccacccatccctcggtgtagtccttggtgtaggaccgcttttttcctccggcagctgctgctgccttcttcttgcgtctcacgaaccggtcctcagcctgaaagaagacgcgtccgacctcgccataggcgctgagaaggttgcggacgtgcaggggccggaagcgcggcgggatatggcccaggtacacaatacctggcactacccgcttcttgctgccacaggccgcttcttcggattcctcctgctcctcctccgcatctagtgtctgttctgtcccttccagcggctcttgctccgttgcggccttctccgattcctctgcctccatgttgactgacacgagcggcctcgtgccgc

SEQ ID NO: 47631 - DNA, 815 bp, Homo sapiens
aaataaagaacctgcgagtgagttcccacacgttttcctaatgggctgctgctttcctaggagtctctcgctcatagaaaaggcacacactgaaagaggaagcagatcccattgctgtggaagtcccattgttaggaagctctgcttttctggagttcaaattcgcattcatgatgctttaaaccgtcagagctgggtgggtcctcctacaacaaaatagtttgctctctctctcctagttaacaggctttcaaatattagaagatcaatgttctgaccccattaaaatttctcttttgtggaatgaaaagctctgatttaacccatcttcaaggctggtttgatggaggaataggggctgagtcacctgcatttcccctccctgcacaaagtcctgggcccagatctggggtctgtctctgctgagggtggggtgaaccaggaagcacctccttcttcatctccttgatgaatgggtataatggttgccatggaactggggcttgtttgatgacctggggctgggtgggcctctgagagcctttatagctgattgccttttgggagagggcaggtgggagccccaccctgtctcatgagtcaccccaaaggtgcatgggcaggcaggtgctggggaatcggctactcctccagagcttggcgtggccatccctgtggcccctctgggagtctggagcccattccctcacgctggtactcactgcagctggggacatctgcactaggaagacaggacacggcatggaagctgcctctgcccagaagccatgacattctggtctccagccctatgc

SEQ ID NO: 47632 - DNA, 742 bp, Homo sapiens
ggggtttctccatgttggccaggctgttcttgaactcctgacctcaagtgctccacctgcgttggcttcccaaagtgctgggatacaggagtgagccactgcgcctggctgatcccagcacttttcaaatgatgccgctcaaagccgtgacttggcctactttgaacagcaaacttgttgctgctgttgtcaacctgaaggcctctcaaatgccagcttcaagcagggtgtgaattggccagtgtcagatctcaggagtcctctgttgagagtgtggctttcagctgcggggagctgcacttggtggggaaagccaggcaggtcaccctcacagccagataatgtggaggtcagaacccaaggaagggagtgagacctccactcccagtgggggacctggccacccatccttggggacctgagaaagcgtacttcaccttggggtgaaggctgggtggggccagagggaccagtgccctcctcagtgcttaagggcagagccacctgcagcaatggtatctgcatattagcccctctccaccttctttctcccgctgaatcatttccctcaaagcccaagagctgtcactgcttctttctccctgggaagaatgcgtggactctgcctggtgatagactgaagccagaacagtgccacaccctcgccttaattccttgctaggtgttctcagatttatgagacttcttagtcaaatatgagggaggttggatgtggtgcttg

SEQ ID NO: 47633 - DNA, 2140 bp, Homo sapiens
  misc_feature (1)...(2140): n = a,t,c or g
gcgttttcgaggcttgcccagtctcggacaaaccctcaggtcctggacactggcctgacagcccaggacatgcattacgcccagtgcctctcgcctgtcgactgggacaagcctgacagcagcggcacagagcaggatgacctcttcagcttctgagggcccggggccagccggacacaagcggccctgacacgtgatggaccaaagccacctgctgcgggggagccagttctggggcccgcctgccacctctcccagccctcagcattgtcagcctgaagatcagagctgcagccagtcaggcaggggagagatttttcttttaagccctgctctttctctgagaaccaaaagatgccttgaatatttattcagtgacttctggcttatgctcagaagccagtctgcgtcaggcacgtctcctgctgcgtgacatgtggcagtgctgtaatcggctcccgcttgctctcctggagcaagctctgccctggctgtgggtatcaggactgtgaccaaagcatttctagtcccttctctctttctaaggacccaaatttccctgggggcatcctgcttcctgaaagctgttggatttcagtgatttttccccccaccccccagcacaggagagcacccacagccgcagaaggggaatgtgtcctcctgctctgctttcctcagggccccagcaggcggggggtttgagccctgggaccccaggcttctctagagacttaagggggnagcttcttgaccaaagacggttacaagtttggcattttaaagcattaacagccaggtgtgaccctgagggctcctccatggtgctgcattgagtccagctttccttctgcccttcctccaggagaaggggcccaaggtccccgtggatggtctccacctgtgcttggaaccagtgtaactggctgctccctgctcccagggactgacacggggatcatctctgtgaccgccctccgtcgggcccctgcctgccttctcccctccacgcaaggctgtgctcttcctctggtttctgtgtgtccgtttgagtgtctgcgccccgcctccccatacttcctgggatgatgtgtgaaacctgacacctagatttatttggaaatattctatgaccactttacagatgaggaaactgaggcctcaagcgtggaggggtagagtgaagagtagaacccaggtctgatgccaaagctgctttcttctctgcctcctcctcacgcaactcacacctccttttcttctagctttgttgtcctcccaggaaccaaaaaaccccagctattttctgaccaaaatgtgtttcataacaaaccatctggtgcctttccacacagaactggcaggagcctcgtgtcctgctagctgtctctcttgttgatttccgtgaaaatgcaagtgtttgaagtctgctcattccgagggtgaaacaaaatccaaccctgtcagaatcatgctgttctctttgctgacactgtgaccctgggtcgggacagaccagcagcaatctgtctttagaatcgctttgccttcctccccttttgcccccgtggggctcccggcatcctgaaagccagcaaagcctccagcatcttttccatcctgaggtgcctcccagtggcctggcttgtcggagcaagtttcatcagccctagggaaaacacggccctcctgggaacctccttacctggagtaaccggacaccttagacggaggtgcctgagggtggggtgggatttgcagggtcattatcagaacatgaggataacttccttgcccctgctctgtagccacctccttggcaccggcctctatttgtcataaggcggcgtgggcgaggcctgacacaggccagccttggcacgaggggggccaggggttctgagaagcgctgccctgtgagagccatgctggccttcgtctccatctctggttgacgggctgtccgtgtgcctcctgtgtgtctgcagacacacaggagccacgctggccttcgtctccatctctggttgacgggctgtccgtgtgcctcctgtgtgtctgcagacaagtcttgctgtgctttatttgtgaaactttaatgaggaaaaaacaaataataaatgttctcgttttgaaactc

SEQ ID NO: 47634 - DNA, 740 bp, Homo sapiens; identical to SEQ ID NO: 5465

SEQ ID NO: 47635 - DNA, 690 bp, Homo sapiens
gttgaaatctaaattggctgttctcagtgtttgccactgtctcttgaatctcttttatctctttctttgtttctttttgagttttaaaagttgttattgtaccacttttgttttgttttgttatttaaaataggaacagtgtctcactgtgttgcccaggctggtcttaaactcctggcctcaagcgatcctccttccttggcctcccaaagtgctgggattacaggtgtgagccaccaaagccggccccaccttgctttttaaaacagctctgttgaggtgtaactgacaggtaatgaactgcacatacgtgaagtgaccgatgcatttgcctgtgaagctgtcgccagaacatgtccatcaccaccaacagcagtttcacaccccggtctaaaccgtccctcgtgtcctccatgttcaggcaaccactggtctgctccctctcactaaaggttaatttatatattctagaattttatctgagtggaatcgcagagcaagtactgtggggggaggtgcttctactcagcataattattttggcattcacccattttgtgtacatcaataatccacattttgtattgcatggatataccacagtttatttatttacctgttgaccgatatttcgattatttccaatttctaaataaaaataaagcaaataaagctgccgtgaacatttaa

SEQ ID NO: 47636 - DNA, 1267 bp, Homo sapiens
cggacgcgtggggtggcccgtaagctgggctcctccgggggttggtttttaagagtgctggggcctggaggctgtaatacaaaagctgcgcgtcccttaatttcctcggcggtttatgtgaagaaccagctcagtgggactctacagattaaaccaggggttttcaatgaatacagaaccatatggttcaaatcctacaggacgatcttttcctgtttgaacagaataaagagtttcaggtacccttgggcgagactgtacagtacttcccaaaccactgtcgacagcggtgaggtaaaaaccttcttggccctggctcacaaatggtgggatgaacaaggagtatatgcacctcttcattccatgaatgacctgagggtgccatttattagggacaatcttctgaaaacaattcctaatcaccagccaggaaaacctttgttggggatgaagattcttgacgttggctgtggtggtgggctgttaactgaacctctagggcggcttggggcttcagttattggaatcgaccctgtggatgagaacattaaaacagcacaatgccataaatcatttgatccagtcctggataagagaatagagtacagagtgtgttccctggaagagattgtggaagagactgcagaaacatttgatgctgttgtagcttctgaagttgtagaacatgtgattgatctagaaacatttttacagtgctgctgtcaagtgttaaaacccggtggttctttattcattactacaatcaacaaaacacaactttcctatgccttgggaattgttttttcagagcaaattgcaggtattgtaccaaaaggtactcatacatgggagaagtttgtttcacctgaaacactagagagcattctggaatcaaatggtctgtcagttcaaacagtggtaggaatgctctataaccccttctcaggttactggcattggagtgaaaataccagccttaactatgcagctcatgctgtgaaatccagggtccaggaacacccagcctctgctgagtttgttttaaagggagaaacagaagagctccaagctaatgcctgcaccaatccagctgtgcatgaaaagctgaagaaatgaattgtttctgagaactatagtaatatggcttggatatctgatgttttcaaatacaagaaatgtacaatttatcctttgagagagaatcatgaagaaaagaaggtcaataaaaagggctaaaaccttgaaaaaaaaaaaaaaaaaagttcta

SEQ ID NO: 47637 - DNA, 2103 bp, Homo sapiens
  misc_feature (1)...(2103): n = a,t,c or g
catgccaatgccttcatactgagttctgggcccctctgcaaataagtctgagaagccccttctctccttcctttatcgtggcctatgctgcagaatctcactgcagctggcaaaaggcattggccagctctcagaaatccctttactcaacgttgaagctgcattttggtcaatgtgggtaacttactttagaaaatgacttgagtttaggtctcccccacccatatttaatttttcccaagttgctggtagaagagaaatttaaaagtggatcaatcctcacagagagagttctttttgttgttgtttattgaaaaaaatgcaatacaagaagcaagaccaaacagatatctaaacactacaaccacttctactacgaaaggcccaaaacccgcagacttgattattgcctgtgtagtctaaagattctgccaatctgattctgctgcccgagttcctattttttcaagaaatgtaaacaactacttgatatgattcataattttaaaaaaaatttacaaagctccttcatttttgtcacccaaaataatacattttgagagagatttgtagaaacaaccagcctggggctgagatcctgggcagaaatttccccgtgagcatcaaaaggcgtcagtcaggccgcagctctggctccagttccccgaggtttgttgtctcctcacccccagctgccaagcatcccccccaacacacactgatgggcccagcggtggaggggggggtggggacggggatgggtcacggggccctgacggggtcccgcagttaggctccctgagccctcggcttataaatacaggtcttgctttgtgggtgggtgccagagtcctcatgtggcttggaggaaatctttatttctcaaattaaaataaaattgcagcgagagttgttactgtggtgtgtctgagtcactctaggaaaactgttgccaagtttctgaccctggaaatgtaattctcttccccctcctcaccatttctacctggacagagtctgtttttcttcacacaaacacacatacacacaactgcagaaagaaaaaaaatccaaacaattgccaaaccccaagaactgttgccagagatggaggaaaggggaagaggcctggaaggacacccatcttgctgggcttgtccaaatctatggcttctaagagcctgaaaggcattagagctcttttcatccaatttacagacaacgaagccgagagaagtgagttggtgacagagctgagggaaacgtttaggcccccgatgaacggtcctgtgctgtgaaagctgccacactgttctagatcacacggaatattcagtgtgttagtttttaaagggacactcagtgccctctgccttttccccatcctcttcgttccacaggtctggaagccctggtagctcttcctaacaggccatctggccatcaggcagtgggcatgcactacatgttcgtttgatgtaagctgcatttcttgtcaccactcctggcaacacgaccaggcttgggcactaccccaaagcccacctttcagaccctctgcccacagcctataattttgttcctgagataggacaagctctttcccctaagcctgtcccacgtcccacctgggctctttccctccctcctgttgttcatgtctcacatgggtaccaaaagaaaaatgcacacacccgaaatgagttcaaaccagccgaaacaaaactcaggcagtggagactttggacggtgttgggagaagcagctttagacatttctcttgctcactgcccttgagccccagtgactgctgcccgatacccactgtctattttaggaagctggaactgggattctaaggagccttgaggccaatgtgtttgtgggaagcagttggaaggttagagaagttctgttaaataaaaatgccccaaatcggccgggcgtggtggctcacacctgtaatcccagcactttgggaggccaaggtgggtggatcacctgaggtcaggagttcgctcgtgccgaattcttggcctcgagggccaaattccctatagtgagtcgtattaaattcgtaatcatgtcatagctgggnttcaa

SEQ ID NO: 47638 - DNA, 1395 bp, Homo sapiens
tttttttttaaacggtcaacacaagtttatttattctcacataacaatactgagtggatatttaggtcagtaaggcacagttctcctccacttaggaatctcccatcttcaggccttgccttctccagagcctggtcaccatctgcttccagttggcagaaggagtaacagcacaggggagcacctgttgggaggtctgtatgggccagggcctgggaaactgcacacctcttctggttcactttccgctgggggagagcatagggcacagagccacacttaaattttacctttgagggaatgcagtgtaaggtgtatgtccgacaaaggaaaacaataatttcgggtaggacaaataagtctccactccaatatttcaatttactttactttaacttatggctctgggtatgtctcaaattaacctagatagaaatgaactctgaatcttccacttccatcaagtttttcactcactcaatggcatcattatccatccagttgcttaagcatacatttgaaagttatccttggtctgtttcttatccttcccttccacatctaatccttcacgaagtcctgacaatgttacctccaaaatatgtcttaaatccatcttctcaagcccaggcaccgggtttgcacggcctgtaatccccagtacttttgggaggccaagggagggtgaatcacttgaactcaggggttgggagagcagccggggcaatgtggagagacccaatctctcagcatcctgtttatgttcttcttagcatcagactcgggctttttcctgtttattacctacttcgttttcctgaaagatccatgtgccggtaccatgtgttgttcctactgtttctccaatgtctagtagatttggcacatactgatgtgcaattaatacgtgaatgaagaaccattgacagacgattagtcaaaagctccttgcaaagcccctttgaataggttatcggtggagaagtagggagcacaaacctggggtccccattcctagcttgacccacttcctcggctgtgcaacaaactagtctagctctcctgagcctcagttacctattttgcaaattagggatgggaacatccatacctcacgacgccaaacggctaccttgtaaagacgaaaggaggaaatgcaggaaataactccacgtaaggttaatgctccgtaaacagagctgctactgctattatatattctatacaatcctgcgcccttaacggcaggaccctttcagtgcttcagtcctgtcttctctctcctgggttgacctccacagatcctctcagaagagcgttttccaggcgtgaatctccgcagagtggagataaaggctgaggccccaacgcacgcgcactcacgcgagtccgggc

SEQ ID NO: 47639 - DNA, 1636 bp, Homo sapiens
ttttttttttttttcctctaaaatacttagctttattaaagacatggtactaaaaataacagattccaacatttgctctatttctacttatatatcataaataagacagctgttgatgcaagacacactctttcacaatctttccatatgcacccaagcattcttgtatcagaataagctgtttaccagccaaccgtatgtggctgaatgattaaaatgaccatctatactttacatagtaaagcatcttccaaaattttaatgtacacagtgacaaaaaggaaaaacaaacaaaaaaaacagtaattctgaacacatgaagagtgattaagcagcttcataatcaaatcaggcttcattacttgcaacaagggcaactctttccattccccactaaatactaaagtttcaatcttattaacattaaaagaaaactcaagttgaaaccaagtaactaacatgctattcagctttttagatctaaaaaagtaactcttcccatgaggtaaggcaactgagtaatctgattgtattagattgcattaaaataattatacttaacttttaatacactaattaaaaggtattacttttttggaaatacaacaataatgagttcagaaaccacaagttatagtactggggaaaaacattagcagtgctgtcactttactatttgcatactttctgtaaaaagtgagcctaagaatgatggatgacctgtatcttaaactcaagtaaacgtatccttaaacataaaaccaataacctcccatatactcctaagtccttaagtacaatttctgcacatcatttatgaaaagatgattgagaggtaataaggccatccaatgtagacaactaaagggttttcttcaatttaaggaaaataagaacatgtttcattttcaattatcacagtataaaactgatggtcccaaagctgcatgactctaatgtcattcttgaaaacaggacttccttctcattttaggtgaaatcagtaagaagctcttctgacatatcacttacacacttctctatgggtatgcatgaaatatccatctagattccatatgaattgagaatgactagcacatataaaattctagaaaacagtataccacattgtagaaggcactaaagcttcagcttgtgctcccatagcccattttgaaaagccagtttccttttttataagggcacctttgccacctacagctgacaagacacactgcaatattattcataataagcttggaaatgtcaagaaaatttaaaaagaaatgctcactttgtgggtagtcccaatgattctaaacactgaatactaattcatcattattagtattcaacacggttgctcttccttttgaaagagaacagtagcatgcattgtcagttttttaatccacttatttaagcaattttaatctgcaaaactattttaaagaaaaattgtcctaaacagtgagcaaaagaaaacacaatagtgagaatttaacacaatcacaagtcctgtgaagtaaatgttaaaacttcttacatactttgcacttacaagggtgtgtatatatttgcaccaatttcaagcacatcatcaaactgtatatattgaaataaaaaaaagtaaaac

SEQ ID NO: 47640 - DNA, 5909 bp, Homo sapiens
cggaggacagccggaccgagccaacgccggggactttgttccctccacggaggggactcggcaactcgcagcggcagggtctggggccggcgcctgggagggatctgcgccccccactcactccctagctgtgttcccgccgccgccccggctagtctccggcgctggcgcctatggtcggcctccgacagcgctccggagggaccgggggagctcccaggcgcccgggactggagactgatgcatgaggggcctacggaggcgcaggagcggtggtgatggtctgggaagcggagctgaagtcccctgggctttggtgaggcgtgacagtttatcatgaccgtgttcaggcaggaaaacgtggatgattactacgacaccggcgaggaacttggcagtggacagtttgcggttgtgaagaaatgccgtgagaaaagtaccggcctccagtatgccgccaaattcatcaagaaaaggaggactaagtccagccggcggggtgtgagccgcgaggacatcgagcgggaggtcagcatcctgaaggagatccagcaccccaatgtcatcaccctgcacgaggtctatgagaacaagacggacgtcatcctgatcttggaactcgttgcaggtggcgagctgtttgacttcttagctgaaaaggaatctttaactgaagaggaagcaactgaatttctcaaacaaattcttaatggtgtttactacctgcactcccttcaaatcgcccactttgatcttaagcctgagaacataatgcttttggatagaaatgtccccaaacctcggatcaagatcattgactttgggttggcccataaaattgactttggaaatgaatttaaaaacatatttgggactccagagtttgtcgctcctgagatagtcaactatgaacctcttggtcttgaggcagatatgtggagtatcggggtaataacctatatcctcctaagtggggcctcccatttcttgagacactaagcaagaaacgttagcaaatgtatccgctgtcaactacgaatttgaggatgaatacttcagtaataccagtgccctagccaaagatttcataagaagacttctggtcaaggatccaaagaagagaatgacaattcaagatagtttgcagcatccctggatcaagcctaaagatacacaacaggcacttagtagaaaagcatcagcagtaaacatggagaaattcaagaagtttgcagcccggaaaaaatggaaacaatccgttcgcttgatatcactgtgccaaagattatccaggtcattcctgtccagaagtaacatgagtgttgccagaagcgatgatactctggatgaggaagactcctttgtgatgaaagccatcatccatgccatcaacgatgacaatgtcccaggcctgcagcaccttctgggctcattatccaactatgatgttaaccaacccaacaagcacgggacacctccattactcattgctgctggctgtgggaatattcaaatactacagttgctcattaaaagaggctcgagaatcgatgtccaggataagggcgggtccaatgccgtctactgggctgctcggcatggccacgtcgataccttgaaatttctcagtgagaacaaatgccctttggatgtgaaagacaagtctggagagatggccctccacgtggcagctcgctatggccatgctgacgtggctcaagttacttgtgcagcttcggctcaaatcccaatatccaggacaaaggaagaagaaacccccctgcactgtgctgcttggcacggctattactctgtggccaaagccctttgtgaagccggctgtaacgtgaacatcaagaaccgagaaggagagacgcccctcctgacagcctctgccaggggctaccacgacatcgtggagtgtctggccgaacatggagccgaccttaatgcttgcgacaaggacggacacattgcccttcatctggctgtaagacggtgtcagatggaggtaatcaagactctcctcagccaagggtgtttcgtcgattatcaagacaggcacggcaatactcccctccatgtggcatgtaaagatggcaacatgcctatcgtggtggccctctgtgaagcaaactgcaatttggacatctccaacaagtatgggcgaacgcctctgcaccttgcggccaacaacggaatcctagacgtggtccggtatctctgtctgatgggagccagcgttgaggcgctgaccacggacggaaagacggcagaagatcttgctagatcggaacagcacgagcacgtagcaggtctccttgcaagacttcgaaaggatacgcaccgaggactcttcatccagcagctccgacccacacagaacctgcagccaagaattaagctcaagctgtttggccactcgggatccgggaaaaccacccttgtagaatctctcaagtgtgggctgctgaggagctttttcagaaggcgtcggcccagactgtcttccaccaactccagcaggttcccaccttcacccctggcttctaagcccacagtctcagtgagcatcaacaacctgtacccaggctgcgagaacgtgagtgtgaggagccgcagcatgatgttcgagccgggtcttaccaaagggatgctggaggtgtttgtggccccgacccaccacccgcactgctcggccgatgaccagtccaccaaggccatcgacatccagaacgcttatttgaatggagttggcgatttcagcgtgtgggagttctctggaaatcctgtgtatttctgctgttatgactattttgctgcaaatgatcccacgtcaatccatgttgttgtctttagtctagaagagccctatgagatccagctgaacccagtgattttctggctcagtttcctgaagtcccttgtcccagttgaagaacccatagccttcggtggcaagctgaagaacccactccaagttgtcctggtggccacccacgctgacatcatgaatgttcctcgaccggctggaggcgagtttggatatgacaaagacacatcgttgctgaaagagattaggaacaggtttggaaatgatcttcacatttcaaataagctgtttgttctggatgctggggcttctgggtcaaaggacatgaaggtacttcgaaatcatctgcaagaaatacgaagccagattgtttcggtctgtcctcccatgactcacctgtgtgaaaaaatcatctccacgctgccttcctggaggaagctcaatggacccaaccagctgatgtcgctgcagcagtttgtgtacgacgtgcaggaccagctgaaccccctggccagcgaggaggacctcaggcgcattgctcagcagctccacagcacaggcgagatcaacatcatgcaaagtgaaacagttcaggacgtgctgctcctggacccccgctggctctgcacaaacgtcctggggaagttgctgtccgtggagaccccacgggcgctgcaccactaccggggccgctacaccgtggaggacatccagcgcctggtgcccgacagcgacgtggaggagctgctgcagatcctcgatgccatggacatctgcgcccgggacctgagcagcgggaccatggtggacgtcccagccctgatcaagacagacaacctgcaccgctcctgggctgatgaggaggacgaggtgatggtgtatggtggcgtgcgcatcgtgcccgtggaacacctcacccccttcccatgtggcatctttcacaaggtccaggtgaacctgtgccggtggatccaccagcaaagcacagagggcgacgcggacatccgcctgtgggtgaatggctgcaagctggccaaccgtggggccgagctgctggtgctgctggtcaaccacggccagggcattgaggtccaggtccgtggcctggagacggagaagatcaagtgctgcctgctgctggactcggtgtgcagcacattgagaacgtcatggccaccacgctgccagggctcctgaccgtgaagcattacctgagcccccagcagctgcgggagcaccatgagcccgtcatgatctaccagccacgggacttcttccgggcacagactctgaaggaaacctcactgaccaacaccatgggggggtacaaggaaagcttcagcagcatcatgtgcttcgggtgtcacgacgtctactcacaggccagcctcggcatggacatccatgcatcagacctgaacctcctcactcggaggaaactgagtcgcctgctggacccgcccgaccccctggggaaggactggtgccttctcgccatgaacttaggcctccctgacctcgtggcaaagtacaacaccaataacggggctcccaaggatttcctccccagccccctccacgccctgctgcgggaatggaccacctaccctgagagcacagtgggcaccctcatgtccaaactgagggagctgggtcgccgggatgccgcagactttttgctgaaggcatcctctgtgttcaaaatcaacctggatggcaatggccagggaggcctatgcctcgagctgcaacagcggcacctcttacaattccattagctctgttgtatcccggtgagggcagcctctggcttggacagggtctgtttggactgcagaaccaagggggtgatgtagcccatccttccctttggagatgctgagggtgtttcttcctgcacccacagccagggggatgccactcctccctccggcttgacctgtttctctgccgctacctccctccccgtctcattccgttgtctgtggatggtcattgcagtttaagagcagaacagatcttttactttggccgcttgaaaagctagtgtacctcctctcagtgttttggactccatctctcatcctccagtaccttgcttcttactgataattttgctggaattcctaacttttcaatgacattttttttaactactatattgattgtcctttaaaaaagaaaagtgcatatttatccaaaatgtgtatttcttatacgcttttctttgttataccatttcctcagcttatctcttttatatttgtaggagaaactcccatgtatggaatcccactgtatgatttataaacagacaatatgtgagtgccttttgcagaagagggtgtgtttgaaatcatcggagtcagccaggagctgtcaccaaggaaacgctacctctctgtcccttgctgtatgctgatcatcgccagaggtgcttcaccctgagttttgttttgtattgttttctgacagtttttctgttttgtttggcaaggaaaggggagaagggaatcctcctccagggtgattttatgatcagtgttgttgctctaggaagacatttttccgtttgcttttgttccaatgtcaatgtgaacgtccacatgaaacctacacactgtcatgcttcatcattccctctcatctcaggtagaaggttgacacagttgtagggttacagagacctatgtaagaattcagaagacccctgactcatcatttgtggcagtcccttataattggtgcatagcagatggtttccacatttagatcctggtttcataacttcctgtacttgaagtctaaaagcagaaaataaaggaagcaagttttcttccatgattttaaattgtgatcgagttttaaattgataggagggaacatgtcctaattcttctgtcctgagaagcatgtaatgttaatgttatatcatatgtatatatatatatgcactatgtatatacatatatattaatactggtatttttacttaatctataaaatgtcgttaaaaagttgtttgtttttttctttttttataaataaactgttgctcgttgcattaaaaaaaaaa

SEQ ID NO: 47641 - DNA, 2700 bp, Homo sapiens
gagataagagttggtgctccagaaaaaaatttctcttctagtggaaataagtgcccctacccccagccggtcagctaattctctactgacagctgagacctcctactcaagtgcctgttgccttcaggtatagaagaggtttcctgaagaaacagacctaactgtacaacagcagaggaaacccatgccaactgttatacaagttaacagttatgttgattcttaaatgggaatggtgagttagaaattcccagacatgggcgatggggagggaagaggaataagaaaagtcacgaggtagaattaggggccttgaaaatatgacaaactctgagggaaacaaagacaatgtggaaagaataacttaattttaattccatctccagagagatttgaggtgtatttaagatgaaaaacaggatactacaaagaaacggaaaactcaggagttcaagaccagcctaggcaagatggcaacatcccgtctctacaaaataatttttaaaaattagccaagcatggtggcatgtgcctgtggtcctagctacttgggaggcctgaagtgggaagatcaccttgagcccccaggagtttcaaggcttcagtgagccatgatggtgccactgcactcccagccctgggggacagagtgagaccctgtctcttaaaaagcaagaaaagaaagagaagactgagaataagaagatctctttgaaaataaaataagactgctaaaagtatttggtatacagtctggaaaataaagttgagggaatctctccagataaagagcaaaaagaaatagatagaaaaatataaagaaagaaaaaagacatagacaatcaatatgtaatgttaggagttcctggaagagagaacagagacagtgtaggtgaagaaataaaaagaaaaagaattgaagaacagagcaagctaagtctccagattgagagggcccaatacaatctacatctagacacaatattgtaaaattttggaatattaaggatagaaggaagatattaaagtggccagggagaaaacaaatgaggtcatcacgattagctcaacacaaaaatggatgagaaatagactgctaacagatttgtcatcagcaacactgaatgccagaagtcaatgggatcaacatcttcagagcttaaggaaaatttttgtacctagaatttatagtaaggcagactgtcaagaagaacatcaaagtgaagacattttctgtcaggcaaattttcagaaagtctcctttgcacccttactgaggaagtatcttgaggaaattctccagcaaaatgaggatgaaaaccaggaaagaagaagaaataggatccataaaacagtggaccttacttaggatgtctcattctagagtgacagccaaaagggtatctcaccctagagtgacagctatccagcagactaatttcagatgagagcatactgtctcgggctttctgggaagaatgtgcattcagtgccatagatagtatcattgaagagctgggatgcttgagaagattatttagtcaagaaaaaagaaagacaaatcaacaatatgtcaaaaaattcaggtccaattatagagcaaaataaaatgaggcatgattttgagttattcatgaagaataagaagaggcttgataggtacatttccttttctatggcacaggcatgatgatattgggtgtgtagggaagaaaatatcctagcttatactaggctcccagtaagaagtatttaaatagccaaaataatgtggatatcatttattagtattcaatgttcagatcagcctattaacaaagtgtgaaaggtttcattttttattcagaactgaagttgaaagtaattaatgctgacaaagggaaagaaagcagaaagagattgagaattagaggaagagaagtggaatcaaaggtagagatacttatatattcaaagtggggatgaaaagatcttcagttaatggaacaagaactagaggattagtgtattgttcaaagctataaaatcaaaccaatagatgtattaaaaagtgatgtaactatcagacatttggagagagatggacaaaggaaagtggcgatagtgtaagttaaatccttatcttttgtaatggggaattattaaagatgttgtaaagtcagtaagtcaagaaattattgctcaaacatattatttaaagttagaaagttaccagacgatctaaaataaatattgttaaaagcattacctctagggaatgggatttagatttaaaaagggtgggatgggaaactgtgtttttcattttaagtccttctgtactatttaattttttaccttgtgcatgtattactttgaaaaaatttttaataaacccaaataaaaatcttccagtgacttcccattgattaagatgcaacccagctaaagcctttaaaatggttttcaaggtcctcaagtatctaggtccacttgatgtgtccaggctcatgatatctccccacaagtctctatttccagccagattaagtatcttccagttattaaaacacacttcacattcttttgtttgtataggtgttccacaaaaaacaaagcctactgctgatctcaccatgtctgctgagtaagcttaccatctagtgggttttaatatttgttgaatgaaggaatgtccaatacagcattgaatgaagtttg

SEQ ID NO: 47642 - DNA, 450 bp, Homo sapiens
  misc_feature (1)...(450): n = a,t,c or g
tgnnttnnncntcngaaaccctttgacatgacacgaatttaatacgactcactatagggaatttggccctcgaggccaagaattcggcacgaggtctgtcaacctcttggtcagcgccaacggcaatgtcctgcgcagcgagatcgtgggctccatcaagatgcgagtcttcctctcgggcatgcccgagctgcgcctgggcctcaacgacaaggtcctctttgacaacacgggccgcggcaaaagcaaatccgtggagctggangaagggaaagttccaccantgggtgcggctatcacgcttcgagaatgaccgcaccatctccttcatcccacccgacggcgagttcgagctcatgtcctaccgtctcaacacccacgtcaagcctttgatatggatcgagtcggtgatcgagaagcactcccacagccgcatcgagtacatgatca

SEQ ID NO: 47643 - DNA, 2173 bp, Homo sapiens
ccacctctccgagctcttctgcccctgcatccccatgttcgacctggaaggctcgctcgacgaaactggactcgggccttctgttgggttcgacactctccgaggaattctgatatcccagggaaaggaggcggctttccggaaagtagtacaagcaactatggtacgcgatcgtcagcatggccccgtcgtggagctgaaccgcatccaggtcaaacgatcaaggagcaaaggcgggctggccggccccgacggcaccaagtctgtctttgggcagatgtgtgctaagatgagctcgtttggtcccgacagcctcctccttcctcaccgtgtctggaaagtcaagtttgtgggtgaatctgtggatgactgtgggggcggctacagcgagtccatagctgagatctgtgaggagctgcagaacggactcacgcccctgctgatcgtgacacccaacgggagggatgagtctggggccaaccgagactgctacctgctcagcccggccgccagagcacccgtgcacagcagcatgttccgcttcctgggtgtgttgctgggcattgcaatccgaaccgggagtcccctgagcctcaacccttgccgagccctgtctggaagcagctggctgggatgagcctcaccatcgcggacctcagtgaggtttgataaaggattttattcctggactcatgtacatccgagacaatgaagccacctcagaggagtttgaagccatgagcctgcccttcacagtgccaagtgccagtggccaggacattcagttgagctccaagcacacacacatcaccctggacaaccgcgcggagtacgtgcggctggcgataaactatagactccatgaatttgatgagcaggtggctgctgttcgggaaggaatggcccgcgttgtgcctgttcccctcctctctctgtacaccggtatacgaactggagacgatggtgtgtggaagccctgacatcccgctgcaccttctcaagtcggtggccacctataaaggcatcgagccttccgcatcgctgatccagtggttctgggaggtgatggagtccttctccaacacagagcgctctcttttccttcgcttcgtctggggccggacgaggctgcccaggaccatcgccgacttccggggccgagacttcgtcatccaggtgttggataaatacaaccctccagaccacttcctccctgagtcctacacctgtttcttcttgctgaagctgcccaggtattcctgcaagcaggtgctggaggagaagctcaagtacgccatccacttctgcaagtccatagacacagatgactacgctcgcatcgcacttacaggagagccagccgccgacgacagcagcgacgattcagataacgaggatgtcgactcctttgcttcggactctacacaagattatttaacaggacactaagatggggaaacgtcctcgtgagatgagagcctgagccaggcagcagagcactcgctgctgtgtagactgtaggctgcctggtgtgtctgatgagaagcgtccgtcctcgagccaggcgggaggagggagtggagagactgactggccgtgatgggaatgacagtgagaaggtccgcctgtgcgcgtggaacactgtggacgctcgacttccaagggtcttctcacccgtaatgctgcattacatgtaggactgtgtttactaaagtgtgtaaatgtttatataaataccaaattgcagcatccccaaaatgaataaagcctttttacttgtgggtgcaatcgatttttttttcctttcctcctttcctttccaagtgtcgtgagtcgtcttgattgtatattggaaataactgtgtaacaaatcgtattataaatatttcaattaattttactctgaatttgtttattaaaagacttttgaacatgaaatgattagtattacttgaatgcatccagaggatatttaaaccaaaatgaaaaaccagaaggccatttggtgtcccctctcccaggtgtccccttgtagcatatgcattatgtcatctgaattgaggcctttctgtgaacagcatcataacttctatcatggaaagtgtactatatataatgtttgtgtcatgtatatgcctaaattttaattatctataaataaaacatctgacat

SEQ ID NO: 47644 - DNA, 1227 bp, Homo sapiens
  misc_feature (1)...(1227): n = a,t,c or g
tttttttttttttgattcctttatacttctgtttatttttcctgcttatgaaaacagccaacaattgcctttcaagggaagggaaggtaatgctgggaaaggtcctcaggagccctgagccaagttctcaagagagaagtgaggcagctggggatctgggaggccagagtccgggccagggcctcagcatcctagaaccagggctgcctcccgaagagcagttcagagggcgtgactccatacgggcagggcggctccacacaggcctggaacacccttctcctcagcccagggagctcatcagggtctgggcctgcttcagttctgccaggaggacctggaacttgtctgctgagagggacatggcaacaggctggggctggggtccctggggcagctgccacctccagccgcagtgcaccatgggctcttccacggattgcagcaggctggagctcagggtgtagtccacccgccagcccacacctgccaacctattcatgcgtaggctgcagacccgcaagtgcttctgcaaggggctttgcttctcctcataacagcggcacaggctggcccgcgtgctctttgggcagccccagctgctgcagttcactggacaaggattcgccatcgacactgtgcttggccgcaactggagaggatgaaactcagcactgccactgtggccttcacatcgcctgactcaaacttggcgtcagccgtgagcttcaggatcttctcatactatggggaaaggagaccttcagggggtgccaggcccctgctcaccagcccctcacccccagcctggatcctgcgataaggaacagacaggctggaaagaaggaagggaggtgcccagagaggttgagaggctggctcacccgtctccctgggcctagtgcagagtttcagggcagtggtggtcataaggtcatgggacaatggggtgctggatcttgtactcacatcaatcccctgtcccagcagctcctttagtacctggctgcagagcagccgcaacttcacagaggactggaagggaagtccttacatcagccaggctggcaaacctcacccctccttcctggggacaggctcagagcaggccagccactgatcctcgtgccgaattcttggcctcgagggccaaattccctatagtgagtcgtattaaattcgtaatggtgttcaaagggtgttcaaaggngggnngngagggcgggc

SEQ ID NO: 47645 - DNA, 1826 bp, Homo sapiens
  misc_feature (1)...(1826): n = a,t,c or g
ctctgaagagactgagggactcggccaatgccaatgatgtggaaacagcagctgctggaagatggcgcggatccctgtgcagctgatgacaagggccgcacagctctacactttgcctcatgcaatggcaatgaccagattgtgcagctgctcctggaccatggtgctgatcctaaccagcgagatgggctggggaacacgccactgcacctggcggcctgcaccaaccacgttcctgtcatcaccacactgctacgaggaggggcccgtgtagatgccctggaccgagctggtcgcacacccctgcacctggccaagtcaaagctgaatatcctgcaggagggccatgcccagtgcctagaggctgtgcgtctggaggtgaagcagatcatccatatgctgagggagtatctggagcgcctagggcaacatgagcagcgagaacgcctggatgacctctgcacccgcctgcagatgaccagtaccaaagagcaggtggatgaagtgactgacctcctggccagcttcacctccctcagtctgcagatgcagagcatggagaagaggtagcaagagaggctccctgccttcctgccactgccccaccctgccccactgctgtctcagtaccaagaaaaagcccaacatctgggacttggagctgcacttgtctggtgaggaccttgccctcacccgcagatgccgtggggcagagatgctctctctccacggcctcagagccactcccagccacagtttccagcatctctgtggacagggaccacagctcccagcttcttccagttctcgcagcaccagaccagcctctgcagctgcacttcagctccgcagacctgcgctatctcagcagacctcacttgccccatggccttcatggcgcgctccaggcctcagacccttctctgtgttccgtcctggccatgggcttgttgcagtcagcaggtgtgggcttaggcgggcaccctgtggccaggggtactgcgtgaggccctcagttggtcctgtgcctctcaccagcacttagacagacacgtcaccagactttcaaggagatactgcagtgagttttctctggttggaaggggaaggggttggtgagtccaagaccttaaaaatacaaggttaagagggacccccaaagcaaaaaattccaacccttttcctcccagtcattgaaacaccaaaactattataccggagggtgtaatagttttgctgcccagttgtggtaggccagtagtggcctccccaaagatgcccatgtcctaatcccaggaacctgtcaaaattaccttgtatggcccaaaggggctttgccagatgtaaatgaaagttaaggattctttcgccaggaagattatcccagcttgttcaggagggcttgatgtcctcacccgggtctgtataacagaagagcaggtgacgggagaggaggttggaggtgtagcgatggagcaggaaactggagttgaggagggcagctcaagccacagagtccaggccacctcagagccaggaaatgcatcctcacttgccccatggccttcatggcgcgctccaggcctcagacccttctctgtgttccgtcctggccatgggcttgttgcagtcagcaggtgtgggcttaggcgggcaccctgtggccaggggtactgcgtgaggccctcagttggtcctgtgcctctcaccagcacttagacagacacgtcaccagactttcaaggagatactgcagtgagtttctctggttggaaggggagggttggtgagtnccagaccttaaaaatacaaggttaagagggacc

SEQ ID NO: 47646 - DNA, 474 bp, Homo sapiens
  misc_feature (1)...(474): n = a,t,c or g
aacngctatgatttgattacnaatttaataccgactcactatagggaatttggccctcgaggccaagaattcggcacgagcggaagctaaaagatgaccagacacttgacttctatggcattcaacctgggtccactgtccatgttctgcgaaagtcctggcctgaacctgatcagaaaccggaacctgtggacaaagtggctgccatgagagagttccgggtgttgcacactgccctgcacagcagctcctcttacagggaggcggtctttaagatgctcagcaataaggagtctctggatcagatcattgtggccaccccaggcctcagcagtgaccctattgctcttggggttctccaggacaaggacctcttctctgtcttcgctgatcccaatatgcttgatacgttggtgcctgctcacccagccctcgtcaatgccattgcctggtctgcactccgtacaagcagtg

SEQ ID NO: 47647 - DNA, 814 bp, Homo sapiens
  misc_feature (1)...(814): n = a,t,c or g
tttgagtccaatagactcaaaggttacattttgtttttccatttaatttaataatcaacaaaacgacaaagtcagtttaatatctttcttctgctgagtcttcaggatgttagctagtctttcaaaagccattgctacaaaagtgcaaatttctcatttcctgtgggtctctagaaactctctcaatatttaaagccaaacaaatccatcttttctgagagacagaaactaaaaaattcagagttaattcactattaaaaacagcaaggccctgctatttcccaagaataaagaaatttaaaattctcattgtaagaagtatgaacttgaagctagaattggtttatttctggcagctacttacaatattaagaactttactttttaaatttgagacaatttcacaggaaagcaagaaattagtctattgtgaaatgtttttacaactaacttggaatatactgcaaatcactagtaagtagagacacatttaagataaaatgattaataaaacaattggtaattctgaataaggatctgaataaatccagatcacagactgttcctttaccaatatgtaaaagaatgtgcaaaattagtaaaaatatacccaaaaatttaccagcaacagagaagcaaagaatggagttcaaccttacactataaacatctaatagatatgtatgaaaatttaaaaactagaaaaggttgggcatggtgggctcatgccttgtgatccccaggactttaggaggcccaaggtgggaggatttgtttgagcccaggagttcaagaccagncttgagcaatatag

SEQ ID NO: 47648 - DNA, 1659 bp, Homo sapiens
tttttttttttttttgacacacaccaggttaatatctttaatatataccgagctcatacaaatttatctgaccccagaagatagagcaaaggacactgacaatccacaaaggaggaaatacaatcgctccacatgaaagatgttcaaccgtgctagaagtcagtgaaatgccaactgaaacacgatgctattttttcattatcaaattagcaaatatttagccagatgataattcccaatacgggcaagatgggacatgtttatccttgctggtggcagtgtaaggggatacaaatatttccggaaaccattttgtcaatatgtagtaaaagcctcaaaggttttcatattctttagttgaagaatcccacctcctggagtctaccctaataacttgacattgggaaacagcctgtgcacaaagatattcatcaatttataactgaaaagttagtaacagcattagtgattggcaactggcacaatggtccatctagtcaatgggagagtacacagccactccaaaataaaatatttagtaatcataaggggagatgcccacgatatgctaagtgaaaacagctgcacaaaactgtatcattacagaagacagcaacaaaactatgttaaaacaaaaagcaaagaaaccatagttgggggggaaagcctgagagacaccaaaatgtgatgttttatttccttctttcctctacttgcaaaaatttatctaacatgtggtttacatgggtaatgagaagacctagtaggtttggtgcttgtgtatgcaaaggcatgaggcacacggaagtgaggagctgggtttcctcccatctctaccgcatctgcgctgtgccaactgccaccccacccaaactcaggtccccaagagacagagacacaggggctgtctgtttccacgtggaaggccctacaccccaatcttctcccctactctggggagcttctcctgttggcccaacagtctgctcttgcttcccttacccaggagacccaccttgtgcctacctctctaagtccctaaaccagtgctttccaagcagaggtgccatgagccttacaactgtggttgcagatggaggcgcctccattaggatctcttccctcttccacccagagctctgcccccagtcagtggctgcagcatgggcccttttgtccaatcccagggcttgttccctaagtcaacctcagcacatgcccagctcagccatgtcccttcactcccctacaggctggaactgccagggtggtgcccacccaaggcggctgtctgccatgacaacaggagcgtgtgcgtcaggctggtcctgccgcactttctgggttttgttttccactcctcctcattgctcatcacatacttacctggggacaatgaaataggtctttgctattccctagaagtcaccaaaatgctttaggacattaagttagtcccagggtcacactatactaggccagggagtcaccccttcactaactcccatctccagtgataccctggtatgcactgaagcctacttaccaaaggggtaccatgtggaccagacagcagtcacctcgtgccgaattcttggcctcgagggccaaattccctatagtgagtcgtattaaattcgtaatcatgtcatagctgtt

SEQ ID NO: 47649 - DNA, 753 bp, Homo sapiens
cattcctgctgcacctcctcagcagccgccccccaggctgacagctgtcgtttcacgatgggctgaggggtgggggggttccaacacttgattcgagcagactgcaacgcccagctcacaggacaactgaaggagtcagacctcaaactgctgctctcaaagacaaagacaatgacaaaacccatttttgatgcctgaaaagaggcaaaggcttctggctaaatatagaggccagctccgtctacccagtgaaacattagtggagttggttaaagacacgaagccggagctcactctagcatgtgctgaaacaccaactttgccgtggcattgccaaaaagttgacagcaaaaaataggaaaaatacttcttaaaactgcattgcttcaattcttagtctcagtgtgttcacaacaaaggatgatttccagtttttttcgggtaatatgaaacattccactgagatcatttatcttgtattttcataacactgtgccagaaaacatcctctcacatctacgcatcagggatggtctagagggattaagcaaaaacaagctccttgctcaaagcctctccccagccttcagaaaggcagtcctctgagttcccagaaactgctgtgtcagagggcaacagtgcccctgcatcctggcagagaacaaggatgcttccaggcagtggtgggggtgggcacacatctgggagagctcacccaagcctgccccaagcaaaaaagtttcccagccccag

SEQ ID NO: 47650 - DNA, 1254 bp, Homo sapiens
ctgggttctggaggccctgggaccgcggaagaggcttcagacgctgcagcgatgcctcgcccacggcgggtcagtcagctcctggatctatgcctttggtgcttcatgaagaatattttccagatatctcacagacattaagcctttgcctcccaacataaaagacagactgattaaaataatgagtatgcagggacagataacagattcaaatataagtgagattttacatcctgaagtccaaactctagatctacggagctgcgatatatcagatgctgctctcctgcacctgtctaactgtagaaaactgaagaaattaaatttaaatgcttcaaaagggaaccgaggtttctgtaacttcagaaggaataaaagctgtggcttcatcttgttcatacctacacgaagcttctttgaaaagatgctgcaatctcactgacgaaggagtcgttgctcttgcactcaattgccagctgctaaagatcatcgatttaggtggctgcttaagtattactgatgtgtccttacatgcattaggaaaaaactgcccatttttgcagtgtgtcgacttttcagctactcaggtatctgacagtggtgtgattgcacttgttagtggaccttgtgcgaagaaattagaggagattcatatgggacattgtgtaaatctgactgatggggctgtcgaagctgtccttacttactgtcctcaaatacgtatattactcttccatggatgccccttgataacagatcattcccgagaagtgttggagcaattagtaggcccaaacaaactaaagcaagtgacatggactgtttattgatgcttttttgaagatgatcaatgctaggaaagcttatcaaaactactttcccaggaaaccatctatagagatttgcattctacttaatgttaacactatttttaattattttattgtcttaagttataactctcagagaattagctaagtcttggtatatacatggtttgtgctttactcttaaacatctttaaagtgctattattctatatctgttggatgagtcattatttttgaaatgataatcctagcatgaactctgatctatggtgttggattctgtttcttaaataactttaaaattaactgttttcccttgagatttccttctcctatgtaggtatttgagctattgttctaagtttacctgtaagtataaaccttgggagaatctaagtaaacatatttctaaaagcaaaaaaaa

SEQ ID NO: 47651 - DNA, 1775 bp, Homo sapiens
  misc_feature (1)...(1775): n = a,t,c or g
cgcgtcgactttttttcttttttttttttagattcatctttttaatgacatcctaaaattcagaggaggggccagcgggacctctgggctcagcggctgtgaaggagggacccgcaacacccgctaaggcaggtaattgcaagaaggcactcgcgagggggacttcaagcccctcttctatttcttcatataaaatcagggggatggggaaagctccaagggcgagggaagcagagagagtttctctcccagcctatggaataaggaagaggtgaggaaggggcgggtgctgggagcaagaaactgccaagtccaggacctgccctcacacagacacacacagcccgcacctgccctccctctaaaatctgcatccggggctgtaaggaagccccgtgttcaagcccccatctcttctcccttctagctggtacgaagttggtaatcgccactctgggtgatgtagcgaacccagggcagggcctggtaaccacttttctcaatgatcttcatgtatcggacctggatcccagagacggtgaagtaggggatctcaaacttgaccccgatggggggccggccctccacctcttccttttccacactggggaggccaaagtgggctcgcatcaagtactccttgccccccgggaaagacttaatactccaaatcacgacgtttctctccggcacatacttggcgctgcccacactggtcttgaatctgggggagtcggcatcgctgggtacaggcacagatatctccacaccgttggccactgactgtttcttaaactgccccttggccttgaccatgatctccacgcggctgtgggagaacttctcaatgacagactcaatccagatcagtggcttgacctgggtgctgaggcggtatgacatgagctcaaagtcaccatcaggcgggatgaaggagatggtgcggtcgttgtcaaagcgagagagccgcacgcactggtggaattttacatcctccagctctactgatttgttcttgctgcggccagtgagctcgaagagcacgcggtcattgaggcccagccgcagctctggcattcccgacagaaacaccttgagcttgatggagcccacgatctcgctgcgcaggacattgccgttggcgctgaccaagaggttgacagactcgatgacgtccaagaacacctcattcttccgatacttgataccctcggagcgccaggacacagcgttggtgacggtggctggtggccgcggggcccctgtttccagcttgtggccttcctgagtgatgtactcctgcaggatcttgctgtcggtggtctgggggtagccgaagtccatgagctcgtccagcagctcgtagatgataacaaagttgtcccggatgctctcctcctccagctccttgaagtattcgcagaatacctctattgtcttatacaggaaggagtacaccagggaggcattggcattcttcgatgtggtggccaccaagtagaggttgctgtgtttgatccataggaagtggacctggccgtggctcagcagcggggccagggcgccttcctcctcaccntgtaccaggcaaaggcatgaagtgctcaatcttgctcatggccacatcgcccttgtagttgcggctgatcaatggcttgcccttaacgtccagaatgaagacagccgaggcggacatggtggcggccgaaggacttaggagtcggggagggaaggccgggaggcgatgcggtgccgcttccnncttcagattggta

SEQ ID NO: 47652 - DNA, 2424 bp, Homo sapiens
taaatgaatgaacttgagaataaggctgaacctggaacacatttatgcattgatgtggaagatgcaatgaacatcactcgaaaactatggagtcgaactttcaactgttcagtcccttgcagtgacacagtgcctgtaattgctgtttctgtgttcattctctttctacctgttgtcttctaccttagtagctttcttcactcagagcaaaagaaacgcaaactcattctgcccaaacgtctcaagtccagtaccagttttgcaaatattcaggaaaattcaaactgagacctacaaaatggagaattgacatatcacgtgaatgaatggtggaagacacaacttggtttcagaaagaagataaactgtgatttgacaagtcaagctcttaagaaatacaaggacttcagatccatttttaaataagaattttcgatttttctttccttttccacttctttctaacagatttggatatttttaatttccaggcatagcaatgttatctattttaatgtgtatttgtcacaataacagaacatgcaagaacaatcattattttattttataggcatttgattactattctagacttctggtatcttcttactaacataaatatctcaagtagaaaagtttttgaaaactaacatttaaaaattaatcagttacagtaaagactttgaaaaagaaatgtacttgttaggaagtagcttaattaccccccattgcagtattattgttatatatatagttaatatgttgtacatcacaataatatataattcagtctctagtttccctagagtcatttttgaaaccactgattgcaaacctccctgacaatttttaaaagtagtaagccacattacatttatctttgtaaaaagatttatggtaactggtttcttacttgacttttataaatagtattttacatcttatttttgcctttatttcataagtaatttaaaaatcactggattgctttattatattcagggcaatatggattatttttataccaaggatttgcatcgtgaattacattaagttatttggcaatttataatttattactactttaaatcaaatgtagcattatcacactgtatttaaattgtcattttttaaaggaatattttcttcttaagatatatagaggattttggagaagagagacaggaggggtaaaaccagcttaaggttcagcgagcagaaagggacctgagaggatgctcactgtaagactgttggacagtggtgtgtattgaggggatgaatcggaacgatagtctcatgcagaaaatagtgagattaagatcatccttattgtttctaaattatttcaatcagatgaaagtgatacgattgaaatgaaatcacatagttcgtgctcagaaattctattttggtatgtttgtattagcctttagaaaaaacactccgtttcagaattgttcacagttttatttcttaggtttttagagttcaggatttcatttattaatttcttcttgcttttttggtggaaataggctttgttgtaaacattaagaatataaaatctcctctatatagaaacaagaattttgttaaaaagagaatttgaatcccttcctatactataaaatgctctatagggagacaaagtgtttcttttttcttttatgtttactgtttatgtggagtgaaatataaggctcttggatgtataacatactcaaaagctgttacactttctctggatctgctgtgatccactgaaaatgtgctggggtttgttctgctgtcactgtttatgctgctggaacttagcactgtcttgatttgaagcatatgattgagagccatttgaagcaatcttcattaatgcagataaaacaagtttacatgtgcagagttagaaaatgacatgttcaattctgtaagtggtgactttttgagcacctttcagtattatgtatttgtaaaaaccattgtttttggatataaagctaataagcactttaaaaaggaaaaggcagcctttactattttttctggttgagtcattgctctttagacctagcatcagcaatagatttcaaagataagtattaagcgctaccctaaagtgtgtaagtttttcattttgtcatattgaaaaatgatttgcatagtactgaatgttgacacacagcttatatgtatttacaagaatatctttaagtgtttttttgacacattaaaataaaggaaataaggaaattgtaagctttatttggatttttaaatacatttttaaaatttcagatgtaatttaacatcacatttgtttttcaggtattgagtttagatgcctacttttatgagtaccatcagctggacacagtgtctcatacctgtatttgcagcactttgggaggctgaagcagatcgctg

SEQ ID NO: 47653 - DNA, 436 bp, Homo sapiens
gagcggcgtcttctcgcgcggatggagaagctgaatttggtacgctggaccctcggacagacagcaagagagagacaagcccgaggcctgacttctagcactcctgagtttgagccctatgagcagtggaacctagggaccaccaaggatccagatataattctttcctcagtaatagaaaaaagaatctgggatctaagaagatacctactcattttctaagtgactggccatgtcattgtcccacttataccgggatggggaaggccgcattgatgatgatgatgacgagcgggagaactttgagatcactgactgggatctccagaatgagttcaaccccaaccgacagcgccacttggcagaccaaggaagaagccacctacggggtgtgggcagagcgagactcggatgatgagaggcccagctttggagg

SEQ ID NO: 47654 - DNA, 464 bp, Homo sapiens
  misc_feature (1)...(464): n = a,t,c or g
ggtgnnntttgannccttntntgaaatcctttgacatgattacgaatttaatacgactcactatagggaatttggccctcgaggccaagaattcggcacgagagaggaggatcctgccgcccagaagatgcagctggccttccgcctgcagcagattgccgctgcactggagaacaaggtcactgacctctgacctacaatctccagtgctgccttgggacataggtacctgaggtacctgagagcccctcaggggaggaggccgagtggctgtggctgaggcccccaccctcccctggaacgcgccccaagccggagtgggtgcagccggaacccgcccagcgtctagactgtagcatcttcctctgagcaataccgccgggcaccgcaccagcaccagccccagccccagctccctccggccgcagaaccagcatcgggtgttcactgtcgagtctcgagtg

SEQ ID NO: 47655 - DNA, 449 bp, Homo sapiens
cgcggcccgcgtcgacggtgacccttcccccccaccaccaccaatgtcagccctggtccccgacactcccccggacacccctcctgccatgaagaatgccactagctctaagcagctcccactggaaccagagagcccctcagggcaggtcgggcctaggccagcccccccgcaggaagagtccccttcctctgaagcaaagagcagaggacccaccccaccagccatgggcccacgggatgccagacctcctcgaaggagcagccagccatctccaacagcagtgccagcctccgacagccctcccaccaagcaagaggtgaagaaggcaggagagagacacaagctggcaaaggagcggcgagaagagcgggccaagtacctgggtgagtgagcaggaagcctcatcatcttcttcatcgtcatcatcagcatcctattaataacac

SEQ ID NO: 47656 - DNA, 1344 bp, Homo sapiens
tttcaaaattcaccaaaacaatttttatttccagtgtttaattgggtatgcacacaggcatgacacaggtttggattcattaagtcctcatgcagaattatattcttctcgataaagaagccagttccatccaggatccactatctacacacctatgttacaacattatatcaaatctggtatctgaaggaaaagatacacatttaatatgttcatttaagttacgtattttacagaaacgattaaaaattcattcacacaaaactcaaaaactgtattaaaaagtttgaatataaaactcagatccacctggaatgactaaagaatggaagttctgtatccacctgtgttaaaactggtaaatgtaatgatatctgttaccaataaaacgcattcgtttattcaatgtaagtaagttatctaattttaacaatatggcaccctaaaaaccaactgtatttttatgatgaggcacttttgttagtgatgaaaccaaaagaacaaatttgctgcacactgatgccagcgattttcttcagtgattttgggtatatgctatgtagtaagttgcaacaaataccttgctcatttgtatacaactatccgatatatttttaaatatatatatatatatatatgttcttctggctgtagtaatgcactgtaaagctatttcacagtgcaaaatgatgaaaccagcccaaatgaaggctgcataataacaattctgatacaagaaaatattgacagagttactggaacgtgtaacagtagtttttttacttgctagagtggacatacccccagtttaaagacagggatgaaactctgctttactgcctggggtttcagacagtttatgaggttgggcattcgctgcagaactagcatttttgctcacgttctggaagctttctccgtttatttggtcaggtgactgtggtggtatggaaagaaggggcctgtttgttgaagccaaggtgctggaagaactgcctgtgttgcaatgaagagacaaaggtgtgtcggtcgtggctatttctcgtgtgcttgggttctctgtctggggatctccgatttctcctctgctaaggtcagaggtactggtgcgtaggcgttccctggccagccagtctgagatggaaaggtcctgggctgagcattttggttttaaccggtttacagctgaaagttcagattctctctccccgctctgctcatgcactttccaaaaattcaaaacgctgatttcggtagcatctctgtgccctcctagtgtaatgtctgcgccggatgcttttccttttagcagtctcggctattcactttgtgattccctactcc

SEQ ID NO: 47657 - DNA, 967 bp, Homo sapiens; identical to SEQ ID NO: 3438
  misc_feature (1)...(967): n = a,t,c or g

SEQ ID NO: 47658 - DNA, 1150 bp, Homo sapiens
tttttttttgaatttcgatttttttccatctttattgaggtatatttgacaaataaaaattatatatatttagggggtactacatgttttgatatacatatacattccaaaatgattaccacaatccagctaattaacatatccatcacctcacgtagttatcttttttctttttttgtagtgagaacatttaagaacatttaacaattctttgcattttcaaattaaacaaaaaaaaatcagtagtaaagatgctataggaccagatggagttgcccctttataacagagaatattttagctttcataaagttaagcaaaatctaatgatagtcaaatccttcctggtttgaactacacaaatactaattaaaacaacagaaactgcctttagaaattttgcttcccatattgatcctttatattcctaaatttattacaattttaactatgagatcatgaaggtaaattgtttcataaaactaaaaccaatgtatacacataataacttgagtatttcctggtttgtagcgaccatcgatagcagggtatctcaaaatgagcactgatgacatttggactcaataattctttgttgtagaaagttataagatatatatattttaaactatgctactcctcatttatttaggaaacctcatatgcatagagagtgcaaagttaaactgcagccacactggaatttccataattgcccaagaaatcgagtttaatgcagaggctcacacagaacatattacacaaagaacagacaagataattgcagcaatgactgggaagaaagaatacgcccatgtggtacaaagtgcaggggtgatgatctgaattacaaaactgtgctatagatcaaaatagagctaatacccaaacaaagaaatagacattattcttttcagcatgagcagcatttagctccaagctagaagcagaaaacatgccagtcagagattatctgtaacttgttaagactaagatgtcttcattgactcctaccctgaaatgacagaagagaacatagtttatgtgccaacgactgaatattcttttttattttattttattcatttatttaaaataaatgaattcaaagactatatatagtctatttttatttttatttattttttta

SEQ ID NO: 47659 - DNA, 1684 bp, Homo sapiens
ggcgaaggagatcagcaggacgctgcgcacaacatgggcaaccacctgccgctcctgcctgcagagagtgaggaagaagatgaaatggaagttgaagaccaggatagtaaagaagccaaaaaaccaaacatcataaattttgacaccagtctgccgacatcacatacatacctaggtgctgatatggaagaatttcatgggcaggactttgcatgatgacgacagctgtcaggtgattccagttcttccacaagtgatgatgatcctgattcccgggacagacattacctctttcagcttttttcaccctcaagaaggtcagtatgggtgcggaatttaatttcaggaagatagaacctttgctgttcttgcatacagcaatgtacaggaaagggaagcacagtttggaacaacagcagagatatatgcctatcgagaagaacaggattttggaattgagatagtgaaagtgaaagcaattggaagacaaaggttcaaagtccttgagctaagaacacagtcagatggaatccagcaagctaaagtgcaaattcttcccgaatgtgtgttgccttcaaccatgtctgcagttcaattagaatccctcaataagtgccagatatttccttcaaaacctgtctcaagagaagaccaatgttcatataaatggtggcagaaataccagaagagaaagtttcattgtgcaaatctaacttcatggcctcgctggctgtattccttatatgatgctgagaccttaatggacagaatcaagaaacagctacgtgaatgggatgaaaatctaaaagatgattctcttccttcaaatccaatagatttttcttacagagtagctgcttgtcttcctattgatgatgtattgagaattcagctccttaaaattggcagtgctatccagcgacttcgctgtgaattagacattatgaataaatgtacttccctttgctgtaaacaatgtcaagaaacagaaataacaaccaaaaatgaaatattcagtttatccttatgtgggccgatggcagcttatgtgaatcctcatggatatgtgcatgagacacttactgtgtataaggcttgcaacttgaatctgataggccggccttctacagaacacagctggtttcctgggtatgcctggactgttgcccagtgtaagatctgtgcaagcccatattggatggaagtttacggccaccaaaaaagacatgtcacctcaaaaattttggggcttaacgcgatctgctctgttgcccacgatcccagacactgaagatgaaataagtccagacaaagtaatactttgcttgtaaacagatgtgatagagataaagttagttatctaacaaattggttatattctaagatctgctttggaaattattgcctctgatacatacctaagtaaacataacattaatacctaagtaaacataacattacttggagggttgcagtttctaagtgaaactgtatttgaaacttttaagtatactttaggaaacaagcatgaacggcagtctagaataccagaaacatctacttgggtagcttggtgccattatcctgtggaatctgatatgtctggtagcatgtcattgatgggacatgaagacatctttggaaatgatgagattatttcctgtgttaaaaaaaaagtcgacgc

SEQ ID NO: 47660 - DNA, 373 bp, Homo sapiens; identical to SEQ ID NO: 3444

SEQ ID NO: 47661 - DNA, 1349 bp, Homo sapiens
gcacgaggagaaaggttgtgatggcggctatagctgcatccgaggtgctggtggacagcgcggaggaggggtccctcgctgcggcggcggagctggccgctcagaagcgcgaacagagactgcgcaaattccgggagctgcacctgatgcggaatgaagctcgtaaattaaatcaccaggaagttgtggaagaagataaaagactaaaattacctgcaaattgggaagccaaaaaagctcgtttggagtgggaactaaaggaagaggaaaagaaaaaggaatgtgcggcaagaggagaagactatgagaaagtgaagttgctggagatcagtgcagaagatgcagaaagatgggagaggaaaaagaagaggaaaaaccctgatctgggattttcagattatgctgctgcccagttacgccagtatcatcggttgaccaagcagatcaaacctgacatggaaacatatgagagactgagagaaaaacatggagaagagtttttcccaacatccaatagtcttcttcatggaacacatgtgccttccacagaggaaattgacaggatggtcatagatctggaaaaacagattgaaaaacgagacaaatatagccggagacgtccttataatgatgatgcagatatcgactacattaatgaaaggaatgccaaattcaacaagaaagctgaaagattctatgggaaatacacagctgaaattaaacagaatttggaaagaggaacagctgtctaatcccttcaagaactgtttatagaagcttgagaatggggtaaaaatttctgctagcaaaatcaagttctttttgaaattttatcagtaatccagaatttagtagtccatgccttctcactcagcatttagaaataaaaatgtggtttcttaaacgtatatcctttcatgtatatttccacatttttgtgcttggatataagatgtatttcttgtagtgaagttgttttgtaatctactttgtatacattctaattatattatttttctatgtattttaaatgtatatggctgtttaatctttgaagcattttgggcttaagattgccagcagcacacatcagatgcagtcattgttgctatcagtgtggaatttgatagagtctagactcgggccacttggagttgtgtactccaaagctaaggacagtgatgaggaagatggcagtggccaccggaggactggagcagtccctcctcatggcggcctgtgaccaaggtcggggaggagtggagctatccttccatgatctgatcatgtacagttccctttttaaaaagcaataaatgcttgggattagaatttctaaaaaaaaaaaa

SEQ ID NO: 47662 - DNA, 519 bp, Homo sapiens
cgctggaggaagaattcacgttgtcttcggtagtcctgagcgccgggcctgaaggactcctaggcgtggagcagagcgacaaaacagaccagtttctagtgacagacagcggcaggacagtcatcctctataaggtttctgatcagaaacccttggggagctggtcagtgaaacaaggtcaaattataacatgtccagctgtgtgcaactttcaaactggagagtatgttgttgtacacgataataaggttttaagaatatggaataatgaagatgtaaacctggataaagtatttaaagctacattgtcagcagaagtatataggatactttcagtgcaagggacagaacccttggtgctcttcaaggaaggtgctgttcgtggtttagaggccttgcttgcagacccccagcagaaaattgaaactgttatctctgatgaagaagtgattaaatggacaaagtttttcgtagtattcagacatcctgttttaatttttattactgaaaaacatggaa

SEQ ID NO: 47663 - DNA, 1377 bp, Homo sapiens
tttttggacaatgcttttaatggcaagtcatcacagcaggtctgcggaggtgcagggcagcgctcaggccttgctcagtttcttcttgatgaagtagctcaccagccgctgcggcctctgctggtactcgctgagcacattgcgagggctgctgatctggtccccttccaggcggttcaggagggtgacacacaccacggccgcttggaggccgcaggcgctgcacatggcggcaaacaccgaggactccatctcgatattgcggacgccggctgcataggctgcctccagatacgcctgcttgtccttctccgtgtaggagcagagagccccatccagacggccttgcccttcatagaagtccaaggtgcacatggtgttccccaccactgtggtgaactcgctcagctctgcagaacacagcaacagctcctgcaccagcttcttgttaaggtccgttttccggatgacccgcttccccaggacaatctgctcaaactctgccttgaagcaggtatccactgcctgctctgttatgaccacagtgccgggctccagacctatcccaccagaagtgccaatgcggatgatagtgacgttggagcaccgggcatagtacagcagctttatgagctcatgcaacatgattgagatagaaggaatgcccataccatgactgacagacagcaccggtcctactttatacatggcatagcggtcagttcccgcacagatgttgggatagtctctacctgggcagtcaaggcccagctctgcaccaacgcacctgatgaaggcttttcattccgggaggggcttccaccaaccacacacaaacttcaacatctccaaacaaggctgggaaattgtgtctgctagtggtgagattgaaatgatagagaatatcttctttcatttttgctatgtttggatttaaaagtctgacggggcaatcattgtgactttcagctttctctgcattggctcccgtggccgccattccgccaactgaggcaggacccgtcagaggagagcggctggaggcggacagacgtctgcagtgggaggcgctccaggcgttccaggcagtgtcctgcccggcgagtcacccgcgaccgcgagtcacctcaccaagccctgaattgggacaggagacgagacgtgtcgacgagctgcggagttcctcgcttctctgggcccactcggcctgcgcagagagccgctacacccgcggcgccatcctcgcactgcgacaccggcgacaaacgcaatgctccagggccggacgaagggacggctctcgggaggctcgcggacggcggggcgcgggtctgtgcgccggagcactcgaatgagggaaccacttgcgaggtgaaa

SEQ ID NO: 47664 - DNA, 1411 bp, Homo sapiens
ttttgtaaagtacagaaaaatatttattggaaatcccttgaatacattttgaagtgtagctcggtatttccaaacaaagtaggttggagaggttggaggaggaggagggactctgacacctggagacaaacagctggtcccagcctgtcccgggggtgctgcaggagtcagtctagggctcattcctttcatggcaggtctgaggggcaagggctggccttaacagttgctttacttctcccaagctcagctcaaagtcatggctgagactcttcacagatggagccctggtgaaaggctgctgccacctgtagatgccaaagattgctgcctcagacaatggctaggcctttccatgcaaggccttggaaagagagcagtagctgaaatatgggggcatcaataacttaccaggggccttcccccttctcaaagctggggccttggggataaacctgagcctgggttcagcaagccacgcatgtgctctgggccaaagtcaggagggccagttggctgctactgcttctgctaacacttcttggtggcagcagcagcacgcagagctctggtccccgccagagcctgcttcaatcctcagaagtcagccttgtatgtgggaacagtgtcacatgcagtatactaacaagcagctgagagccacctgctccactgaagcacagctgctgcccattgaatgccccaggtgggccaggaggaatggagtagacctagatctccttgaccaggactaccagcgaggctgggaaaggacagatcataggtgggtgaggctaggcacttgacttattcaagtaacaatacctgaagggttaagtcaatcatacgcccagctttgatttctcaaccagaagccaatccagctggtaaaccccagggcagtgtagagaacctgggattagagggagatggtagctaggccccaagcaggaggaaaagctccacaggacagccccagggatcaggaacaagtacccaggcagttgggggacacacacaacatcccctaaccactacatgtggccaagcacatttagcacccaggacttcctgggctgccagaatggagtcagtcactctgcagaaactgtgggagatgtaaggctctcaccaggaatacgcaactatccaaggtaaagcctttagtcagttccagtgcagccacactgggaggtgactttgcccccggccagccctcttcttggatctcgctgtctgtatggtgggaagatcctcaaagcagcagcccggattctcaataacctccggaggaggaggtctccgtcccaggaagagccctccgccttctccaagtgaaaaacaactcacctcaaacatatttcctctataaaatatctggtttctctgaaagtaataaatatttaccatg

SEQ ID NO: 47665 - DNA, 1068 bp, Homo sapiens
  misc_feature (1)...(1068): n = a,t,c or g
gcggcacgagctccatgttaatgggtccttcccacatagaaatgtattctggtacagcgctgcacacatggatagcaatgtgaaaaggcatgcctaagagacagaaacggctgaccttaccccaccccagccggatcctctgcttatctcccacatgcacttggcttaactggttttcacagattctgaggttatagaacctgttgtttttcaaactcctgtacagagcctggaaataatggagcaaacgcaaatgtattgagagtcattatactttaaaatagttttaaagactattggggtaccatcaggtcaaaagccactgatttgggaagcaatttttttgcaaaacactttttttggagtactgaactttacaggggcttgccttaatctctatttagtagtttcaagatgtatgcgcaattattctacgtgttaaaaatgttaaaatattctatgtagccccaaaggtgggtaaaacagtataagtaatgcctaaattaataagctaaaaggtgtcactacagctggatttttgagagaaaatggacataaaactaggctatgtgtaataaaaataatggcaccttaagattgcactattttacgcattattttatatgccatttcatagcctgcactttaatctccaaagaaacgatgtatgatgtcccacttgttccttattcttaataaactttttcctgagacagggcacttaattccattttactgtactgaattagtttcttggaggtagattcatttcttgagttctctgtttccttagccataatattttctaggatccgggaactccctgtattgtctatttccaacattatataattctaatttaatgtaatgtaaatctcatacttggtgatcagcacattcttatatcctgctctaggcaatgagtacccatttggttacacttaccaaactctctaaaaacatatactgtgagtaaggtttcgaagccaggaaataaaaggcaggctggaaggaaacggcctatacgatgcagttggttgggaaatgggcggattcnggatatggaac

SEQ ID NO: 47666 - DNA, 1230 bp, Homo sapiens
cactgttttccaatactttatattttattatttttatgactaaagaaatctgtttttaggagaaaaatggacagatgaacaaaaaagaacagaaaaaatcacccagagataaccactgttaatcttttagtggacacagctttcagaattgttttctatactatattactaggtaagtatctttgtagttttacaaaaatgtactgatgccatatatttggttctgcaagttgtgttttttaattttacaatgcaccatcaacattttttccatgtaacagatgaacatttcctactgagaacactgcattgcagataggtcaaaaggctgctagcaacaggagggatgcctaaagtaaagtattaccgtaacgttaaagcacatggcctggtaaatgcctgccagggacactacacataaggaatgtcttcaatgtcccttcgtggggccctgcagccacccctgaattcccttggacctctagggtagaaggggtcctgtaaatttctttgcatccacaaaaacgcccccaatttctgtttgctttttctcttctcatcctgcaccttagccatattgtcaaattctcttatcatgtcctcattgctgaaattcatatcatgtatggcctctttatactccttgaggtaatgagccagccccttattagtttttcttttggctttcctgggtacatcatcctcagctgggcgctttcctgcagcccttggtttcactccaatggctctccttcactctctggctttccctctatctctggttttccctctctctctgatcctccctgcatctctgactttcccttcctctctgactttccttctccttttgcctttcccgcactctctggcttttctttatcctttaacatttcctcatctcctgttttgcccttgttttctgtctttccctcgttttctaacttcttgtcttccagagtacaagttacttctggctttctctcgtcttgtggctgttcttcattttccatctttccttggtttgaagccattccttcattttcactgtagagtttttccatgtcgagatttcccctccttttcctgtcctgcggggattctggacaggttgctcctccttttcaggcttcgcagagcgctgggaacaacagacgcgcagacctggaagaagctggaccaagaattaggagcccaggaaccggagcagacgagacccagccgcgggga

SEQ ID NO: 47667 - DNA, 1409 bp, Homo sapiens
  misc_feature (1)...(1409): n = a,t,c or g
attaaacagagaagaagactttaaagccacagagatcatagagccttccaagcaggataagccactcatagaaaaattagcggagatttatgtcaactcctccttctacaaagagacaaaagctgaattacatcaactttccgggggtgagaagaagaagaagatcacagtcttcaaggagatcagctacaccacctccttctgtcatcaactcagatgggtttccaagcgttcattcaaaaacttgctggggtaatccccagggcctctatagctcagatcattgtcacagtcgtactgggactggttataggtgccatttactttgggctaaaaaatgattctactggaatccagaacagagctggggttctcttcttcctgacgaccaaccagtgtttcagcagtgtttcagccgtggaactctttgtggtagagaagaagctcttcatacatgaatacatcagcggatactacagagtgtcatcttatttccttggaaaactgttatctgatttattacccatgaggatgttaccaagtattatatttacctgtatagtgtacttcatgttaggattgaagccaaaggcaagatgccttcttcgttatgatgtttacccttatgatggtggcttattcagccagttccatggcactggccatagcagcaggtcagagtgtggtttctgtagcaacacttctcatgaccatctgttttgtgtttatgatgattttttcaggtctgttggtcaatctcacaaccattgcatcttgggctgtcatgggcttcagtacttcagcattccacggatatgggatttacgggctttgcaggcataaatgaatttttgggggacaaaacttctgccccnggggcttcaatggcaaccaggggaaacnnntttttgttgtnttctgttcccttgccatcacactgttgcacagcagcaattgttttaaagagatacatttttagaaatcacaacaaactgaattaaacatgaaagaacccaagacatcatgtatcgcatattagttaatctcctcagacagtaaccatggggaagaaatctggtctaatttattaatctaaaaaaggagaattgaattctggaaactcctgacaagttattactgtctctggcatttgtttcctcatctttaaaatgaataggtaggttagtagcccttcagtcttaatactttatgatgctatggtttgccattatttaataaatgacaaatgtattaatgctatactggaaatgtaaaattgaaaatatgttggaaaaaagattctgtcttatagggtaaaaaaagccaccggtgatagaaaaaaaatctttttgataagcacattaaagttaatagaacttactgatattcctggtctagtgggtataata

SEQ ID NO: 47668 - DNA, 505 bp, Homo sapiens
gttcccaatctgaagtgggagctgggcgagaagtaggggagggcggtgctccgccgcggtggcgttgctatcgcttcgcagaacctactcaggcagccagctgagaagagttgagggaaagtgctgctgctgggtctgcagacgcgatggataacgtgcagccgaaaataaaacatcgccccttctgcttcagtgtgaaaggccacgtgaagatgctgcggctggatattatcaactcactggtaacaacagtattcatgctcatcgtatctgtgttggcactgataccagaaaccacaacattgacagttggtggaggggtgtttgcacttgtgacagcagtatgctgtcttgccgacggggcccttatttaccggaagcttctgttcaatcccagcggtccttaccagaaaaagcctgtgcatgaaaaaaaagaagttttgtaattttatattactttttagtttgatactaagtattaaaacatatttctgtattcttccac

SEQ ID NO: 47669 - DNA, 1701 bp, Homo sapiens
ttttttttttagactttaaaaaacatgcactatacaatcttttatttccagtttaaaaacaaaatcttaaattactaggagtatatttacaagattaattacattttaagccagcacaccatggatgtacatgaagggccactcggtgtccctcgctgggacaggttgtgtgacctgcccaaggggctccggctcatttgccaaagtcaagacgacgaccaggtcttctgactgctcagcccaaccaataatgaaaaaagtatcagagatgtgtcatatccattttgctaacaagcaattacatgcctttttagtgtttaagagaagccttaattttcctgggatatctccgtaaaatcattctggaatttgattttgaaaattctttaagaaaaaaaaaaaaaagcttgtcaccccccatgagacctgctgtctctcatgtctgcagggacaggccttttagaggcagcaaaagggaatactggtctctggaaagtccagacagaactctagcagctccgatggcttgatctcttccagggagccagtgggctaggccccatgctttggttcaaagcgtttggagaacatcttcttgctccttttccggaaacgagataatggacacagagtcccagacgtcatcctttggtgagctgtccttgtccaaggcctctaagatgggctgagttgggtctttttaaatactcttctatctgtaatgggatgcttggtggagtgtgaaaccagtatttaatcaaggcctctatatttcaggaccaggaagaaacaggctcctgccagcaccgacagcaacgaaaatgttcccacggagatcaggatgacttgctgaagctcagtggaggcatctgccattgtttcgtagcaagatatgttgcttaaatgcccgactctaaagatgttacttttgttccaaagcagttgtgcctggacttgtaaacagtacactctggagggttttaagttatccaatgaaatggagttgcttctgaaagggcctttgacctgttggattcctcctttttcccagtaatggacataataacaaaaaaaggccgtggaggtatcagcgatgtcaaagggagaggagaacctgatgatgaagggagccttctcctggggtcacctcaatgttttctggaggcccgacagtcacattccgatagtgttgaaaccaaggcattgtcacccaggcagaatggagtgctcccagctcagctcgaaggcgtagagtgacattgaaatccattgggaagcctgctgagggactggcggcagtgaagtcacactctgttgctgtgatctgtgtacaattcacccctatggacatgatgtcggccgtgaaccatttactgtcggtgtatttaaactgcacttggtagacaacaggcctcgtgctattgctcagggccactggctcccaactcaggacctgctctgcgttgtacaggcgaatcttcgggtgctgaggagcgggcagctgggaaagagggtctggcggggccgcggcggcggcggcgaagactccgagcagcagcagcagcgaccacagcagcgtcggtcgcatggccccgggcgctcggcggcggctcaggtcgcggccggggccccgctcggggtccgcggagccgctcacgtcgccgcccaaaccgccatggcgagcgcagggcgcgcagggcc

SEQ ID NO: 47670 - DNA, 526 bp, Homo sapiens
ctatgacatgattacgaatttaatacgactcactatagggaatttggccctcgaggccaagaattcggcacgagggtggaggattgcttgagcccaggacgtcgaggctgcaatgagccaagatggtgccactgtactccagcttggctgacaaaatgagaccctgtctcaaaacaaaagactgccattgagattttgatagggattgcgttgactctgtagattttgggtggtatggacttttaatgatatttttccttcagtgcatgaatatggaatgtctttttatttatgtgtttcttctttaatttccttcagtgttttataattttcagtgtacaagtcttttacttctttggctaagtttatttctacatattgtaaaatacttttgttgctgtggtaaacgggactgttttcttaattgcgttttcagatagcctgcttgtacttagaaatgctgctgatttttttatattaacttggatccagcagctttactgtattcatttattaagttctaaca

SEQ ID NO: 47671 - DNA, 1019 bp, Homo sapiens
tttaacatttcatattcttttattctttcttgtttacattcataataaaagtcagtgttagcatccggcaatgtttttgtaattttttgaataaagtcacatttgtaagaggtctcctctacaaactgcaccatataacacaccaaaggttgaagtaagacacacacatgggcccgactgttttgacttcaatctttccactgctttggcatctaactttgcatcttcagaactagaagcctccgtaagcaaacttatttctggatcagcaggccagtatgaaattcggttaactccagcatttacaatcattttcaaacaagcagaacatggttttctggaaaaaataaagatcacagttttttcagccttgacccatggtttaataagagcaatctggcccggcatgtaaatcttcactagaacagtgggggaccaacaattttcatgtttttcaccaccacaagaccagttctctttacctgtcttttgtcagtagatactctggtcctctcttcattatctcctaagggtccatgctttccctcttcatttttctgagatttttgccgctgggcttctgctggaaagagctccatccagaggctgagcagagtgaaaaggttgactttagaaagccttggtatctgaccggtcatgctgccagtctgggtgctgactgaccgcccggccctcgcgctctccagattttgcatctgcccagcttctttcatcccaaacctagcgtcctctgctgccaaggaaacctctcccagtcagacatgatctcggccctagcggcccccgcctctcgcctcctctcagcaactgtaaggcaacggcccacttagcgcagccagatgacgcctcaagcttgaccgccacttcagggctcctcgtgtgacgtcatagagaggcggggctttggcgccagagggctgcccctcggccggtgaccgagttaagcaccgagctgtaaatcgcttgagacctgtatttggttgttttgttggttttgc

SEQ ID NO: 47672 - DNA, 1324 bp, Homo sapiens
cggaagttgtggactgcagttgagtggaaatgggcaacggcgggcggacgggcctgcagcaggggaaggggaacgtggatggggtggcagcgactcctactgctgcctcggcctcctgccagtacaggtgcatcgaatgcaaccaggaggccaaagagttgtaccgagactataaccacggtgtgctgaagataaccatctgtaaatcctgccagaaacctgtagacaaatatatcgagtatgatcctgttatcatcttgattaatgctatattgtgcaaagctcaggcctacagacatattcttttcaatactcaaataaatatccatggaaaactctgcatattttgtttgctttgtgaagcatacctgaggtggtggcagcttcaagattccaaccagaatactgcccctgatgacttgatcagatatgctaaggaatgggatttctatagaatgtttgcgattgctgctttagaacaaactgcctattttattggcatttttaccttcctgtgggtagaacggcccatgacggcaaaaaaaaagcccaacttcattttgctgctgaaagcattattattatctagctacggaaaactcttgctgattccagctgtcatttgggaacatgactacacatctgtgtgcctcaaactcattaaagtatttgttcttacatcaaattttcaggcaattagagtgaccctaaacatcaaccgtaagctctccttcttggccgtgttgagtggcttactgctggaaagcatcatggtctacttcttccagagtatggaatgggatgttggaagtgattatgccatctttaaatctcaggacttctgaagagttttattcttcttcactatctgtggcatgaccagctgtatctgaaagagaaaagacatgaaatataaaccaacctcctcatttctgttgagtaaaatgaagcaaagattggaaacactttctgaaaaagaaagcaatgataatagcggtggatacccacccccacaaatgcacccaagagacaagccatttacatacagatattcacagtcacacatagaaacacccacatggacacaaggaatgttgctgcagagactgaatgacatgcaacaggtgaaggtttatacgttatacacaaggccaggtaagcgctcataattcacacataataaaacatctaggtttcattcctttgacatgtttatatctttttaatttaaatgttgttactggcttaaaatattttgtgttcttacaatagaaacgcttttaataaagtctttcagaataaaccaaataagaaaaaaaacaaa

SEQ ID NO: 47673 - DNA, 652 bp, Homo sapiens; identical to SEQ ID NO: 3478

SEQ ID NO: 47674 - DNA, 1400 bp, Homo sapiens
aagaaccattgaaacagtaatttattcctgagctatttgactgccatcaatccatttgttataaaactgaagggaaaacacacatttgaatcacttcttctaaagctttagtaagtgatctgttcaaataagcaattacatgaaagaataaaaccaaatttccaacctaaaattctgacaggagagtcaacatgatggttaaggcctatttcatattcaaacttcagtctatgaaagagtagagagagaagggtctcctctttcaaattaaatattataaaaacaattaaaaaaaggtatcaatagtcctaaaatgcagcaactccatctcaaacaagcatgacacacttctgatcagatgaagtatttacaaaggtagcttgtgttttaagcatgtaacactttgggtgacgacagaagtttctcctctttgggtgaaacctgcctaaggctgtagagatgaccaacactctgcaggtgttagttctgaataactactgtgggcttttcatgatcttccctccagtaggagaccacaattgagtctaaagtcagatccaccgttgtctatgggtaggcagggttgattcaaacttaatccttgtttgtattcttttggattactgcaaaaacatctagggaccagagtgaatgtctggtgaggcataactgccagaggtgaaagatgtcaaacattttcaatttggcagtttcttcaaggtgtgtgaaaattcacatacagaaggtctggcagtgtcttctgtaagttttcgtgttgccgtatttctgaaggagctcttgggcctgctgctgcatttcctgggccagacagccaggaaagtgggacctgatgagaagcaggacgaggcagcactccagcacatctgggaaagggcccaggccttaatgctctcaggaaattttgccattctctgatttgcctcggtaagccttttggttaactcaggcagagaaagtggctcatttttttcttctttacactggctctgagaactgcagaggggctgctctgcttctacttccggttcattcttatcaggaccatttgctgtggatttacagagttgactcttttggtgttgtcggatcatttctgccaaggtctcttggacttcagcaacagttctctgtgagttttggagactggcatgcttttctgaaaagagctccttaaaagtactcagcattcgctcaccttcttctgtgagtctcaagtctagttctgaaggcctgtttggctctggctgagaagtttcagggtccgtttcttcagtgctggcagtgtctaactgctggcttggctcaacagagagtgttctgtgaccagcccttacccagacactggaatttgggcaaggtctggagagagaccaccagaa

SEQ ID NO: 47675 - DNA, 1347 bp, Homo sapiens
aagaagccatgtgttcagtacctgccccccgagaagccctgtgacagccctgcctcctcccacgggagtcatgctggactccccggccactccctctgcagctttggcctcaccagctgcccctgctgccacccattcggagcaagcccagcccctctccctcaccaccaaaccagaaacccgggcccagctggcttctccactctgcgccttcctgtcgggctaaagctgcagcctcctcctctgggcagatgggcagccagcctcccctcctgtcccggcccctcccccttgggtccatgcccacagctctgctggcctctcccccgtccttccacgccacgctccatgcccaccaggccctcccggtgctacaggcccagcctctttccctggtcaccaagtctgcccactaagctccccccgacccctgcaggctgtcacatgactcattgagtagtaatgattcagaagaaaaagaaaaaggagactttattggtcaatatttgaccactctggactgttctgtaaagtggctggtaacaacagcactttacagtttgtagatgtaaccagtagctgatcttaaggcttttttaaaaaacaaaacaaaacaacaaaaaaaaatctttataagaaagagaactgaaaagtagcgtgctattcgtcctgtaggtgctgtggtggatggacctgggcagagggcacttctctctcttacctctcttgcactttctgtctcctgtctcttctcgcccctgccgcctgccccagcttccccgactccatctgcagctctgccattgtgacatttcctgttacccagcccaagttttcatcgtctgctcaataccgtgggttcttcttcgtcctctgtcctctgcccagtgtgaggccatcaccatgtgagaagacatcttggcctgatttgctgccaccagcgtcccctccctcagtgggcccgaactcgccagccccagctttcagtggagaaagcggtcctctgaaatggtttcctcccaacccccgcatttaaagggactcaaggtgcctgccacttcctcagcgaagaagtctgtgttcctccccgtccttgccagtggcgatcatcccttcacaatcccagagtggcaggcgggaccagccccatggtctggctcctgtcacctgggtccgtgccagcacaatctgccaaagttctagagaccctgttcccttccccatcacctcacatgcttcttctgtgtgtatttctttttgtttttatggtttttggagcaatttaaactcccagttgtttattttcacaaaagaaaataaaaattgcagttgcaagacctttaaaaa

SEQ ID NO: 47676 - DNA, 2297 bp, Homo sapiens
  misc_feature (1)...(2297): n = a,t,c or g
ttttattgtgagaaaaacagtcttcaatacaattgttttatttaacacacatatgtacacaggaacattcagcacacatagagtctattaagtggaatcattaagaaatgtctggagaggcagacattttaattcactcgctgtacacagggagttcaatcatcacattttcatacaggtgtcacgtcatgtcatcttttgcttgtaaattaccaatgaagccacatatgtctctacatatacaaggacaggtccaaatacagtgccagtgaaatcaataaaacattaaaggtgtacgctgggatgacaatgcagagtttacctcagtgctgagaaatctaagctgggatgaagtttgggactgtggctattaaaatagccaaggagagatttatgttaacaagaatgcagatattagtttagtagttagagatgaccgtctaatcatcaaacatcgtccaccccagggttttgcagccatagctttctactggccttggttgcctgtgcagacggaatacgtgaaaggcctacccacgcttgtggcccagggctattgctcctctgggccccctggctttgttctcaaccttcgtggcggggggagccatccgtgtgtttgcgggcaggctgcctaccgctctcacacctctttcctgacacacagaacatttttgttaaagaaaatgcctaaggtatacatttacctcatcattcccaaatagagatgtagtctacaataaattaatttccatttaagttcataaagtaaacatatgttgggtatagagaagactctggacccactggaaaacaaagtgagccttttaccttacatttctctagctatgccaaacacaacagcacgttcaccaaacaaataaagtctaaactgtataggtctttgtttcttccttggaaactacatatataatctttataaanacaatgtacatgcatgtgcctaaattcacttttggaaagaatacccaactctaaaaccaaggagcagtatagatttggccgtccaatggaaataacatcatatcattatgaaagagatgatctaatggtcttaatttcttaatatgctctttaaaaatctgtttcagtgaaataaccaatgtttgttcctagactttgatcctacttttttgtatatcagataaactctgacaacctaaacttttaagactaaattctcccattatcattttggttcctttgtaaacttcacatattttctctgaatttaacaaataattttctatttttgcatgtaataaatgattttgccccaactaacccaacccaatccaacaattaggcaacccaaacaacccctcacaagtatatacagatcaaggtttgttagaaacaattcatacaaaatataattctatttttttcattattatgagctagaaccagcacaatctgacataagaagaaagtggtctagttaaagcttacttagaagcataatgaacaccctcattgcaatgtttgctcaaataaatcgagagcccacatatttttatatacactcctgaacatttgtgccatagttattacttttccagaatacttgtttaaaagaaataccttattagctttcctttagttgatcagtagtagtttgaaggctgaattataataatttcataactgacatatgccacacatatgggaactacaggattgcaagttttccgggggaaaggggtaagctctttcttcaacaggatctgtagcagtagataggagagtcttcattttcggtacnacgctatgcttctgaacttggctctttatcacaaaagtcccttcaagagattagttacagtgactggataattacattaactagatcatagggagtgattatttttattttaaactactaaatagactatcatttaagcaagagatgagcacttcagaaggctaagtgtctggaaaactattttctacaaggaaaatatttttgtgtacataattaatcatgaatctcaaattggttagctgttgataaagaaggtggtagctaaaccctaggaaattggattgagtaatttcctagcaatcaccagaagaaaagaacatgtaaacacagaatctttttggtaaacaatattttaggtaattcaaagggcaataatttcaatcgtgaggactgccacatgacctcaacacccagtgtcagaacggccagattcaagcagcacttcagaggtgcggttgagatggcnaaaaatgctgatctgggctgggagtgcaatcacagtgtttattga

SEQ ID NO: 47677 - DNA, 720 bp, Homo sapiens
gttggacaagattatgataattcagaagtgaagtaaaatgcctccctctgatggcaaaaagccaacctgtttgcaaaatcacccttattgaagggtggcatggctgtggtccctccctcctgttacttgcatcaccaaccaaactaaaccaaaccatacctgggcctgttcagctggaccttgaaatcagtttcctttttctctcccctttgcagcacttttcagtttccagctttgtcattctgtggcctttgctgtgacaatgctgggaagggttagaaatcctgtcacctccatccacaaaggcacagttccacgccctgtgataagatatcccctcttctctcccagactgtctccttaagcctttcaaactgagccccttgctgttggggtaatcacccttaaggccgccttgatgcccctctctccaatcaagtccaatagtagcattaactgagaagcactacacctgactggcttcactgaagcttaagtggttgaggatgaatcttcggtgtaaaatcttttactataaggatatattttaaatatttcatatcccatcaagttggaggttaattttatccatcacaatgagtcatgatttgttgcacccaaaaggagcagaaacacaggtgatgagatatgggaggtgggcaccatggtgctttggaggcgttggtaagatgtgaccctctgttgcctatgcccataaac

SEQ ID NO: 47678 - DNA, 1152 bp, Homo sapiens
ttaagccagtttataaagtggaagtattaggagattcataaatcttctatattgagaattggctatgttaataaatattacaacatcattaaggttttagctaagtttgattcatgctgtctgttaaatcaaaactgatctaaatcagaattattaaatgtgaggagcttttttaatacaggaaaagaaacatgtcatccacttgagttaatagttttcctacgttgatgacagccctcatgagtaggcatccacatttttaaaatttcaaattggtttttctactagtaggattgtgtttctagagaaagatacaaggcataggtgattgtttaggattttcctctagcctttgccattacctttttggggatgaggttcacagtagactttgagtgaccgtcccaccgtgaagtgaattctctgagctggtggtgtggtgctggaaggaaggttatttttggagccactctctccccttaagggatatttcccaagggcctgcttcaattctttgaatgactttagaggtgaaaaaatatttttatcggagatgatgcagaaaactccaattcagggagcccttgcgagtatatctgaagcacttatttgctaaggaaacctgaattgatagcagtactgtgctgtctggaataatgtccttgatactgaattgggaccagactggcttttatagtgacaggcaaagaggagtttattgagatcactgctcatggcatttgttgctgtaagaagtgttgccctttgattgttactaacccacggatgggtaaccggtcatacattaggctagtgtttggtaggacaaaatctttttagagctttgagaattgtcatcctgttggtcaactttgaaatacaaatgtttgccctggtaattagcaatgaactgctggcagtttcttcagctgtgtatatacggatctggcttttaattgatgaatcaacttctacagaaacttttgcagggacagtgttgatgaggcagtttagcttgccagggtgatgataaagcccaggtccctgcatgtatagtgctcttctaaagaatatgcattcttgaactacttaactttttaaaaatcacaataaatttttgcactcaaaatttaaaaaaaaaaaaaaaaaaaa

SEQ ID NO: 47679 - DNA, 453 bp, Homo sapiens
  misc_feature (1)...(453): n = a,t,c or g
ttgaanacctctatgacatgattacgaatttaatacgactcactatagggaatttggccctcgaggccaagaattcggcacgagctggaagaattaactgaagtcataacgtgcgtgaattaacagcttctctatttgatatttgaaattcttctgtaagcctgtctgagtgtatgtggaaacgattgtcaaatctaaaatatctatatattaaaaagtaggaaattgtcctagcttaccctaaatttcaaatctgagttgattttgtgattttattgcttataacagagaactcatatttgacatatttttttcattgatgtgttcctggtagattttcacgaatgagctggcaggtctaatgggggaggcggcgtcccagtctgtgttgcagcagcattctcatcgggggtgcgcacaccatcgttactgtcgggcagtaactgccgcttg

SEQ ID NO: 47680 - DNA, 2315 bp, Homo sapiens
  misc_feature (1)...(2315): n = a,t,c or g
tttttttttttttgtttttaagcaaggttttaattaagctgcatggcatccagaagagagaaatgtaccaaagaatccaacctgagaccagattatacattttagaggggggaaaaaatcaatgctatttgggagagggagcactgtaatcagaatataactccaaaataaatcatacaataaattattttctaaaagaaattgatccacatgcagacagatgaacacacacacggcacacgcgtcgcgacgcacacagtgtcaattctagtcatttattcagtgttgactgtgacttccatgggaggggcaccatgagaaaggaaaagattagacatgtgaaaagaaggctaggccccatcttgccaccagtggaatgagatttaagaccactagagaaggaacccactaaattgccagaaacaagagtagaaagaaacagcagttatcaaggaagattttaattgcttcaaagagggaaaggaagaaagcacagaaatctaatgcaagtaaaggcacaatgaatgtggagttgaatggaaccaaacccttccttcggttaaagttatccttttttttttttttttttttttttgcgtgtggttttgatggtggttgtagttttgtttcgttttgtttttaagagatgagtcttgaaggcagagttgtaatggccctcctctctcccctcccattcccgaaattagggtagcttaacagaaagccaccttgaccacatggccagggactgagattcaatggggaaagaaagactgtagctggaatgtgaagaatttgatttgcagttgattgcaggttgggtttccggaagggcagacagctcaatgtagtgccatcatagggcctcagatgcccacactccacccccagagcttcacaaaatggaaggaccctggagtcacccttctcccccacccccataagcactcagcctacagattatttcaagtgatcaggagaattaaaacacaccccaaccctgagttgctctttagcaagtctatttacaatttttttctcacctctccctggaggtaaatctgggtttcaagttgggaagccatggggtgagggagttccccagtgcaatggccgatgacgagtatccttgccactgccagttaacagggctgggatgagctcctgtagacagcagcctcacatccatcagctagggtagccctaggttctcactctgttggcctacgctgtgaaaatgatggggctctgcagtggagcaaatccccatgacagagaaaatcacacctggaatatcaaagtgctttggtccaggttcagtgaccagagaagaggaagaggggcatctagctcatttaaaaacctggaggtttgccctgcttcccagacagggcagtaagaaacaactataacgtttttcccattagggaaaaacatcacaaaaccaaacccatagaagggcttttaacacagcttcctgatgcttagctgggcaatgtctcttccttctgtggggggacaagggagttaatgggactgggcaacagcctcaacatgagaccacccaatcttccacgaaagagacgacattcccacaagcagataaaaagagcagtttaaaaggtgaggagttttagtgctcttgtagccagcccaccttaaacctaaattagaagctttttacaacatacaaaatagactgataactatgcagatcacattcccatcttcaatagtaaatatacatagtaataaatctattattaacagtgggaccaaataacatataaggcagacatttaaacaggtgttgtatcatcaacatgctctaaaaaaaactcatctgactagatctagacccaggcctttttgcatgaggccaagacaacaagtatacaatcaatacccatgtgacacagtccaagtgctggggaatatgagggggcagtgggccatggggaggaagatatcagccccagtgaaaagctggggtttggctttactcgtgatattttgatgctctatgtctgagtaaaggaggaaaaaaaaaaaaacactttgataacgtacaaaaggcatcgactcccatttcaaaaataaatgggaagacttcacagtcaaagttcagtcacttgtcagtatctgccctggaactctgatgcagtatcaactcttgtactctctccttttccctccactagcatgccctctctcagttgtttggtttgtttgttttctctccgtctttatttgtacctttaggtnattcatataccaatattcgaccactcctccccagattccccacgccctct

SEQ ID NO: 47681 - DNA, 554 bp, Homo sapiens
gcagcgagcctgggctggaggagcgggcggaggggacggtcaacgagggacgcccagaatcggacgcggcagatcatactggtcccaagtttgacatcgatatgatggtttcacttctgaggcaagaaaatgcaagagacatttgtgtgatccaggttcctccagaaatgagatatacagattactttgtgattgttagtggaacttctacccgacacttacatgccatggccttctacgttgtgaaaatgtacaaacacctgaaatgtaaacgtgaccctcatgttaagatagaagggaaggacactgatgactggctgtgcgtggattttggcagcatggtgattcatttgatgcttccagaaaccagagaaatctatgaattagagaaattatggaccctacgttcttatgatgaccagttagctcagatagcacctgagacagtacctgaagacttcattcttggaatagaagatgatacttcatctgtgactccagtggagttaaaatgtgaataaaatattttatgcactgcgttagtcatttcaaaa

SEQ ID NO: 47682 - DNA, 862 bp, Homo sapiens
  misc_feature (1)...(862): n = a,t,c or g
agagctctggccaacccagggtccctgcctggtgattcaccccagaagctagctggctagagggttagcctggctggggccagctcaggtccacttcaacagaagaggctgctgggcctcttgtcttcacaaacaaccaagagatcatcctcttgganagaagcagtgcagggaatggatatgatctcatccctcctgacctgtgaggggccctgctgtagatggccacaggtgcctgactaggagcccctaggtccccaggcttgagaaagggttaaaatagaacctccaggtagttttcttcctctacctccacatccccccaagactgaaaagagtcactaactctcttttcccaagccttttataaaactgcaggaacactgtggagatggttcctatctggggtccttttggggacatatgcctcagtcagtcattcagtgattgatccaaaattatttactgagtgcctacctactctgcgccaggctctctagcctctcactactgagttagggtgcaggcagaggctggggcagaatgtttacagccagtgccagcacaaggtagtaatctagtgacagagaacagggtgttatggggagcatatgagaggccatctatcccagcctgggtgatcctggagagtttcccagggttgtgatatgtggcaggcctactcatgggtgggaagggaggatggccacttggctggaccttgtatccccaaaggaccacaccgtgtaatttttgatattatttccaaaatcaggttttatatatagtcattgtatatttttagtgtgaaaaatattaatatattatatgtaaatatttaaatatagtataatgtttttaa

SEQ ID NO: 47683 - DNA, 3134 bp, Homo sapiens
ccggctgcagctcccggcgtgcctgcactctctgctgcccgccgccgacccctccttcttctcgtcccagtgcctcaaagccgaagcccgagctgccgccgcagccacagcccgagggcactatggcttctggagttacagtgaatgatgaagtcatcaaagtttttaatgatatgaaagtaaggaaatcttctacacaagaggagatcaaaaagagaaagaaagcagttctcttctgtttaagcgatgacaaaagacaaataattgtagaggaaggcaaagcagatcttggtgggtgacattggtgatactgtagagggacccctacacatcttttgtgaagttgctacctctgaatgattgccgatatgctttgtacgatgccacatacgaaacaaaagagtctaagaaagaagacctagtatttatattctgggctcctgaaagtgcacctttaaaaagcaagatgatttatgctagctctaaagatgccattaaaaagaaatttacaggtattaaacatgagtgggcaagtaaatggcttggatgatattaaggaccgttcgacacttggagagaaattgggaggcaatgtagtagttttcacttgaaggaaaaccattataaaatgacagtccaagtgccatctggatcttaaggagcttccatttctccagctcagtccattggaatagtattaggttttggttttttgttgtatttccccctttccactgggcccttccaacacaatgaatgaaggaaatatcatttatttaagcagcctatcagtgattgccattagactgttgaatactgttacttttatatagaacccaaggaatgccttcctgtcatattttagccaaaacaactggttatatgcctcccttgcagcaagcactacaatgtatgtgatcgtcaatgtgaatagcttagaatactgcaaaggataagctaattgaatgccttgaaagtattatccactggtcagatggtcaacttttttcagtattatttatagttggcacttgattgcagttctgtgaggcttgagcattcatacacctcacctgccttggcaagcctattttagtgatatggcagcacggatataacactatgcattaaaagcactttttgtaataagtttaatatcctaaaaggaatgccaattaagttttgttaactgtgtcatcaacttatcctagtacctcagtgttcattcctgttacctgcatatcttcttaaaagaaatagctgttattaatgcctttttgttttccattgagtgtacactactgaataagtgtaggagttttatgtttaccatgtgagtcctgcaacactaaagatattttgaatatcagtcatgatggcaatttctgtataaaagagccttaaatggaacattgttttgagatcaaactccccaccctcacaaaaatggccacgttgcaataaaaattgtggcatattacagaacgttgccttgttttccttggaaattttgcaaaatgttatgtgaaacaacttctagggtaaaaacagctattactaatctctgcactggtcatttgagaattttttttgtacagcattcatgtgtgatattttccagatttgttggatctatttggtttaaaaagtattctatcttaaggccaactaatataaaataccattgttaaagaatggtacttttataaacattagtgtatttatttcctatgtgttaatatgaagatcagaaattattttttgcactttggcataaatacttttcaatatctgatttgttctctggataaattagcatagttatttttttattcacatttacatttctaagtagttgtatagtagaagcaggaagctcttattgcttatttggtcgtaatgaaaataatttgtaaaatgtcctttaaaagtttaatgatacttctgatgtttcggaacagtcatttcacctactatttctgaatatattttgcaaattgaattggaataggaattgataatagcagtcttaaacattagtagtgggatttggctatggtccagactgtgctccttatagagaatttgatctgctcagtgtgagcggtttgctgttagccaggggctatttatggcaaacacatgcttttgtatcttgtcatagttatccacaaatggcaaaactggacttgattctactggtatgcaaaacaggcatgctagtaagcagtcagtcgtgggctcaggaacttaaccccatagctcagaggaatgcttttagcagaaaacaggaaagaaaatatcccttaaaatttttttttgaatgtgtggaagtaattttagtataattagattttttccatatttttgaaagatttttcagatgtgaacattaaaatagggattaaatgtctaggcttccatttaaaattatatgaatggtttgggatctttttgcactgaggccaattttatttcaggcttccagctgtccctgtgagttatcctggacatttcgatggtttttggtaaggccaaactctgataagcaaaacagagaatactgacgtatacttaaccatatgtgtaactgatacttggcaccatggaatttttcattgagttatttcctcattcttttaaaaaataagggactataaatcagttatgtagtatcttttgtttttgtagctgattccttaactttcttgtatgcctctagtaatttcagagattaaatattgctttaaactgtgatactttgatttgctagattgacaaaactgatactaatataattaagttcatctttgaaatacatctttgtgcgtagagccaaaaaaagagataaaattaataatagttcacttgttatttgagattaatttggcatttgaaatgatcattttattttacaatcatttataatgaatcaatgttccagttagctttaaaaggtatacggtgctaattagtaaaatattgaaggcaatattttactgctagcttgcaaagttatgagagtttaaaaaataaaatatatgaaaatatgtaaagctgttgagatgtgtttacttatacttcagaacattaaaagtttaaaaactggtatttcagatcaaaaaaaaaaaaaa

SEQ ID NO: 47684 - DNA, 2575 bp, Homo sapiens
  misc_feature (1)...(2575): n = a,t,c or g
ttttttttttttttatatatatatatatatttatttatttttaaaaactccaggggatgtcccaaagttagtaaacagttctgtttcttgtcccttttatggctgcatgcagtttcaattgttcagtacaacagatgaggcatttaaaaggtctccaacgtcaagaaacactaactcatctctggcatatcatattttttaaggcagaagtattttctgtaatggttactacagagtgtttactggttaatttttagttaaccagaaccacacgtcccatagataattccatttaactgaggtttatatccgtaagagcattaccatagaaaaatttccctttagcaatttcaagagacctcagccaccaatatacctaccttctttacaatataaagtgaaatattactttagatgaaaattttttgtatcttacttagaaaaaattaagttgatatttaaaagaattttgatttttaatcaccttccacaacgatttgatataccttaaactccactttcattttttataagagaatcactttcaagggaaaaaaatggatgttactatattttaaaatctgctttataaaaaagtgtataaatatcaatctgccagatatacttcctatccccaacacagctgtaacactgactaatggggtcatgaccatgaagcaaattttacttcctaaatagaaatgtgtaggtggcagaaagcgtatttttcagcaggagtgattctgttggatctctttacaatgtcagagcagttgttagaaatgttagtattttattcggtttcttgctgtgaaggattatcacaatgttgaagtgatggctgttcacccagtcgtcatcaccgtcatcatctcaatcttgggaatcatcagcagtgtcccccacacagagagacaggtatagtggtgcagtttagtgacatgggaatccagtcttagatcctgtttatatcacatttttgtgaatttacacaaaattccatttatagctttaaaactgtactacataacacattactatactactacaaaatatccttctctataaatgcactgaatattttcttgggcattttattaggccttttttagcattattacaaatgctaacaacaagatacttcaaaccaccaaatataaagtcagcttcttaattttctgaaatttagttatttgagttaataaggaattctgtaggaatactgacccatctcttttcatccaaccttcaaaatagttaagcctatttgcccatctcacctaaccttcaaaatagttaaaacaaaaacaaacccaaactagctatatataacaagaatctttcaattcccaaactattgaaagaccctaagtcagccaatctatgaaattatacaagatgaaggtgaaaaagctgtgcttttttttaaaccattaaacccagttcttttctcttaaagttgtaaggaaaatggaaaatctgtttttaaatcatgcaaagatttaaataagcatttttctatctgctctaagaaactgtttcttatcttacaattttaaatattcataacactcaaactacttttttgtggccatttatgtttttgacactagattgtatggtattatttagccaagatgtattataatgctaaattatgtataaaatatgatttctggaatttgtccatcttctattgaagtgccattattaatgcccaggggaactaaaaaagaaaaaaacagtccttgcttgccagcaggtgtcctccatgcactactttccttcaaatccttttgtgcccatagtgggaatctggacctttgagtgttgcacatgctgtgtagcacacattgggcaggatctctatgggttccttgaacatgaccctgaatgtgttagctgtcccatcacaactaaagccggtatcattctgtcccagggtttgctttttctcatattcaatgatctgtatattcacttgataatctgtagggccatgaatagatccatacaagccaaatccaactatagagatccttctattaactgtgaatctgattcgatcactcgtcccactgtaaccccagcggctttctacttgctggaatctattgatgcagcattcctttcccctgagacagcatcttggtcggtcaatgtattcaactcggggtttagggttgacagtaaaatgaagaaagaggtttaccacttcacgatctgacaaaattccagattgagcaggacctgctgcaaattcctcaattgtcatcagtgggaaccggattaaggaaagtgcttttcctagaactttttgtttattcccaaaagtcacaggtaattgttgtctctgacattctgcttctgcccagcgtacaacagctccaaaaagtcgactttctcnnatactgagtgtgtctctctcnaaaactgcacagagtntatctanatcaatatcagtaaacccttctgcacttattgcatccattgtgcttttgtctattgtatctagacaaagactagcaagctgaggttcatcaaataatcgagcctgagtaagtaacataaaggc

SEQ ID NO: 47685 - DNA, 1108 bp, Homo sapiens
  misc_feature (1)...(1108): n = a,t,c or g
gagctgtgtgcaccgcatgtgtgctttccacaggggcgtctctgcgtccacgcctgcacatcccggcgcacgtgtgggcaccacagaggacacgtgaggggaatggtcaccagtgagccatatttattatttctagagaaatcacgaactgctttctgtaattgcactgtggataaatgttccgagagtctccattgttgtacaggatcttcagttattcgaggggaatgaggcaggtcaagccgatgctagccactagtttgattttttttctgttttatagtttgcgctgcatggtacttgtgaagcttaaatattttgagtgttctactgtgtctaggattgttgggattgtacatatggtactctttcataaatgataaatgattctgaatgttagtgttttatgttcatataggaaatattttcattgagtccaaaatacctgttttgttgatggacttgaatgcatttttgtctcttcttgatgaagcggctttgccgcagcaaatgaggcttctctctgaggagctgagaggtcttgcagcctctccttgtcattctcccaccccacatcccattttttaaagcccttttggtaaaaaccaacaggttgtcggccgcagacctcagatggacccggcccatccctggggacgtgctggcgtggcaggtccagagagctgcaccctgcacggggcaccgcaccgcttccctccgcgcagctcttctgcctggttttcggaggccaggctgctgggaggcttccgtgttcctgtcagtccttccttcaagaagccggggaactcaggcagactcatctccgcagagcataccagccgtggggaccgtttcgacttgaatgatgtgtgcacacttcaggtggtggggacttgagctttaaaaaaacctccacagccgaatcttctcctccgagccactccacgtcacgtccagctgggcctgggccagtctgtggttatccatgtggggatgagataacaccagatcctgcagctgtgaaagggggatggacaagggacgacggccgaaggagaagcatcagcagccgacanatagttcgggttcgggggcttgggtgggtcct

SEQ ID NO: 47686 - DNA, 1603 bp, Homo sapiens
caagatccagctgctgcgcaggtcagacccagctgcttttgagtcccgcctggagaaacgcagtgaatttcggaagcagccagtggggcattccaggcaaggtgattttatcaaatgtgtggaacagaagacagatgccttggggaaacagtctgtgaacagaggattcactaaggacaagactctcagttcaatctttaacattgagatggtaaaagaaaaaactgcagaagaaataaaacagatttggcagcaatattttgcagcaaaagatacaagtctacgcagttatttcctgcagaaaagtttgatttgatctggaaccgggctcagtcctgtccaacatttctatgtgctctgccaagaagggaaggttatgagttttttgtaggacaatggacaggtactgaactccacttcactgcacttataaatattcagacccgagggggaagctgcagccagccagctggattttatatcactatcctgaacttaagggaaggaaaaggggcatagtgctgatgactgcagaaatggattccacatttctgaatgttgctgaggcacagtgcatcgccaaccaagttcagctcttctacgctactgatcggaaagagacctacgggttagtggagacctttaacctcagaccaaatgagttcaaatatatgtctgtcatcgctgaattggagcaaagcggacttggagcagaactgaaatgtgcccagaaccaaaataagacttagaactgtacaggttggcccttcacctagttgactcagccctcgatagtctagagcccaccccctcctcaggaactcaagagctcagcatttataatgagcagttggtaatgagttgccctatgtgcttgtcgcaagcagtcacagagatgagccctattacttgatattcaggaacaaaggtacctgaacattctgataattatctcagcatacttgaggtttccttttttaagtgttcgaggttataacaagagacagccaaggcccctacaagacagttgacttgattttgcacagtgtaacagcgcagttgcattctggccactttgaccttatagctcccaaatgatgagtttgtcatctttatgaactcatgacaggataataagcttgaagacctgctgtagttagatatgggctttaatccttcccatgcaccagtcagctgaacaaaagcataagccaaacatcctgtttaaactgtagaataaccagatattcccatcaggttaaagacttcatctagatgatgccccccagagatgcctttagtgtaagtagctggcttggggtatcagcaaatttcaggtatagttagataaacaggtacagggcctgcatactattaaaccatagtttgtggcacccgcttttctaactccacctgttagaagctatgtgtttgaaggaatgaatcagtgcagtataaataaaattcttttgtaaggagaagattaatcctggtttgcatgatttttttaaaaacaactctaaacatgatacgaaaaagtgtatgaaatcaaatgttcccagattgtatgtggggaaaatatagctataattttttttttaaa

SEQ ID NO: 47687 - DNA, 1083 bp, Homo sapiens
cgctagagatgtttttggagggaatcagtgggactatttgtggcatggatggcctattcctcctagaacccacgtaagagcttggatgatttagttggagaaaattgcacctatcaccaaatgcaaatttgattcccacctccacccccttttaggttatgggagttggtgttgggacagggtggcagagaatattggagtcaatcctagcttggtctcttgccttccctcttttcctccatccatcgtggacaatgcctgcaaaattttcacaggaagaaagcctattcaggatattaacttgaaatttccagtgtcctaagagcctctcatgaagcccagttctaataagtggcaagctgctctgccggggtcatctcctgggtcatcggactgattgctcaagttctgcaggagaggaagcaccattagaacaactccatcagaacagctccaccgggacttgtgggcctaaattttcctggcctaacgggtctgtctccaaaccctctttcctaagagctgagcaaaccaaccataataaacttgacaaaagactttgttgtggccatgacagagataccgactcaggagggctacctacctaggtgtgatcatgctgggggctaccttctgagtatatttgtgaaagcacatatttgggaactctggtagcttgagttgggaatgggaaggttcttttttacagaagtacttccccaggggacttctgtgtgtcacagtcacctctgatgcctttatcttgatgttgcattggggaatctcagccatcagcccaagtgcttgttttattccaaggcaggggtaatccccgtcaacttactctaacctttgctggaaaactaatcttgattcattctactctggaaaatccaaaggtgcttctgagagataagaagggaagggggtaagaaggaaaggtgccccttgaaatgggaattgagcccgttaagaatttaaaagcttatctcacctctgctggggacagtatttgcaaccaccaacccctctccttaacctggctttgaagcgataatcctttatcagataattccaaactta

SEQ ID NO: 47688 - DNA, 1742 bp, Homo sapiens
ggtgtgaatgtaccaacactgaatcttacagcagttatctttctatggccattaggtacctagcagatgtgcacaatataaacaaaaagatatctggcctaccttactactaaaagcatttaacacgtgcatttttggtacttttttttttgttttctaaaagctacataaaggccttatttgacattttcactgataactgatcgcaccctcatgttgcagtgttcgtcccctattcattaacagtgtgtgcaaatgcaaccccaggacacattattgttctgatagatgctcacagggaatcaagcttctcgcccactccacggctctgagccccatccaagggcaagacttggtgcccagctggaaggacgaaagcacactttgtgaccgccatcctcaccagctgcatgcctgggctgcacactgctgaacgtgctcctctctccttctctgtacaatgattcagcatctcggcggaagaggaaaatggagctttttgaggctcgccaggtcccttttgttttcaccattaaaattccaaacccaaagcctttgtttgactgaaggagaagagagggaagtaagcttctgttcagcacctgaaccctagaaaaagagccagtttgctacgatgaaggtgacatttctctggtcatttatttgagagttcgaagtcaaagtcgagggggcaccggctttggttcatgtctaggagccctctgtcagaatccttgaagccctttaatggtctaactggcatctcttgtatcaagaagtacctttaaggtagaccttttcagggtgccctcaggaaagggccctgctcatgtttttttcctgtccccttagaccaaccccagggtgtccactgcaggggttctgcctgttcccaaactttttccattccaggaacaaaggagaagccactttccccagggacgcaggactctcccctccactgtccgggacagcgttcgccctttagccgggaggtcattacagcctcatggcctctaccaaggccccagatcacaggatctcctgggccttggagcacctcacgctgggggaatcaatccctgagggactcagaatcttctccgtgcaacctggaaagttcatctcttgtttccttcagtcaaagaaagtccattgtacataacaaaacagcccccaaacagcccagtgccgacaccattgttcctttcacactttcctttgttgcatgcagttgggttcaaatgccaaatagtgattagaagacgaccattctgatctgtgtgtgatctggtcactatgtgactgcctttacggtttctctccatgtgctatatgaatgaagaatgcataccagtgttttaaaaggtatttttatgtgtttttaaacacttttttaaatgagcctgacacctgtgtttcagcatttggagacatccccatgttattcttttaagtgtataattactgatacttttttgtttgtttgtttaactaagttgtgtttaacttatgtgcagtctttataatgtatgtatgttattacagtttcaactatcatattttctttgattacatttataatttgatcttgctctgattataatgccagtgaatgttgctgaactctttgtatatgcaaattgcaagatttaaaccattctgatgcaaggataaacctttactttgactaccagcctgtgtttttgtctttaaatctcttaatttcattcctctgcaaa

SEQ ID NO: 47689 - DNA, 1258 bp, Homo sapiens; identical to SEQ ID NO: 3548

SEQ ID NO: 47690 - DNA, 1641 bp, Homo sapiens
  misc_feature (1)...(1641): n = a,t,c or g
caaatattaagtaaataatttaatgatagaacactgaaatttctttagacacagtattttcaagttatatttctgcctggagtacagatatgaaatagcacaaactgtactctgaattaagcaaacagaatgaataaaaaaaaaatattctcccaacctaagtttccgttcctcatttccacttgcctcagactctttctattgaacatatctagttaaatctctaatggacggcctgtgggaagatttactgccaacagggatgactgacttctttccggacactgagcaggggactgtgggctctgaagcagtttacttcctgtggaaagccagtcccatttctattttacttcgatccaggcctattcagataaagcaccactcagtagctactgaccatttaagtatggagagaaaagcaaagtagaaaaatggttttcacttaaagaaaaagcaaatggaagaccagccataatagctccatggcacaagagacatgacagggatctcctccccagatgtcccctgatgtttgtcagcctctcatatccctggccctctggcttctggctctgtgattacagttgccacagaggattcatggacagcaaaaagcttaaggaacctggaggttttgtacaacatgtacattctgctgacagaaacacatacatggtatggactattattaaaattgatagcctgcttgcactcagtatacaggctgcttaggaacactttattgggagataccctgctggtgttggagcagcacaaaatgatgaggctaacttaagtagtgacaagaatgatcctcttataccatatggccaaagaacagctgtccatccccaagtctatgggggatcagatgaagtgtggagtttggttggttggtcagtgaatttttggtcagtgaatacatacatatggcatagtgaagnncnantgnnnnnnnnnnnnnnnnnnnnnnnnnnnnnnnnnnnnnnnnnnnnnnnnnnnnnnnnnnnnnnnnnnnnnnnnnnnnnnnnnnnnnntaatcaaccacttagaaaagtacacacattaagcagaccctacatcctagaatgggttaagcaaccatttataagcatcttcatgagaaatgatcacctctgggtttttctgatatttgaaataaacaaggtactcaaactgtatttccctcaacacataactgtccaaattgcatgtacaagtggaggtttacgtaaaagccctgacagaactatattccaccttttgaattaggtgcataaggctactgaccactctatattttaccaagagcaagagcggtcacttttctatttcagtacaattatggacagaaatgatatgatgcaaaatagaggttcttccataaagtttaagatgtagggtagaagggaagacaaaaagcaaaattcccaagaaatcagaataacttcacactggtcttgtactccaagaaaccctgagatgaactgtagtcctcaaacacctgtgcttggctcaggcccaccaagacacttcagtatgcttccaactggttcatcatcaacttcctgctatattcgtaggccaaaaagagtgctccattggcagggaatgctcgaatcatagtaggtttcagtc

SEQ ID NO: 47691 - DNA, 736 bp, Homo sapiens
  misc_feature (1)...(736): n = a,t,c or g
gcatctagaaggcaacaaattgcaagtactgggaaaagatctcctcttgccgcagccggacctgcgctacctcttcctgaacggcaacaagctggccagggtggcagccggtgccttccaggggcctgcggcagctggacatgctggacctctccaataactcactggccagcggtgcccgaggggctctgggcatccctagggcagccaaactgggacatgcgggatggcttcgacatctccggcaacccctggatctgtgaccagaacctgagcgacctctatcgttggcttcaggcccaaaaagacaagatgttttcccagaatgacacgcgctgtgctgggcctgaagccgtgaagggccagacgctcctggcagtggccaagtcccagtgagaccaggggcttgggttgagggtggggggtctggtagaacactgcaacccgcttaacaaataatcctgcctttggccgggtgcgggggctcacgcctgtaatcccagcactttgggaggcccaggtgggcggatcacgaggtcatgagatctgagaccatcttggctaacatggtgaaaccctgtctctactaaaaatataaaaaattagccaggcgtggtggtgggcacctgtagtcccagcaactcgggaggctgaggcaggagaatggcgtgaacttgggaggcggagcttgcggtgagccaagaacngccactgcactctaccctgggcgacagag

SEQ ID NO: 47692 - DNA, 1246 bp, Homo sapiens
gctagtggtcagggaggcctttccgcggtgggatgttgagctgaggccggaggagaagtagcagtcgctggcagagcacacaggctgctctgggggatgagctggtgcgtttaaggaacaggccagcactggcattcgcaagcagtggggaaggggagagatgccgaggtggtcagtatcctgactttcagaggcctttttttgtttgttttaatttttgctagattgatattaaaaactcatgtggaggaactcaaggaatgtttagaagaccaaaagtccccaatgacaggaacaaaagcaaccaatttttaactttctcttctcattcctgttttcattgatttcccacatgtagtccttttgctcaggaagtctttggggaaattaaggatctttgaagctctgaaatagggtgatccaggttagtggtgttctgttcagctgtctaagaggttgggaaaatgaaccactccaaggttagttcacgaaaatactgaaagttttgatttttctttccatatttgaattaattttttctgtttgactggaaggggtttttgtataactaaaacctcagcgcataaaggagatttaaaaggagcacatgatttagtgggtgggccatgaaactagagatgggatttgggggtgaatttgtcaatatctggattttaatccagacatctctgctaacaagcctttggtaagtcacttcagatacttttcctcctttttacaaagagagggctggcttagttatttgccaaagccccttccaggcctgaattccacaagtacgatttactgtagtgtcttatcactctttcatgtcacaatagcgtggagcattagagaaaagcctagacttttagttgatagccagttgaaatatcattgatagaattttagttttaggaaaaattggtttgatttctagctttattactattagggtatgtgagcttgggcaaatcgcttaatctttgagtctagttttctctcaaaatgagaacattaggctaaatgatttccgagtttccagctagtcctagagttctatatttctacatagttgaattattttatcatgctgttgctggggaatatgactaacccttttgaagctactaattttatgtcgagctttaaagtccataattgttatcttcagaaaatattatttgacctacagtatgtccaaatcaatttaataaaatcgctttataatcagggaaaaaaaaaa

SEQ ID NO: 47693 - DNA, 463 bp, Homo sapiens
ttttttcatttttacttagctgaatataatgaattccgctgatggcctatttctgaaatccaccaatcaaaggaaattgtaaagttcaccatagtaacagctctgtgtcagtggcccgcgtgagaaccacacagcctgggaggcaccgcagctgaggaggcactggccaatggtggggcagagtgatgttaccatctcatagcaaccaagggatctgcatggcaacatcagttgctcccttttctctccgggttcagcctttcttcttgattttgatgggtgcgggttcttggccccttctcatggggctctgcctccagtagtacgtgctccagctgacttgcattctgttttacgctcagccatcttcaaccaggcaatgtggccgtctcgagctgcccgaggctggacgtgcagtcagccgagcacacaaaatgagaactgtttccctgcgtgcagctgg

SEQ ID NO: 47694 - DNA, 980 bp, Homo sapiens
tttatggttctcagataccactttaatcaggtttttcactatacagtgatgggggtagaagatggtgactgttttcaagcaaattcacgaggcacatgttcgtccctgccccaaagtgaacagtctgggcttcccagaacagaaaagtgctttccttcctgggggaatcccattcctgagctgacaagacagatttcagtaagaatgagcacaaaggatagggcaaaatagtgaagggagccaggtgcatatttgaattctttccagtgcagactggaactagacatgcaggtatccctcctaaaggcaacgcccaaatcccagccattcccactagaggccaaaccgcctgcccacagagattgacagccaatgttcatctcataactctcctcccagcagtgcaccagtaaactcagatgcctgagtgcttgtggccaccacacaacagatgcggccttcctcttcactggcccctcggctgctgctgggtctgcctggccatcaaggagcagccagtatttgtgtggctgtgtggtgtgggaagggccagaataagcaacaaagccaattagatgtgggttctggggctctgtcaacatggtagcaggacaagtcaccacccacagtaggaccatagggccctgtgtcctccattaattcttctctgggcggtttctgttcagcacagctttcggggcaaattctagcttgtccttaaggctcaccacctgcgtgtggtccttgcctagaagctcatccagcttgcgatcctcccggcgctctgagatgctcttttcctcctccacgggctgggggtcctttcccctgatgaaccattccaggtggtaacccacagccccgaccacgaaggcaacagggaatgtgacataaggagcataggtacgaaccacggtccaaaacacaggccacatgacatctgcggcccagcccacactccccagtgcgggcccccgctc

SEQ ID NO: 47695 - DNA, 1075 bp, Homo sapiens
  misc_feature (1)...(1075): n = a,t,c or g
gcttaagccagtgacacaatattttgcatttttaaatggtgattctcaccaaataatgcctccccacaaaagaggaaacctaataatgccccaaatcctctttttactccatcttaatgacataaaaattaagtgaattagagaactacaatgatcttaaaataatttttcagccacatttcataaatgtggaaactgaggcacggatctgtttttgcctatgaaagataggtcctgtaactgttacacagtttaacacttctgaaattagaatattagagatcctgctaaatattacgtattgtttccttggcctctcttaatagtgccatttatatttttaatttaccagagttaggctcattaagatagtgtttgctttgaaatcaatgtttctgtggaaactaattttaacttttacagatattgattacgggcttgtgaaaaggcaagtaaaggaggaatgctgtgctatctgggcattaaaacaaaacaatacaattaaaagttaaagagaaagaaaaaggtaataacagatttgtgtggaaggagggcaaaaaaacttcacacgtggattatctgttggagaatgtgcattgcaaaaaagatgcaaaatagcaatcctccctctagctttgatggaaaggtgtttttcccatgaaccgtaggggatttttaccaagtgaaanatgatttgaaatggagggcatgttgttcaaccctgtggtttgggaagggctgggacttttcaagttaggtcttcccaggaggagttccttttgagaaagttggtccaaggcactttacggtgtttgccggttcccaagcgatgggccaggactgttggcttaaaggtgtttccaagtgcgattttgggccccttcccgcaattgtcccggggtttctttagagatgttggaagggtggtttggaaaaccctgggggttttccggggccccctaacctttatggggaccccccgtggaccgtggtgcggttcccgcaatgttttgtggggtcttgttccgagtccccccttaaaaaaaactttgtcgcgcacccggaagggtacggg

SEQ ID NO: 47696 - DNA, 1150 bp, Homo sapiens
  misc_feature (1)...(1150): n = a,t,c or g
gtcttgtcacatctggccctgaccccactggaccaaaaggggcagcactggtgcccaccatacacacaggtgtctcatgtgactcacagtgctaaagactcatgcttgacagcttggtaaggtcaactctgtagccctgcagacaaaagctggttaggtttgggtttgatactttagatgggaaagtgaggggcttgagaangtgggtgggaggagggaaggattttttaggagccttaatcagaaaaggactagatttgtttaagaagaaaaatgaaaccagacccagatcaatattttaggatactagatgttttaatgggttcagaatccagtttgtaggaagattttttaatggttttggttgctcctcccccagctgccaccccccaccttacccttattcctctctgtccacattttctgccccaccttacttctcctccctgacagacatccagcccctagtaatacttaaggcactatggcacttagctttgaagtgacacgaccctgtcttccttccgcccgctggtgggtaaccagtgccttccctgtaacggtaatgctgcagaactgcaaccttttgtacctttctttggggaatggggtgggggtgggagaggaggtagatggggaagaaataccccagacccaacaaacctccagccagaaagccagctattttgcatttgaaggaattgacttcctcattcattgagctttttaaaagatcacaacctcaagatggttaaaatccattgacatttgcactttcaaacatgacaagtctcggagctgctgagatgcacaggcccctggcctttccacttatgcctccttttctccttattcctcctacctcccgccccgcccaggtctggagttactttcatagcatttttcactcttggcttcttttctcccttgatggtcaagtctcttatgtttcaatatttcttaactggggtgtcttataacaaaaaactcttaggtctaaaatgagaaaaaagagagaaaacaaaatgttatttttataccataacttgagtgtattgccaaaatttggaaatccttcccatgcctgatgagtttatatcccagaaacattgagccatcagaatgaactgtgtacctgatttgttctctg

SEQ ID NO: 47697 - DNA, 722 bp, Homo sapiens
gtggagaattaattaccactttttgtaaaatgtttttcagattccgtgtctggtgactgtaactttaagatgccttttataaggcacataaataatctggcacaaatctttatcattttgacagagtttcttttatgcttgtgttggtgattttgttgcatttaacccatggggacttaacatctctgcttttccaatcaggagcttggttctaaccttttgggagatgattaatggagagaggttgagagagagagagagagagagagagagagagagagagagatgtttcgccctcagcttttgcttccattttttttttaagaactctgggctaataacttctaatctttatagaatatttcaaagaaatatatttgttcttaaagatacataggtttgagatattgagtgctacaagcatttattttggttttaccttaacatattatgattcctcagttttgttggcatttagtaattatgtttatgtttttatcttatcaaaaaatgtcttcttacctttgatatttataatcactcctcggtcatgtaaatagtttgctttatattttactgttttaaagtctgtgaccttacctgccctcttctgtagcaaagtgcagcatttaactcaggaagctatattccccccaagtgtcattaatatttgcataagattaaaaacactccaccgcgcccagccaagtaaaattaaatat

SEQ ID NO: 47698 - DNA, 2170 bp, Homo sapiens
ttcagagtggaaactgcagggttttattaacacgacttccaaattacatacaatatagttcaaacacatttttttggtacgaaatcacacaaatgaaacacacaacagtacattttcctttcaactacgtcattaccattcttcacacagatcctgaaaaagttaccacagcagttaacgcgaagtgaacaaaggggtggaacaggcaacggcattcccccaaggtaggtgtggtgtgtctgggagaaaacaggatggagatcaaacccagagaaacgcactcccgtcatctctccatgtctcaatttccaacgctctcccagtcaacacaggcttcgcccccaaccagagccacccggtgcagcccgcagagtgtacacgcatcagggccgggaggccccgtcggcaaagcagtaacacacggtcagacggccgccacctccaagtggagtgagccacgctaccactaacactgaactcaagcacaagagctcctgcgaaagcagaggggcgggaaacaaagaagcgggtggttaagggcacgaaaccgcacactgcgggacgccggcatctttgaatcgcccactcactcctacagagccaaactgcaaaacaacagaattaaaaagttactctctccaatcaaagacctggaggaataaatcgtgagtgaagacctgtcgaagcaaaggttgagaggtgatggagaggtgatggagtggtaaacacagtgtgaaaatcgtcagcaccttcccacccagcccacgtggagttcctcaaggctgaggcggagcagagtggcaggaatacggccctcacccagttgaagccaggaggtggagggagaggagcatggaaagccagggagatgggaaggtctgagagagtgagtcttggaatgggacaggagctaccagtgttaagaatggtagatgggtttagccaggaaagcaaaacagaaatggacagagagggagagcccagagcatggcatggtgaggtgatcccattactaaatgaacagtagcaagaagcaggcacgtggagcaaacagaatcagctcagacatgaaaaaggtcacactctgtgctttgctgctgtggtacctgaaaattaaacagtggaattaaagccccagagttcaaatcctcacagaggacaccatcctggatcccacgcctgtgaaaagcaaagctggattatagaaacgagcggtggctttttttgctcttcggctcagggcacccctgtgtgctgtgcgcgcgttattgaaaatgttacccacctaagaaaagactacagaacgcatacagctagaacgcatacagcttacacagtccttgcaaaaccaggcttcccgccacgggtgcccttaaaatgaaaagcagtttaaaagaaaatcatgctaaaagaatgcatgaggtctactttctagagtatattaaattattaaatacagaatacattacaatagtacctgtctgcctatccactctatggaacatattaaaataaaaaactacatgctgtttctttttaaaggcctacatttttctatataccttttaaaatcagtaaaataaaaccaagcaaaatatcaacatgaagacctccttctcttttagttggttagaagtcaaaggaaaaagcaagtactcagaagtgtctcactaaaatacctgttccgtccgccaatcttaaagatttcctaccaaaacatgacacagaaaagagagagttgagacattaaaagcattttctagccaaggcaggttacaatgtgtgaggcaaacggccttttccagccatatgctaccagcagaaggtatacctggggatccaatatgaatcagtgagttccgctttagttccagtacacaaaccacgggcttatgcacctcagaagttaggcatttaaaaaaaattaaataggttgcaaaaaaaccttacataaaatccttaggatttaatattaagtcaaggctaaatgcctttggagaattcatatttaagaatgtccaaaataacactccattcacaaactttaaaaatagctgaaaaagttaactgaaatgctctttaaatacactaaagtatctaagcctctccctagtcgatctggactagcggctttccgagtggtggtagtcgggtgcctccgaacctttcc

SEQ ID NO: 47699 - DNA, 1129 bp, Homo sapiens
tttgttcttaagttttgattactacatgggacacacaggtaacagaaaaacaaaacaaaactggcatctgggaggctcagggaaagggaaaaaataataatgatctttatttttcagacctgctcctaaaagctttctcctcctcctaaaaaaccaaacacaagaggtcctcttgctgcctttccatggactgtggcggctgtggacttggacccgtctgctgagcccacacctcggcttcctcacggtgctgacgaggagaggcagaggactgccttggctcctgggctctgtgcagaactcctccagagactgtccacacttgataaggtgggactaacaaactcatgtcatggataaacagaatggtttggaactcagtcccaggcaggccctctgaagtcaaggcctaaacccaatgatccagactggacagaggcccgacgatgggaagccaccttggatccctgttaacctcacaacctgaggcgtgcgtgcccggctggggcacctgaccttgtgaattcgttgtttctaggggaccacgtgtgccctctgggattgcactcaggacctgtctcagcctggaagacattcaggtcacgttcagtttcctggccagtgttctgctgtgcctgaattgatgcctcaggccaggtaaagaagattcacacagattcttctgtctctccagtgggctgtggggcgtctttcctggcatggcaactgccgaggtgactgctgaggccatgttcagtcctccgggcccgaccatcctgcttggagtggcgtcatagccatggtctgctgttgcctcagacgatttacctggttattgtcacggcccgtcaaagtctgacctattggggtccatgatgaggtagcctgtttcacacttaggtcctgtgactggatcattttccgctgctcttgggaaatctgctgttttgtgacttctcttagtcctgacaccctggagtggcctctggtcagtggtctgtaaactgagaatacatccttggtcttgtgggctcttctttcttatctcacatgaattgtcttgttccagagggctattgcccctcggacctcgcagggccgcggcggacacggcccgatcggggaagtg

SEQ ID NO: 47700 - DNA, 1093 bp, Homo sapiens
ttttttttttgcctcaaatatttgaccatttttaaatatcatgatttttttctttctgatcccacattttgacgtgtcaaagcttagagcaggaagtaggaatccacactttcacggagggggaccagcctgccatgtcgtccccaggctcacagcagcggcggctactctgctggtggtttggtggcaggtggagatggtgacggcgcattggaaaccgtaaggcatgacaacgggaggcccgcggggtgtttcaggcgcgttgacgcaggtgcatggctggcaggcggcctctacagaaggagggagcgcaattcacagcctcttgacgtagtttccggggaaagtaccaaagaatttggttcttcttgaggtccccacaaaccagccgtcatcacacttttccatgacatcaatgacatcactttctctgagctccagctcatcttcattcctgggagtatagttatacagagcctgaaacggttcccccccaccttgaatattttcatgagtaaacacaggacgctgtggcttatttgagctcaagctgtgaatcctatcactagaatagctgtggggtattggagggtcagggtagtcctcagcaccttttgtgttcttcttgacgacctccacataggaaacagggaagatgccttgtctgttggttcctgggattttaccttcataccagttttgatcaactcttttaagaagaataactctatctcccctgttatgaatatgagaaaaatgcattagaaacagagatagaataacatgaaaatataattgtcaatgttttctatgaaaaaataggtttccatttgggcaggttttataccttcagtttttgtttaatcaggggagggcaagtaaggtactagtgcttactagaaaaatacacatgatcaacatatatgtaattgaaatgtccattcaggccatcagaatcttccctaaggatgcctggttaatgtgaacgggtttatacttgtttatgctggtattgtgctcgtgccgaattcttggcctcgagggccaaattccctatagtgagtcgtattaaattcgtaatcatgtcatagct

SEQ ID NO: 47701 - DNA, 454 bp, Homo sapiens
  misc_feature (1)...(454): n = a,t,c or g
gggcggcgccgggaagcgaccggctgctgggcttaaggcgggagtgaccgcttaaccagtgagggaagcactgaagagcgccagtcgacgtgggtgcgacaactcgcggagtcttaggagcaaaacgtctggggcctgcgagccaggacccttctgaagccttaggtgtctatcggcgacgtgtacggtcactgcagctccggagcgcggaaccctcagccaggaggcgcggctggtcggtcccaggtcccggcctccgtaatgagagcccggaaccactctttgtgccgcagcttcgcagattcctataggcaatggaaactggatctcaattcccaggacagaaaggacctggacaagtttattaaattttttgccctcaagactgtccaagtgattgtccaggcttcggcttgggtgaaaagattttncactttttcatcatgcttcttgc

SEQ ID NO: 47702 - DNA, 2526 bp, Homo sapiens
tttttaaattaaccagatctgtcttttaatagttaccagaatttagatgttaattccccagaggaaaaatgtccatggcacagtttttctggaaaagttcacatgtagacagtgaagcttctgaagttaggcgtcaaattagtagtgacaatcttttttttaatcttgaaagtccctagttttaaagaaagtagaatcccatctgggggcatgtctgcatcacagggtatcactcaagagtcatcatcaggccaaaaagactctgaagggaaccaggagggtttggcccttgctgtggaaagatgctactgaaagtataagagaacaccctaatgcacgcgtcaggcacgaaaccgtaccatgccccgctaagacatgggaccagagaacacgtcaacgtcaggccgctccaggaaaaccatccacaaagacaacagaagctaacccgaggtcgacactgccatgaagagtgttggctgaaaccgcagttaccagtgtctttactggacgcgaacatccctaaggacacggctgtgctgcttcctaagcatacgtgaccacgatactgtctttccccgggtctccttagcgccatcactgcaccaggcccaggcatgcctcaagtcctccagagccttctcctgagacagcactaggggccacgtcagaccccaggctgcagcccttcaccgtgcccgtccccggtccggtctgccctgctggggccggtgggtatcatggggacccctgtgtagacacggacaccggagagcgtgggacaggaggcgtctcagagctccccacccacacactcaagggtcagcgtcactcatgtttccttctgttcccatggtgcctccaaaagggtttccaaacaaagtcatcattgattaccctggagtatgtcaaataagcccaaacaccagcagcccagataccaccaagctagtcaccacatttaaaagaagatgagctggagaacgaagcagccctctgatggacccagtcagtgcagtcgggactcagggagacacccggggacccctgcccagctcccctgccggaggaaagactagggaagggaagcagaggaggaacgaagggcgccggcagagagagtaacaagtagaaacttcgccgatctgggagcaggccgagaaactctgttgagctgctaaagaattcttcattctcatgtgattttcttcatttctgtcttcccagttactaccaaggagctaaggaaagttcaggaatactttgtttagtgtcgccataacatctccaaccatgcattaagtttaaccaaaagctgcaatattccagattcttaaattctcaatggcaaccaatttatgctcaagttgaaaatctggcaagcaccgtacgccttcagcacacgcgtgggtccggattttcccatcacacacacgctctcccccgtccaaggtgcctgtttacttctggtctgcgcgggctcaggtttcaaagagcttgctgaaggcggcccccacctcggcgatcatgtcggaggtggtggtggagcgaccgtgcttctggaaggcttggtggttgcactgcctggtgagagagcaggcgccaaacgcggccaccaggagagggctggacccatttgttttctgtggtccagcaaggagcgcccagtgtaccaggacgcccagggagcccgacaggaggtccccttgccctccagcaccctgcggctgctgccttcctggctgcacacaagcacctgctggccgttggagaggatgtcgcgctctccctttctggaccaccgtcacgttgccccagggctttggcttgaagtctttagcaacagatccatggctgtcatcgctgtccatagggcctctgagcacagcgtcatacagtctgctgaactccacgtggttgggagtgagcacagccttccggtagccatggatgagggccggctgctgagcgaccagccacaggccatccgcgtcgatgacaacagggatgtccctggcctttgacacttccaaaatgccctggacatttctgagaagcgcatcatctctacccaagccaggtcctacgacaagagcatgcagccggggcagccacttctccacctcatgaacagcattggggctgtcaagaactgggtggacgatcagctccgggctgtaggccttaatcacaaggtgcggccgcactggcacagaacacgtgggacaagtctgcgcccactttgagagctgagattgctgcaaaatatggggctccagtgtactcctgacagcctccaactacgcctattcttccatcttgcccttcgtgctttgtggaagacagaggaggtatgatatttctcaccagctgcaaagtattttccatatcctttatcgaatgtgctttacgtagcgaaaacgctctttctaaaactcgtctgcaagcccggattgccccacagcgaggacccagggccatcgggcagcattccggattcccagctgcccccgcgcgtcgccggaaacc

SEQ ID NO: 47703 - DNA, 1367 bp, Homo sapiens
agcattggggctttccagctctcacagaaccttcagcatccccagctgccggtcttggcatcttcgaagtaaggagagttttagatgcttctggatgttcaatgctagcacctttacagactggagcagctcgattttcttccgtatttactttcaagagcaagaaaagtgctgggctcccacttattttctccctgtggtgttccggagttctgctccatatccaccagaaagctggcggcccacggctttggcgcatccatggcggcaatggtgtccttccctccccagaggttatcactactttttagtgctggactttgaggccacgtgcgacaagccacagattcatcctcaggaaatcatccgagttccccatcctaaagctaaatggccggaccatgggagattgagtctacctttcacatgtatgtccagcctgtagtccatccacagctttaccccattctgtacagagctcaccggggattattcaagccatggtggatggtcagccaagcctgcagcaagtgctgggagagggtcgatgaatggatggcgaaggaaggcctcttagatccaaacgtcaagtcaatttttgtcacctgtggagactgggacttaaaagtcatgctcccagggccagtgccagtacttggggcttggccagtggcgggattacttccaagcagtggattaatctgaaaaaggcttacagctttcgccatgggctgctggcccaagaatggacttctagacatgaacaagggcctcagcctgcaacacataggccggccccacagcggcattgacgactgcaagaacattgccaacatcatgaagacactcgcctatcgaggcttcatcttcaagcagacatcgaagccgttctgattggccgaggacaggatggggcaggacagggtagctgtttggcccagcccagaatcctcctctccctcaccagaggggaagagggagagtggcatagctctgtgtccagagtgtccccagctgccctgtgggctcatgcccttggcgtgggcttgtgcccttgcaagggcttggccacttggcccttctggagcagacactttgtgccccccatccccacccctcaatctcagcccagtatcagcccctcccattgcgggcctgggctagggggacccaggcactcaccgcctcctccctggtacacaggcttctgtggggccaccaagcccctcctgtgccccctcccatccatagtgcatggtgtgtggtgcccccagggctccaggacagatcaggccccaccttgtgtctacccccatccccgctgtgaacgtgccactgaataaagtcggggaaacgaggcaaaaaaa

SEQ ID NO: 47704 - DNA, 857 bp, Homo sapiens
  misc_feature (1)...(857): n = a,t,c or g
attcggaacgaggccggcggggggtcaggatcctccacaggtaggcgcagtcagctggagcgtcgcgacggtccgcgtncgtggagggcgtgtcctgcggcgcgatggccgtagtgttgccggcggttgtggaggagctcctgagcgacgatggcggcggcggtgcaggagagcgcgcgaagtacgggaccgagttcctgatgaatatctgttatcgctgaagtttctctttgggctcatcagccacccaggccttggacctagttgatcgacagtccatcaccttaatctcatcacccagtggaaggcgtgtttaccagggtccttggaagttccagtaaaacatacacatgtttggcttcttgtcattactgttcatgtcctgcatttgcattctcagtgctacggaagagtgacagcatcctgtgcaagcatctcttggcagtttacctgagtcaggttatgaggacctgtcagcagctaagtgtctctgacaagcagttgactgacatattattgatggagaagaaacaagaagcataaaaggtacagattgagcatcattctttcaaaatagaatcctgtcaagaaatgcattgaaagcgtcatgattcacatggaaaagaggtgaaatggatcttcagacacttcatgttactgtcccttttccctccaggactgcaggaggtgctgtgggttggagccgtgggctgtggagggtttgtgtatgatgagaagccctgtacagtcttctcaagaaataccctgagccagtctctgagacgcttcggtaaaaaatgtccctggatggaatcaagattttaaattcaaataaagcctaatatcatgttgtgtcc

SEQ ID NO: 47705 - DNA, 756 bp, Homo sapiens
ggaagagagtatgtgtatgtgtgttcctgtacatagcatgggtgcagctgtggatgtgtgcaaaagagtgtgagtgtgtgtgtgtgtgtgtaagggggtctgttcctagagcccacatcagttttgttgtgaatctgggaaaaggggtcggtgagggccgggagatgttgaccctggtgggagcaggctgaggctgccccgttctccacatcctctgttttgcccagtctctgattccattagggggagtgtgctgaagccattctcggatgcttcccagaccaggctccctctgccagagtcacatgcatccgagctgctggtctccattgtccagcaggaaggcggaaaggcaggcaagatggtgtgaagcttaaagcttgtatttgatggaaaaggtctcccctgttcatctgagaggccaagcctggccaccccaggctcagaacctgggcttcaagaaatgtgctgggagctcctaacttacacatccctccagccttccttgaatcctcccaccaccccctatttcctttaatttctcaggtctgctccctcctcccccaaccccacagctgggcaagaagtctgcaaaagctgcatctgcagctgtctctaactcttcccagccatctcccgtattttttggtaccttgattccttgactcttaataagccaagccaccttatctctgtagttcttatttttttgttgactaaatttggggggttcttttttatggcatgtcactgacc

SEQ ID NO: 47706 - DNA, 2204 bp, Homo sapiens
ctaactgttctctgcataagtccctggtcccatgagttctaagggaatggaagctgctctcaaagtgaagaatccctcaggtgccatgaacaatggaaagaagggaccctctcaccttctttgcatggcttcctagactgcaggactaagcctgcaggagcaagaggatgactggactggtcctcacagaaccatcatgccccagggatgagctaggactacagtggtgactttctttgaaagcctaaaagttccagggttaggtatcaaagggagtaaatatgccacaacgttttgtgcacattaactgacccagatctgtaagactcctacccttagattcccaaaagagcacagacagcccttggaaccaaactcaatttttctccaagggcttgggtcaagtttcattatagacatttattttagttttattttcaaagtcattgacctcttgtatcagatttaaggcaaagaagaagatacatgtcccaggactataggccaggctgttgactgcactgggatttagatggtgtaatctcccttagttctaccagggagacctcagcccaggtcttgttgccggggcacagttgagcactggattcaggtagagggctcccaggtcagtctgagagttaatgaagagattaaaaagtctggcagaggacaggactcttacaggtgactggcttggaggggaacctaccagtccttcttccaacttgctgctgaaatcccagtgttcttgaagacagggttatgatcctcttcaccaggtctggcgggggtggggctcagaaggtggccaacccaccctctgagcccaaatattgttcccagaatgctcaccttgacctcaccctgtggctcgcctagacccagggttggctgtgcaaaatcatgcttagggaagggttgcagagaaacctttgcaccagtttcctgggtcttcatcccagccagtcaatgtcatcgtcatcatcatcatctccaaaaaggggcgttgggggcgggcgtcccttcatgctcacctcgtcttcatcctcctcctcaggctgtgcctttgggcctcagagctttcagagttgcccctttaaacagttcatcctcttcatccccagagagactggaacgctgggaatgatggctgggtctgagggctgctcctgcaaactgtggaaacctgccctctgtgcttgaacagctccttgtggggaccagtggagctagtgacatcatctttcttgagctgtggaggctgaggctctcctgggcttttcaagccctaaggccagtgggtacccctcctcggggtctgaagtcagggacagtcttgtggagctttcttgtagtgggccatctggtgctacttccctgacacagacctttcctgatgggttgtcgggcttagctgccattgggctggcagcaagtgactcctcacactcagagtccatggatacagggcctaggggctcaggtggaattgaagtcgggggccctagaactctgtgggatgggatgcaagacagttcgggtggaagggaaccatcttttatctctgagagtgcctcagcttctgagtcccctttccttctgtgtccatcctgggaagtggtgagggcctgaggaggcaacgggacagcttcctcgaccacctgctctgagggcaccatgggggactctggcctctccctattcaggggtgcttgaggctgcccagaactggctgaggctgactgctcctgggaaggtcttcgtggccgctcttatgctttttcttcttcttcttcactgctgctctcttccttctcttgctcctgttggtttaacagctgaagagtcaccatcttgatcgtattcatgatggttcccagaatggtcctgccattgtaagattcctccagctcaaactctctccgtaaggactggaacacctggttcatgatcttcttgaccttctctgaggggtcagatgcagcagcttcaaccccagacatctgggacttgttcttctctagttccttgatgtgctgttcattttgcttggtgagagctgtgatttgggcctggagggctaaacacttttcctgaagttgtaccagcttctgctggtaggcatctctctgtgcgcacacctcctggtactgctgcaggtgctcatccttgggcggaggcaacaaatgttcacattttgc

SEQ ID NO: 47707 - DNA, 297 bp, Homo sapiens
  misc_feature (1)...(297): n = a,t,c or g
tgaccatgagtacgtnctggtcgaggaagcggagtgtgccatgagcgagagggaggctgccccaaatgaggaattggtgcaaagaaacaggttaatatgcagaagaaatccatataggatctttgagtatttgcaactcagcctagaagaggcctttttcttggtctatgctctgggatgtttaagtatttactatgagaaggagcctttaacgatagtgaagctctggaaagctttcactgtagttcagcccacgttcagaaccacctacatgggctaccatttacttttcgaagg

SEQ ID NO: 47708 - DNA, 1476 bp, Homo sapiens
ttttttttttttttttttgttgcatcactttattttaattgcatgatttatcagaacaactattaacataccgaagtaccattcagttcagctgcaggtataggcagtgacaagtatctaattcttagaagaatcacttactcccacaatctgtccagacacattaatctaaggacaagtttataaatagcaaacgtgattttcacattgcagtgttctcaagaatgtatatacaagtgtgtagtcctgttgatgggatgtttccccgagttctttctattgatgcgttcatgctcttgaccctggtagagacagttctttctttccacagagcagattttccttttgtcatccacccatttacaatactctgtgaattagtattacttattacatttatgaaacggcaatatttggattgtaatagctcttcagtacaattccttgtgtcttctggtaagtctctgcactatcagagagcttttagttataatcattttcctgcaacaacagccaaactcaactattgagtttcagtgtgacacaccctctttgtagcttgctgggttaacccttggcttcaagtcctgatgatgtaatgagggtggggtgtattggcaatcagtacatttccttatcgcaatttacagtcattgaaaatcatgctgtcattaatcccagtctgacataccttttctaaaatgttcacagtgcagtgtttttgtggcctaacaaaatttttctcatatcattaaaaataaacatttttataaaaaatataacactttaaatgtttacgtcgacaaaaccagttagagtaacctacaccacatgcactatacagtagtaagcacaaaattccacagaatgaagcatcacaaagttctgctcagggtggctattccatctaggtgaaatagctgggattttcaattgcctttttcatttgcttctaaagtatgttttgcttaacataaaacacaccctaatgcaaaataaaactccccaaaagttttgtttccaattgcttgcgaggtgggaacctgccaccgagacagaggctaatcttttcaatccatccaccctttctttgctctacctatgagctgtgattggaaccaatgaaccttttagtaaaatgtatcctgctttacaaacatgctgagttatctttaaaaatatttatcaacaaattacttgtcttattttgagttttcatttaaaaaaatacacacaaaacatctacatgttcacattcattagatcagagtagcatcattctcaaacagtgggtttttatatgacaactaaatatttcatgatgactaaattatttcatacaaattttcttaatgtcatctatgtacattacatcctgttcatttataaacatgttttgtgtgatgctattttgaaactttgactgtattgcctataaatattcttccaaccaaaggaatgtctatacaaaaattt
